United States Patent Application Publication US 2013/0096032 A1 - sequence listing, part 22

SEQ ID NO: 698 - DNA, 87835 bp, Arabidopsis thaliana
gatcatcctcttcaggcgtagtagtctcgaaacacttaggtagggttttacagaggaagaagatgccgagggagataattacgcttcaggttggacaatgtgggaaccagatcggtatggagttctggaaacagctttgccttgagcacggcatcagcaaagatggtattctcgaggacttcgctactcaggtcctctttcttcgaattcgtttctatgcatcgattaattgaattccatggttgctggtttgttgttgttgttcatagaattgtggatttgattgatgaactacttgtatgtatgtagggaggtgatagaaaagatgtgtttttttaccaagcggatgaccaacactatataccaagagctctcctcattgatttggagcctagagttatcaatggtattcagaatggtgaataccggaatctctacaatcatgaaaatatcttcctttctgaccatggcggtggtgctggtaataactgggccagtggatatcaccaagggaaaggtgttgaagaggaaatcatggacatgattgatcgtgaagctgatggaagtgacagtctggagggttttgttctttgccactctattgctggaggcactggctcaggtattttactttttattgccaatccctatcttcgtttagcttatgtttattcactgaatgacttttttttatgtattttcacatgaaggaatgggatcttatttgttggagactttgaatgatcgttatagcaagaagttggttcagacatacagtgtatttcccaatcagatggaaacgagtgacgttgttgtccagccctacaactcactgttgacgctgaagcggcttacgttaaatgctgattgtgttgttgttcttgacaacactgcattgaacagaattgctgtggagcgtctacatttgactaatcctacttttgctcagaccaattctttggtgtcaactgtgatgtctgctagcacaacaacgttgcgttatcctggatacatgaataatgacttggttggcttgcttgcatctttgatcccaactccaaggtgtcacttcctcatgactggatatacaccgttgactgttgagcgccaggttagatatctcaatcagttttataactaatatcatcaaaccatttttatgggaagctgctgttatctggaacatgacttctgaatgttatgattgacattttcattgatttcctactctcttatgtgaattgttcttggcaggcaaatgttattcgtaaaactactgtgctggatgttatgaggagacttctacaggtgagctgtttgctttctccagtcttttttcgaaaattgaattagattttcttctaacatgattgtattcgcagacaaaaaatatcatggtttcgtcttatgctagaaacaaagaagctagtcaggcaaagtacatatcaatattgaatataattcaaggagaagtcgatcccactcaggtacttttatgtactaatttttttgttcgatatattgaggatgaatcggtaattctttcttgttgatgttatctgctctgttgtctcactacttgatattaggtgcatgagagtttgcagaggatacgagaaagaaagcttgtcaatttcatagactggggaccagcaagcatacaggttctaaccgaattgcgtcgtcaaattaattattgcttttggatttaccatggacttgcatcacaattttttccatatcttactctcaacaggttgctctttccaagaagtccccgtatgttcaaacttcccatagggtaatcttatatcactctatatatatctgtcatgcactcatgctgagagttggtactccttacagttaatgtctaaggctgcagttcctgctttagtagatacatcgaagactcttaagtttggtggtgtatttgatatttcaggtcagtggtcttatgttagcaagccacactagtatcaggcaccttttcagcagatgtttgagccaatatgacaaattgaggaagaagcaagcttttcttgacaattaccgaaagtttccaatgtttgctgtaagttgactgctcaaatatatcggctgatgtttagtgcaacccaccctattattagcattgacagttaatgttgaaatcatgagaatctacatgttgatatggacaggacaatgatctttcagagtttgatgaatcaagggacataattgagagtttggtagacgaatataaggcctgtgagtctccagattacatcaaatggggaatggaggtatataagctaagcttttgccatctatagtcacacactaaaggaagaacttataatgattatcgaatatatgtgactctctcaggaccctggacagcttatgactggtgaaggcaatgcttcaggagttgcggatcctaagttagcgttctgaacaaaaaataaaaactcaagagtaagtcatatgatgtttcacttttaactgagattttcaggtcatgataggttttctttggtaggatcagtagtagtaacgataaagagtgttggcattgtaaaccttgaatagtattatgatgtggatgagtttcaatctatgagatgaatgtgttttttttgggtactttctaagattaagagcacctaaaagttgcatagcaggaatcttgaattgtattagtaacatatattcttggaatcctatgcatattgaagttacaccaatgtaacatcgtggacccctcctaccttaaagtttgtagctgcgagaaaacaggttgttctaatagtgcagcaacaaaaacaacctcgttttaaccttgagatgcatgcttattaggtgagtgagtgctaaaatataaaagattttcttttgggtcggcaatacaggaatttattcattgatggattttatctaatagggtttttaaaaaatattaaagaaaaaagaaggttttatcgttatctaacatctcttatgaatttattatcctacataagttgtcaataagaagccttgtttcctttttctttctgtatttcaatataagataaatttctgaaacctggaacaacaacatctgcgattgtttctgggtattcattcttttcacaaagtgtaaagctttaattttcgatttcgcggagctcaaagtttcaaacttttccatgtttcttgtttcttctagctctgttctgtgtacgtcgaagcaacttccctagcactttctcaattattttaagttccaattctcgatgactgagcttagctctccgaatcttgactccgcctcgcagaagccaagaatctccaccgaaaaccctcctcctcctcctcctcacataagcattggtgtcaccaccggtgaccctgctacgtctccggcgagaaccgtcaaccaaatcaagaaaataacggtactgccactagttttcctgatattctacgaggtctcaggcggtccgtttgggattgaggatagtgtgaaagcagcaggaccattgttagccattgttggattcatcgtcttcccttttatatggagtatccctgaagcactcatcactgctgagatgggaacaatgttcccggagaacggtggttacgtcgtgtgggtcactttagctatgggaccttattgggggtttcaacaaggttgggttaaatggctaagtggcgttatagacaacgctctttatccgattctcttccttgactatctcaaatcaggaatcccgatactcggtagtgggatccctcgagtcgctgcgattctggtgttgactgtagccttgacttacttgaactacaggggtttaagcattgttggtgtagcagctgttcttctcggcgttttctccatccttccgtttgtggtgatgtctttcatgtcgattccaaagcttaaaccttcgagatggcttgtggttagcaagaagatgaaaggtgttaactggagcttgtatctcaatacactcttctggaatctcaactattgggattcagttagtacgcttacgggtgaagttgaaaacccgagtaaaacattaccaagagctctgttttatgctctgcttcttgttgtgttttcttacatcttcccggttttgaccgggacaggagctatagctcttgatcagaagctatggactgacgggtatttcgctgatatcggtaaagttataggaggagtttggttgggatggtggattcaagctgcagctgcgacatctaacatgggaatgtttttggctgaaatgagcagtgattcttttcagctacttggaatggctgagagggggatgcttcccgaggtctttgccaagagatcgcgctacagaactccatgggtcgggatactgttctcggcctctggtgtgattatcttgtcatggttaagctttcaagagattgtggctgcagagaatctgttatactgttttggaatggttttggaatttattacgtttgtgaggttaaggatgaaatatccagctgcctcaagaccgttcaagatacctgtaggggttttgggatcagtcctcatgtgcattcctccaacagtactgatcggtgtcatcatggcatttactaacctgaaagttgcgctggtgagccttgcagctatagtgattgggcttgtgttgcaaccttgtcttaagcaagtggagaaaaagggatggctcaagttctcaacaagttctcacctaccaaacctgatggagtaaagaccaccgaagatggtgatgcttttggttttacttttgatcttacaggtaatgatcattgcttctggattttggatcagaacttaaaagcttattctatgccttactagatgaagacttttcttttcaatggattttggatttctttgatttttcattatacagtaacttacaccgcatgggagacatttctgatcatagaaaaaggacaaaattacttgctatatttcgccatcttacacaatcctcttagagttttagtcgattcattgacaacaagggatagtctacgtacaagaaagaaaaggaaacaacaacaacaaaacaagaagaagaaacagtgaacacacaagcttatgttagtatgttacagatagtatatataatttttttcgtctatccaaaattctcctaattaataacactaatgtttatgacttatgagtctatcacttaacactaattacgtttttaaccctttgtaaccctaattggctcctgcttcatgttgtatataactgctctcagaaacctaagtcgtcactccctctcccttggttctttcttcctcttgaaagctagaaagaagaaaatggaagaagctcttagcgaagctcttagcagctttgacttcgatgaacttgtagcttcgcttgctgatgccatcgcagcaacatcgactcccaagcctttggtggaattttcactacatgctttgatggctgaattgtttaagagaactaaaaccttacccaaagctgaagtcagcaggacattcttcagagctgtttccattggcttgctgagaggtaacattaggaaagatcaactggagagaacttgtgatgctggtaaagcaattatcaaaagagttgctgcaattctagggattgaaatcagagacaagggtcaaagaaagcttgttctaacaaacaaaactgtgactttctcaagaatgatagctattttccctcactgggctagccagctaatggtctctaaggagagcctttttgtcaacaggtttgcttctttcaatgatgccaatagatttcctgctcaaactcataagcttcctattgctatgcttcactctggatttgctggtctgattccaagagaaagtgatgatatggaattcatagaccttatttgcatgtgtcactctgctttcatggctgagttctctcttctgattactcctcaagaacagagaagttttcatgcattgtacgagaatcagaaaagatataccgaggctgctcgtggatctggattcaattctgatgaaaataggatcgtttatcttttgagatttgggttgttgtcttctgatagtcttgataagatgttgaaagttgctgcaagggtttcaactttgagtgcaaggcaagaagaagcaagtgttacaagagacagctttacgatcgttgaagatcgggtcaagatcgtaaatgatgatgcaaagtgggatgagctattgaaaaaagccaagagaatagttgatgcttcaagttcaatgaggtctcaggttgctgctgttgactccttagatggagtttgatttagtgctttattgagcttctttcttttgtttcgtttgatctgttcttaagtatagactttctagtctttcttttaagtttctttagctattgccatttccttgctgagaggtaacataaggaaagatcaattggagagaactagtgataaagcaactctcaaaagagttactgcaactcttgggattgtaatcagagacaagggtcaaaaaaagattgttctaactaacaaaactgtgaccattgatccattttatgtttgtagaatgagaagaggcaacattatacccatggaggatttcttggcacttgctccatctcctcacctccacacaatctattcagcttcttgaccagggcctcttcatcagattcgtcttcacacccgaaatacctttcctgtcaatacatttgcagctgaaattgtaagaaaatgtgttttataacttttaagctgaagaacaaacggacaaagcataacatcaactcacaggataagaaaaagcttcagaagtaactttgaggaggactaaaggctcattgtgtactccatgcatctttgtagagggagtaaaagtggctttttgatcattaaataagacacaacccatttgagattaaataagaaggaacaatttgcatgtagagatttcagcgaacaaatacaattctctagatataaacaaatgcataggatatacttaaaagaaatgagattatttatatcacaataattaccatcttcaaacttggttatcacccattctctcaaattagataaaaagttgttataaaattgaagctatgtatcccataagcaaaagaagacgaagctgtgattttccggttaatcagcagaatctgagttaaaaccgaaaagaaaacagtttaacaagaaagaatttatcttctctcatatcagaggagtttgcgtttaacaacaagatgcatcatcacaagtcacaagatacatcaaaagatacatgagacttcatatacttagtagataaccctaacttaattaggaaaatcaagcagagacaaacacatccaccgatctccgcctctcgaggaaagagaacgccaccaaccccctgaatcgaaatcttaccgtcggtgtaaatgtcaggatcgtacaaacaccctgaccagacaccgtcaccaaacttaatagaacgttgagtttccctagccgaaagcatatgtgggaagtaaaatgtatcaaactttatcatcccagatcttctaacacaagcataaaaactcttctcagtctgatactcagggataatgtggtaataccaaatttgtttctcactcagctgatccatcgtgaatctcgctatagcttcgtcgtccggagcaagaaccgttgtcgaatgatgctttttctatgcaaaatcaaaatattgttttagtgagctagggcacaaattaactcatcagcatcatcatatttatgagaacactaaaataagaggttttaagcacgaaatgactacttttctaattaattatatttgaaaaagtgactaatttttaacttatttcattttaaatctctagctatttttagttatatattagataagaaaataaaagagaaatgagaatgaaaaaaatatacatttacactaaaaattcgcataaccaaaggataaactagggagggattattggtttattgatttataaggaattgaaaatccaaacaaaaatcatttgttattcaatcattgattttaaaattctaattaaaaatcatgtgttattgattcgatgatttataaaatactagttaaatcctttgttattcgtttagtcatttgtttttggatttgagaatccaaattatgttttaaatggaattgaatggatttgaaagagaaaaatataaggattcaaattcatgggtaaacacatgttatttcaaaatctatatattttgatttcataattaatagagattttcaaattctatatagatttacaaatcaataaaccaaaaacacccctaacattagtaaaatgaatcataaaattgtaccattgctcctgcactggtagacatgatacagtttcgactttttgagtcataatgcattccaaattttaacaatgattgacaacactaacttatggtgacaaccaccaaactaaagttagtaatagattacatgaaaagtccccatatatcattatttgactacagctttcttcgaaattcatttcaactttagtggacatttattcttttttgaataaaatgttaaattatatttaaaagaaaataatttttttacatcaatagttgatgcttcaacttcaatgaggtctcagttgctgccgttggttgactcagatggagtttgatttaatgattttgctccctttaacctctttttcgtttcatctgtttttaagtttagaccttctttattaactcgtttctttaactagattaatgttaatgttcttacacaatggagagggaggattgttatcccattccatggtctttggtggttgtcacattttcctcatttagatcctttttgaggccctagatcacatatctaaaacagaaacagacaaattctaaagggatagttttatacagatatatatcatgaaaaagaaagaacaagtacaacagtttttccaagctgttttgctgtctcaaaatatcaaaaaaacaaaacaaactgataatctttctaatctcccctttgaaatatttttggtgactatcattgactaaaccaaaaagaaagaccaaatgtctcgaagctaactgtgttgtcactgaccaatatcaggctaaaagcttgagaaggaacaactctcaaaaccagttagattcgagggtatcttctagacttttgtctttgttcttcgacttcattcatccaatctgaaagccacaagagtcccttatagccatagtatgaaacagcagctagcatcgccactaacatcacgaccatcagtatcctctttgtggtgacagcaagtttctgcagagaaattacaaattatatcatttttcatcttaggatattagtttttttcctcttctattttaccattaatttcccttttacgtttaaaccttcgttaaattccttttctatcgcacaatactattatgaaatcagcttttttttttttttatgtatataatgtattcgtaatatttcattaccaaaatcatattacttacattacaatacttcctaagttcctatatatactttatcgttattaaagtaaaatttctacaaaaccttacacactttcttttatataaaccaaacctcccttcgccaccttcaccggagctccaacatgacttcgaaacactcatgccccagcgtaaggtggccaataataaacagaatattgaatataatgatgataatcatgttcatcatatgcattctcataatcctcctatagattgtgcaatccttctaccatcaaaaccacgctttatcttccaagacgtcaccgtcttcaacttcaacgtctccggcaatccatcggacctcaacaccccagtagtccaattcaatctctcctttcgtaaccctaacgccaatatccgaatctactacgacacccttgacgtctacgctttttacgggaacgggagccaacagatcattatcccgactcctatgccttcgacttatcaaggacacaaagaagacagcgtttggtctccttacatccccgtcgttccctacaacgccttgtatcttgacgatcagcaccactcacgtgacgggaacatgttgatgcttcacctcgacggcagaattagttggttactactcggtaactaacctcggcacccattaccaccatcttcacgttagatgtccagcctttatcgactttgggagtagtgctgccagagttatcggcggaaataacaccgttaagtacacgctcaacaaaacttgcagtgttagtgtgaaaagacattaacggtgacggccgtatcaggccacgcgcggcttttcattattttaatcacctaatatattgttataactttcttgtagctgttaagttttttatttatattttttacctacgtcatagagaaataatatcaagaattgcaatcggttgcgttattgttatgacgagttttaaagattcaaaagaaatacttacaatatagtaaaagataaaacttttttttttcaattggtaacaatttatgatggatgattcaattaaatacttattgatttataattgaattttagaaatataggagaaaatcctgactacgtcaaaacttgtgttataaaaaaatcaacttgtgttattagtttatcattgtagtgtacgtaattagaattatattaaaatattgctacaaatagttttcatgcattcatatatctttaaaattttcataattttttatattaatatgtggaaagtctctacatttttcttaaatttaaacatttagcaccatttttgtttatatatattacaacccataatttaacttcaaaaatcttgtttaagaagatgttaaataaaccttagctttgcttcgctttcccatttgtctttcctctcaacgttagccttaatagcgacaccatgtatatattatcgtgaacgacatatagaaaacaaaaaacaaaccaacacagtacttgagaagttgagaagactaataaataaccaaacacagtttcttgagactacatgcatggttaagttagttaacaaacacagtaaacaaatatcaaatatgctttagaaatcttggatgaaatcatgaaagatagtatttcttcttatatattgaagttttccacgataaaagtcatatgtatataatcattgtccgaccactgttgtaaacaatatcgaaatgatctctgattgaatttagcatataataattaaattggaattgaaataacttggacaaacatatgaatactaattcgagcacaccaaaaaatcattgttttatttttgtgaaacttttttaccaaattcctgaatttaaaagtcgaaatcatatacaattgtatgtgaggctaagtttgcccaaaaaagaaaaaaatgtatggagacaggaaaaattctgaaggggtcagataagatttatggagacagtacttggccgaccaagagccgcgaatccacatagccggtatgacctcctttagtgttccatagcaccatcgtctaacgtttaaccaacgtcacgtcatggctttcacatcgtggatattgtttgtcagacaatttgactcatatatcatgactagagaagaacaaagtacaacaatttttgctgtttcgaaatatcaaaaagctaaaagaaagagaacaaatcaaaaaaacaaaacaaactgataatctttctaatctcctttgaaatatttccggtgactaaaccaaaaagaaagaccaaacgtctcaaagctaattgtgttgtcactgcgcagtatcaggctagaagcttgagaaggaagaaactctcaaaacagttagattcgagggtatcttctagacttttgtctttgttcttcgacttcattcatccaatctgaaagccacaagagtcccttatagccatagtatgaaacagcagctagcatcgccactaacatcacgaccatcagtatcctctttgtggtgacagcaagtttctgcagagaagaaaccaaaaaaacagatggtgtcttaaggagaagttaagacatacgagacatgtgtgttctcggattttttctaatcaaaagacagtaattacctgcagccttgtggtctcctgaatgtcctgaccccgtccacgccttttccttcgctttgatgcatttttcccgctaggctcctccttctcctaagatgtttgattagaagaaagacttgtgaaagttgctttaagagtgagattaattctgaaagctttttattgtttctgtttacctcaatctctttgacattgcgctgtgttaacaccgattcagccacctgtagtttgctcttacagttggaatcacaagggaggaggccaaccccgaactggttctttggtacttctttaggatcagaacctgtggccctatgggctgcttgaacatcctggcatacccattctttcttcaaggttaggcacttgcaacgaacaaccaccttgatccatgataaaatcgagacaagtaagatctcacttgtaacagatacagcatcccaaatggatataaactggcaaatggatacctttttaccacacttctctggcaatggacactgcccaggatgacatatctccggacacaaatgggtacagtttggcaattttctgcaacagcaatatcctctagtttcaaaagtgtggttttctaataatgttattcactaaaatataaaaataaagcttgggaacaagtgagttaccacaaggaaaccatcagttgttcaaattgaaaaatgaaacacaataatacagtaccagcgtgttagttacctgtgacaaggtccacggcatgagcgcgccttcatttggtccttctccgacattgtattgtagtatatgcactcgaatgcatgcaccatcgcgccacagtgacatgatctctttactagagttttgcaaggtggacaatcttcaggatggcatcgccgaggacatggatgttggcatcgtggtgttctctcctgtacaatggtatgaaagataaggaagactggctaattgactgactcagtagagagcttttaacagcttcatggagttaaatatgtttatcaaaaaaaaaaaaatgtgtttatcagaagctatcggaacaatgcaagttattgtgaaaacagattcccaactgcaatcaagacccgagcgtaaagatgatcgagtaagtggtgagatacaaaagataactgataccttttgacagcggagatcacacttttcacaggactcacttcttttatccaatgatgaacttcttatatccagggcatgacagaaatacgaacagtaatggttcccacatggaagagggtttccacataaattatcgcatgcaaattgagttctgtcagagcaaatcatctaagccaatgaaaagagaaaaacatatcaaatgtcggaagaagatctcaaagtccacaaataaaaattaacaagttagatattggacatgcatctgaaataactaatataaaagagaattgagactcacccttttctctgctgccaggtggtggcctacacagggcctccagacaggctctggacaacgagggcagggagaacccggtgtagattcagcctgaatatgcaacatctttttcgttggtttcagtataaattcacggttaggaggaggtctaggtccatgacacctatgtcataagaagcacacaaaaaccaatgtttataagaagggaaatgatcagagtaggaaagaaaatggatgaaaaagacaccagcatgagaaaccttagtttgcacttgtgcccacatgggtattcttcatcacaaaggagtcgacatggaggacaagctccatagtggcatttatgaggctgcatataaacatgacataaatttcgcagaattcaaacatagaaccagtcacaaaagtaaaatcataaaatccttattctaactcttctgctaccttttggttttgcccatgtctgcacaatggggttatgtggcataatttacggcatctaggaggtttctgatttgtttcagtgccacagggtacctgaacaacataaaacatccaactgcgttattaatacaggtttaacatacagtaccagatcttctatcagagaatacagaatatattaaaagtatcaaacatttaaaagcctatggacacaaaaagaagaagcaaaatatctataacaacaataggcataaagtcatcagatatggttctcaggcttagactaaacaagacctcaagatcattctttccgaagataatttagtaagtttaagcttatagtctcgcttgttaggtgtcagtaacatctcctgcttctaccagttgcatctacccaaaactaagaattttctatagatccaccataacaataaaagtaccaagactatatatcacgacttgatagtaagacgccatattgatgctcaaatcctaattctcacctcaaaatgtgtctcaccacaagcacaagatattgttaccattattggacaaggagcacatggacctctgcaatgaacacgcaacaaataatgtcattccacgtgcatgagttgatatcttgcagtacacaattttattagtcatatcgtcccaaatctgaaaccaaacggacaaagaaagtccaaagcaagctactacagaacatactggtgacaaggagactggcatttatgattcctgcaacggagcttttttccacaaatctgaaaaattcaaacaaacaaattagaagccaagcgtgaacaattgcactaaactggaccaagagacacatcatacctctgagcatggtggacattcaccatcacaacatcggcgtctacaagcatgacgtgcacaatctctcactctctggcatttcctctcacacgccaactcttgatggcaaggaacctactctaaattaagttcccaaaatctttccatcaacatttgattttgactataataaagcatcatgaagtatcaaaaaggctctctttcacctgttttttcgttactccgcacctgcaagacttggtaactacaatcctgcaagtctcaaggcacggaccgcggtggcacctctctggacacctatggtagccacaaccaagaactttatcacaagtgccaccacataaaggcgccacaacatcacaagacaagccttggtagaatctcttgccacagggacaactcctcttcccctgatatggacacaatccacattctcccgcgtggcatcctctctcgcatacatgtttcccgcaattaagcatattctcgcaagaagcctcacacctaaagactctctcgcagcaatccttctcctccttcactttaccacaagagcacttgtaaaccgcgcgctccctgcaaggtggacactcgccatcatgacaaatctccctacagttatggatattacaatccaggactctctcacagacatctccgcaagagaattgcttgtgtccacatcgacgaacatcttcaacaccgccgcagaagcatttagctttcacgagcttgggacaagaagcacaaggtccagggtgacacaagagtaagcaacagtgaccacaattgttgctcaacggcctctcgcagacctcgccgcaagaatgaggcaagatccatggattatccgccggaggatcctcttccttgccgcagtaacaaaggtaccgccttggaatcttcgatttctgatacgacgatctacatttcggacagttccagacagcttccggttctgtcggattcgaagaaggtcgcgtgactgcacgcgcggcttgtagatctaagcactgacgagcccatgattgaatgcagaaaaggtgaaagacggcgaagcatgaggaagtgcaggaccatgtaggatcggttcgtttaatgcgttcgagacagataaggcacgagacagcaccggaagaagacgaggcgagaaaagattggatcttagcgagatcgattgaggaaggggacgaagatgagtggcaatcgaggtaagcttcgaagatggagtttgatagatcattgtgacggtgctgatgattctctgaatcagatccggagtctgaatctgaatctgaaatgggttgctcttgtgacggaggctgtggtggtgatttccaccggaactcggtggtggcggttccggccatattagtcattcttcttcttcatctccttcttaaggacaaagtccagaaatttgggggggaataagaagaagaagaagacacgtgatgctctcgtgagcattgtaatgaccaaattaccggtttaatttggatttaccggcttagttaagacagtttctagcttatccccaaggacttctcgcgttatcttctcgaagttgataagcacgatcacttatctatgattatcctcttttccttttttgcaagagaattaagtcatttaacatttccttaaaatcattccgatttaaaacagattatctaactcgaaaatacagctactcagttttgaacaccctaaatcatccaaagatctcatatacaaaaggatctctaaactcaaatcaaagtcacagcccaaagcataagaaacttgtggtagattcaatctatgaaggcatgttggagctcatggcttgatgtattctcgaatgaagtcttcaatctggatggtttctccggtaagtccagatgcctcagcgacagtgactttgttggagcaatgcgtgaaggagaacacttctccctcaattccaatggtgaagtcattcgctatatcagcagtagagactgcactccttgaagccctcagtttctcactgcaaaaactcatcaaccaatgatgattagcttttatgcaggaagataggctttatatataagaaaattttgtcaagaaaactgaaattcttacatttctttctccatttgcttccggataaactccttggtgtgtgcagtgagtttatcggtcttgttacagcaaaggaggactggaatcttcttcttgacaacattcgcattggtcagaatctcgtataggtacctatcaccataaaaaaccatggcaatgcctcattttcaacattgagatgcaaacatatgcaaacatgtctcttatctgtgtcttacaatgcgtgtgtgtggaagagagagggtgtttgaaattactctgaagctgcacgacagtttgggaggaactccaaggcatccactacgaacacaatggcagctgcttggggcaagaattcttctagcttgggtcgaagccgagagtgcccaggaacatcaacaagatgaacaggcttgatttttcctttctgtcacaaagagcaagcacgggacatggtttagtaatatgttattccatccatcacaatcaactgcacgtgttgtttacaacagaacacagtaagattctttaccttagtattttcactgtgaagaacaaaagtgccttcatttggttccattgatgttacagtgccctgatgcgacgatccatctcggagctgccaatcaaacaattatcgtgttataactctccaacaatgacctagtcactcacactgactcacaatagtgacacattacaaaaaaaaagtacatttgaaggaaagtcataaacaatattcatatgaaaaaggtaacgtcaagccaaaacactcacttggtaaaagagcacagtctttccacttccggtcagcccagaaaggagtacagtgttggatttggtacgtctgaccaggcgaactgcataccccagcaagaacaacaagtttagcaacaaaagatcaaaagtttgtttatgtataatcaaagaaaaatcatgaataaacctcagaaattgcaataatagttctaattccaatacacaaaatactctggcttaatcacaagtctaaaatggtaccatgagaactataacctctgcagttgtaaacaatagcaggcagaagaaaagtaattgaagacatttagaagaagaacaggctatatgtccttatcaatggcaaacaagatactaccagggggagatcttacataaataaagcaattctactaggaaaggattaagaaacaacaaagtggtgtctaatacatactggataggaagagcaagatggttgtaaacaacaaaacaccaatggcggcatacagctgattcggtggtatcttctgaagatattcaattccttgatgcgaccactgctcagccagaattttcagatcttccaagttctccattactctctcaagtttcacttcttctgccaagctgttcaaaacctgcatccagagatgtaattcattcctcttaagacataaaaataacctagagttaactagaaaactctcttctcctacacaaacaacatgcatgggaataatttaaaactgcttcctgaaaacaaaaattgaaatcggaactctctaatatttgcaaacattatatcaatactggttctcacattatcatgttcatccttgtgataaacccagtacagtgacaataatcatcttgtgaacaaggaacacaatttgtttatcccaatttaaaaccagttttaccagatcaatacaacccgtagacccatacacgatcatcccaagttatgaaaagataaatgctaatcctacattgatgcgctgtttcaacgagatgtaaaaaaatacaaacagattcctctaaaattccagataatgaatatagacaaacaagagctaaaatttacccaagagtaaatgaatccatttggtggaagagatagaaacgcaccgatgggagaggaggcggaagacgaatacaacgacggtggaagcggagaagaacacggcgacgatgatttagggttcagatttaattttatatattaaaaccagttagtgcttcttcatttcaatttgtttcgaagatagttaatgggccgaataaaagcccattaaacgtcaatacgaagtcgtttcaactgtatctgcttcatcgcttcttttctcccttctcttcccgccgtgaatctggtgtctgtgtctgcatctccttccgacgaaaacagatacactcgagtgaagaaagtatgaaatttaactttaacgagacagaggatgcaccagattcacgacgatctccgacgcccaaagagccggttaggtgggttcctctccagagccacccggttttcgcttctcttccttcctcccaagatgaacccgccgtgtcgcagctgtttccgagaaatttcatggcttgggacggagactcgcgcgtatactactgggattcgagacgatatctccttcaccgattatctctgcgcttgggtgaacctgaaccatcctccgtcctcgccgcagtcccgtccaaggtcatttactctctctctctctctctctctctctctttctgttttcaccgctaagtcggccaaaatgagtattgaaaagaagatttatcgaaagctcttttttagtgctgacattttactgactttgagaaattaggtttaggaagagtttgagaaattagatttcttactgatggatgataataggaagatcttttctacttgctatgtactactgtcaaaaacctttagttttcctctgttgtctttgctacataagataaattataggtgattgattcatcatgtagtgattgactaagctttactaataaatgatattataggtgatgcaaccagaccttcaggtgacattttctgttagcaaaatctccatcaataagtctggatcagctgtacttcttgccggctcagatgggatatgtgtgatgtacctatttggacgtgcttctgtgatagaagacaatgtcatttgcaggtagtgattaacgttaccctaataagatgcatttatattcattgttatcttgattatgatgttatcttgcttaaattaatggccttctgcttatacgttatcacttcataatctatgtgttgcagggtagtttctattggttcagaaatctatactagtagtgacagtgccataaccttgctacaagcatcgtggcaccctgatagtgacacccatttgggaattctatcctcggatgcagttttcaggtaacaatcttttcggctgatagtgaaggtggatgtacatgtcaatatattgatcaatatcattatggaaagatgttagagaaattgtagaaaaaatcagttcctaaggttgtagattgttagtttctgccatgcaatgacttactatgttaccatctggtccagtctctcattataaagaatcaaatcgttttatttaatcctgatttaagagctttttagcttactaaaagatatttgtatgctaggcttttcgatttgtcttcagatactgagctaccagagcaagaatattatctgcagcccggtgagccaggaagatctagaacagcttcatcaatttatcctgctgatttcagttttggaggagatcatctgtgggatagatttactgtaagttcagtacaaattcttgctccacttgtttgataactgacagtgattttgtttagttgtcttgtcaaatagagccttgaggattacatgtttaggtcttgacctaatctttcaattggtgcaggtctttatattattcactgatggttcaatttatatcttatgccccgttgtgccatttggaaggtaggcagatgatggttctttctccttttcatttctctctggcagttttttaattagtttcttatcgcttgaagttgtacctggtatgctaagtttccaagataacatttatcaattttttgtggttttctggtttcttgaacaagatatgaatgattctcattaagctgttttagatcccaaatctaggctcatttgaagcttttgaggggtaaaatcagctgggtcccatgattcctttgatgtatcaaatagtttatgcatgttgacgcggtgacgacttgatatgcaacagatgcattccttccacagactatcctctttatgtcgaacttctataagtcatggaagatgttttagttcgttgtgatgttttgtgtttaactgcccttgaggttgactgagattgcttcggatgtatattgcaacagtgtttacaaatgggaatccgtaatggagatttacaacgatgctaatatgtatggggttaagtcatccaattcgttagcagttagcaactccagtctggctattgaatggttggaagctacatttccagatttgactgagcaaggaactagaggtgaaaatatattggtggtgaaagctcagccttatgctttgcttgacgcatcactggctttacaggtatgaattcctcatctttttgaggggctcctcgtagattttagctgtttcaccaatgttctagatatgtggtttataagccagtggtcttcatcacagatttaaaccctccttaacttgattcggaacacggacgggataaaagagatgacacatacacacatgttccctaagtgttctttgtttgtctactgttttccttgtaatgctgatctcttgttttccttgtgtacagggccctttatataaagcatctagtggcgacggagatgaagatttcgctgttcgggaggcagaatgtaaaggccgggcagtgagtctattatataatcttgttagcaaagattcgattctggtaactgcctggagtgctggacaattacaggttgatgccctggttgatgaaatccagcctgtttggatatctggtaactcatctcgtcttcgcatgaactcccacaacaaaatacaaggagttgcaatgatttgtgagtcaaacataagtgagcttccagttgcaacttcaaacctgccgctcgatcacactgtttggttagggcatccaccaccactgttaagacttgcaatggttgatttggctctccccaaaatgcgtgaaggtggctctcttgttaccttgtttgctgactcccttttgccagaacgaatatactcccttcacgacggtggcattgattcaacagtcttacactctcttcccttcacaagtcaggccagtggaaaagatgaagctctcaaaacgccatctgttcacactgtcctaagtacatgccaagaagaatccgctgtatctcctttgttgggttttgtgcctctgtcggattcgtttgggtattcatggatcgttgcagtcttatcctcaggagaatgcattgtggcagagatgaaaacttgggatctcttgcttccaattcatgtcagtacggataagacagtgtcttcaagcgcaatagagaaaaaagagcaagagaactcgtgcatcataagcaaggagctccttgcaggtcccaaaattagaattgcgccccacgctttacctaaccagcgttcaactccagccaattccgtagaaggcagatcaattctgcttgactatgtcaaacttttccatgaaaactacatcgaatatgcacacaaggtgagaaagaagtcatgtaaacccaacacaaaaacgtcaatgtgttttctaaccgattttactaatgagatctctttgtgttttttgcaggtccactttgagctgcagcatcatgctcctaacctgaagagaataatcgatgaccaacaccagcggcttgctgaggcaaatgagaaaatatcaaaagttgagaaaaaccaatcttttctggagaaaaggattgacaaagcaattgaaagacatgattctcttgaacaatgcttgcaacgtctccgtagcttgcctggtacacacaagaaacctctgacgagagcagaactggattttaaatcggagctcggtaaatcaaatatcccccataaattttgtccgcaaaaggatataccggaacccatttcatcatcttttcttttcgcttataaatgaaaaattgcagatcaatatgcgggagttgaggtggatgcgcttcaatcatccatcgaaacactgagagcaagagtgaagaagtcaactcaaaaatctcacaagggcacagtagtcgcagctagtcagaaaaagcagtattcaaagaaaaacttaattcaagatacacaaatgtcacagcttcagtccacactcgccaaactatccctgatgaatagcgataactccaagaaagtcaagatcgtggaatctgcgctgaaatcgcaagaaagcagtttcatgtagtcactcactgtaacagggacgcagttatcatttccttgactgactaaatcctgttcaaatttgaatatatgtgctgcaccaaattttctaactctctccttgtaagttttgtctgttaaatcaaactacggtattactttaatttgtctctacaaatggtcattttctgcaaactattcctatgaactcataagactacaaagagtaggtcaagcaactcatgtttgaaccattgaagcagaagagatttatgcaagcataaggtaaacaaaagttttttttttttatgtacacagaagctaaggctttatagagtaatgataacttttattgtcaaacactagacccacaaggaggcaaaaaaagaagaagaaattaatcctgaaaaatactgttgttctataaataaaatcagatgggtctcttcttcttcaagtagcaaaatcacggcgcttcacgaagatcgggtaccgtttctgcgttcttgtagttggaaagaaaaccagcttgtcttgctctgcaggaacccaactgttcaaacaaatttacaaaacaaaatcaaatcagtctctttagccttttgaaatggaaaacagagctactatcttctatgtgaaggtatatatacctgaagcctgtcactaggcggtgaaggaaaacagagagtgcaaccctagccagctcgtaaccgggacatagccttggccctccaccaaacggtgtgaacacattagaagggcctgtcgttaccgagttgctctgttccacagaattgcaatcgttcaataactcaaaatcaagaatgcaaagaaagaacacccaaaccaagttcagggcttaaaatacaaacctgccatctccaagggttgaaagtgcgagcatctttgaagtggtttgggtctaaatgaaccgctctaaacgatgagaatactttccacccttttggaattttataacctggttttgttccagttttctaaatgttaagtttttgatacagaatggactctttttactcattttaaaagttagattattttacctttgatctcaacatccgtcattgcacgtctgaaaacaccgccgatgatgttagccactcgtagcgtctcattaaccacctgaatcaaaataggtttataagatactgatgagaaatgactagaaagaagataagacaagaattcttaagagctttaggtaagtacacttacacattgtgtgaatggcattgacttgtaatcactccattcaagactatacgaatcactcttcattgccctaatcttttcatgctcttcctgttatattcaaccaagcaaataccaaatcaaccaacaataaaagaaagaaacaaggtgtaaaagcaaaattaattaattaggtcaccggtccaaccgttttttgaaccggttggtcatattcgaagcactaatgagtaaatgactaaactagtgaatatagtagtaccatccttggaacaaaactagtgacatcaacaaataattaaaatattaagaaccaatggatgagaagcttgtcggtcgcgcatagcacaaacatatttatgataaaacttttatctttaatgtaaagagagatttattgggggataatcggacaagtaagataaaaaaagaagatgaaagttgttggcaaacaaacaaaacaaaacaaaagaagaagatgaggtttggtaaaagtgtgattatgcatgcagttcaggagacaaattagtcaaatctctgagactgtaactccttacattttacaatttccttattaaaataaaactctaaaactgaggtgatgatgttgtctattttcgaaaatgactactttgacttttacggtaattttagtaccttttacacttttcagttttcacctttcaaaaagctcacacccacttaataatatgcttaatcttagattataaactcatcgaatagacaaatagaatgaaagcttacgttttctaattcattatttgttgacggaaaacaaaaactttgaaaccagtttagtatatgatatacataatttgaaatagtgaatagcagtactagatcgtcttacccggctaatgtcgcgtattttaattttcttgatacctaaccattaattaaccaagattgaaggctataaacaaaaaccttattctaaaccaaaaacaaaaagtcttttttttttggctactatcaattattagtatcaaccgactagattgtactgttgcttacttgctatgtgaactagtagttcattggagacctaagccgtttcattgatgtgtgtgtgtcctttttataatagtttttattaattgcaaaaaatctagacacccgtgtgaaacgtaaatgatggagaaatttagaggccaacatgcacatatcattatgctcccattgttgtagtctctgtcccatttctttctttcaccttaaattttatttttcccccaactacttcttcccatctcttaattacttaagaaaatgaaataagcttaaatcagtaagattgtccccacaagaaaaagttcatattagttgataacaacacatcaccgtgttctaattcaatgttttccactcttttcgttattttgttgaaagtacagaaatgtaatttaattagtttttcaaagaaaagaaacaaaaccatttttgttttgataccctaaaccccaaataaagcaagagcagggtaaaacatgcgccggtggtccttcaaaaaaacggtttgcatgcagatgcaatgtagtgaacactgaatagatcgaatcttaattttttaatatcttttccaaaacactaaatcttgttgattcgcaatcaaaccaactacataacacctaaaatttcattcatacgtgtcgtgtttttcattcgctgtgtatactcttttaaaaataattcaatcaaaattcgatactaaaatcgaatatttttctcaaagttattctttattaattaaatacgaaccatgtatataaataagtagagagattatttaccaaaaatgggaaaattaccttgagttgagcaagagctaaaggagtctcggtgagaaatttgacggcgagagtcatgatcgtggaggttgtttcataaccggcgacaagtaaagccaccaagaagtcaacaatctcttcatcggaaaatccatcatccgccgcaagcaacgccgcaagcatatctttctttctctccgctccttcttcctcctcctccctccttttcatcaccaccaccgtcaacgcctccgccaccttcctccgcgcctaaaatacacacacatatattaggatatatattctcaaaatatgattgaaataagaaagaattagtaaatgaaacgaaatatatacttggatggctttgcggtaagtggtggagaagagagggagaggaagagagaagaagccttcgatgacaagaagatactctttccttaaactctcactccattcccctggatcaaagctcatcaactgcttcaccgttagctcaaacgttatctgcatcatacatcatcatcattaataatcatcaatctatgcatgcatgcggtggtgactcggcctgactcactgagtcacaaactcggtccgggtttttattttatttttattataaaaaaaacataagtgagaaggccgaataaaataataatataatgtttttgataagcaagaatttttttggttacctttttggcttcttccatgaggagaacacgagaagaccaagaatcaagattaaaccggactaaccggtcaatatcaagcatgagatggtctttaatgattgaagaattagcaaagctcatggtgagagagtgcatacgtttatgcaaagaacctttcataagaagcagagagtgtttccccaaaaggttacaaatggaagcaggataagaacactcaaaaagcttcccttcgttctgaagaacaaaccggttcgtttccgggtcagctgagaaaatcgtcggttcaccaaaaagatgcgtcatgaaaaccgaaccgtaccgggctactctctcgtcgatgaaaggctcagggttctctgttttgtaagctccgatcagctgaaaagtctctcctatcagagggagaccaaggcttcccggaggcagacccatccgacggtaacgtgtacggcggagtaggaggaggaagccggcggcgatggaagagaggaggaggagaaaagcggtgaaggccattgaagaagaagatgatgatgagagaagaagagaggatgagggagagagagtattaatggagaaggggagagtgggcacacggggggtttctgcataaagtaggacctttcatcattatactcttttgcattcttcttcttttcttttctttttcttctaaattataagtaattttctaaaatacagtaagcagtgaataataacttcttcataaaatatgaattttttaaataaggataaaatattttcgatactattctaaattttgtttcaaacatctctaacacacagattttcaaatttatcagagagcaaaattctataatttaaaagatttagtgccttaaagagttatattttttctgtattataactaaaacatatttggcatgtacgaaattaattatagtaaatatagatgaatttgtgggttgtctatgtatattattaacttttatgcacatggtaatggaatcatgattttcttactatatgtagaatcatttatataatttgggattgtatatcatttgctggtaaaaaagtaattccggtagctttattccgtttatttttggaaccagaatgtttatggtttagtgtgttttcgtatttggttgcagagaactcacacatgcatatgctaaatattatttattcaacttttaacttctgatttttttttttttttaacttctgatttcgtcatgataatttgattgtaactggacttagctaacttcaaaagacacttaagtgaaaagaaatcgaaccaattttaatccattgattatcgatcggtttgttgatgacatcaacaaactagtgacatcaacagataattaaaatatattaaaaggatgttaatgtgaaattcttattgaatattaattattgtagagaaatggaggaactgatgaatcataggtcaagaattttggttccataattacattttgtttggatccttgttgatttttcaatctatgtatattggcccatgtttttgtttggttgtagatcttacacatccaagcacctctctataaaaaaaaatagtttctgatttcggtctttttgatttgattatatataaatgagaaaacttattagttttgatggacatggattcaaattaacaaacaaaactctacatgagttacagtggaggataggagttgtgagctgttcttctctactgatttgcgtttcgaattgtttttctagtattgcatttgcatttgcccaaattgagactttacttagtgtaggaatctaattattatttttggaagtttcataattattttatcatactgatttagaataaattttgtaaaaacattttaaaagaaactaatgtttttcttactagtgtctagcgacggctaatggttatatttttaaaaaatatcaatcaacaagtatccctataccaacatggctcgaaaccagtacatgggggatgggatcactgtggaagtaccacttggccagtggcttcatttcggattggcttgccgattccttacaaaaaataagtcgtatgaaagtgaaacgaaaattttaaattggtatagaaattttgcaaactatagttcgatgaatgtagtcagtgttagattcaaaaacatatactggatatacatttgcatcattagttttcaccaagatcaaacatggttatgagaaaatagataatcacaaaacattatctttcgcacaaaactaagaaaaaaagttgatgaaagaagagtagcatgtgccttgttggtccacaaattgcctatgaacacttcacatgtctctctctttccctcacccaaagtccccatttcatgagtttcccatcatctcttttctttaaaagatatatttcttttctctaataaagttaggcctcttcataatttattagtgataataccaattatgttcagtacttcatgatgagttttgatgtacttacatgtgacttttacgcggtatactttttaaggacatgatatagaaaggtgggtcgatacatacatttgaattgaaggattgtatatgtttttggacttagtcttaatcaaatttggttggatttggggtttatttgattaatcacacctttggacgatagtatcaaatactgttgctttatagtttcaatttatttatcactattaccatatttacctttctcatccactcagaaaagaatgatttaatttatatatgttgaaaacaaaaatgtatgaattagtttatacacccaaggcgaagaggaaaatcggtcaatggaaaaaagagcatagaggagtaaaaaagcaaaggagtagctatagaagtagtgattagcaacacttgcctctcttagctctaagtttgatttgcctttttatcttctacttcttatatgctatggaatctcagtgagtcccccacctaagatcaaatcttcaatcatttataacacatgcacttagtattaaaattacgacactaagatctaagtaaaacctatttacaaaaatgacatcatttaatatcgtataaataattttcaaaagtgcacaaaacctagagaacgttgaatgttatatgaaacaatctcgttcacgcttttcgtttaccacaccattatgcaataatcctagttagctttaatgcatttttttttttttagctttaatgcatttacttatatgtagctataatataggggagaaactaaaatgacttggtcaaaatgttaactcgatcacattctctaatgattccattatcagtttatcacctttaatcttggtgggaaaccaatttaattaattatttctgaaaccactaataacttatattagttcgaagttttaaaaaattcggagtgtatgttataacatactttagaagtatcttcggagaccttaagatatacttgtactgttgtacacatgttatctcattatcgctttaaaacgtatggcgtctatgcgtacctaaagatccattttggtgtattagtacgtaggctcatttatttgtatttcaaaatttatgtatgtgtatatatatagaaagaaagaaacggaaccaaaaagatgaaaataaatatatttaatgatttgtttttggtcatttggcagatatatactaatcttgggataaatgaaataaataccacagtaggaataaaatataatcagtaaaaattagtgcaattacctaataatttaaaatatcatctatacttgtaagataaaaggggatctaaattcttatgtatcaataataatgcatatgttattgttgaccctaaaccccatccccatcctcatgtttatttccttcctcaacaaagcaaacactcaaaagcgaattgctaaaagcagaaatagttcttccagttgttgttgttttaaaaaaataaaaatatatattacattataaatgctagtggcttttaaattagtgttattttcaattgctcctaaactatttatagtatttctttaatttttctttagatagcacactcaagttcccaaactttctctgattctctccatgtagaggtgaagtttaccactaggatacattagtatcccctccaagaggtacccttttaagaattcatatgggtaggttaataaacttaaattttagtattatatttcgtcgatatatatgactttttgattttataataatttacgtacataacattctcaagttatataaatatgtaaaatctcgtgttttcacaataaaaatctatgatacacataatttttgttatagtaagtactactttaatttaactgtgacaattatgttagggacattataagatatatgcatgttcattctttgaaaaggatacagagtaatgtttgaagaattttaccatagtaaaataagaaatgagttattcatttacgttattgctcgtaaatagaaatgtttacgttctaaatctaaggatcccaagtggcatacaaagatgaaacaatttttacacaaagatcgttctcaataacacgtgatgaaagcgaagtcatcataatccaaatatgtgcattattctattattatatatgaatttcactattttaatcttctgaatatttgacacgtcttcgtgtccattagttgctatagttataatgacgatcacaattaaacagaatatactatactcttgtgttagtgggtaagagttttcaaaagaagaatgcatgataactttgtcgcattaacctgtgtccttgggattaatataagtacattgattatttgatcatattttctttttagctcatccacattatacaaaaaaggtttgatatataacttaaatacatcggaccagtaaatatataattaaattagggaaatataagataaattttaatattcaaacttaatatatgtatttacttataaatttagcagcattttctattaggccatggctaggccaatgcatgatgcctcgtctgagaattgacataaatgagtcacggctgtgagtattttgtaggttacaaaacctacaatagctaaatcacatatcataaagcaagctgaaaataattcaaaccatataaatatgacacgtgaaatccccagatatatcacctcaattgttgcatatatatattttttgtgtgtgaaaaataacaaaacattcggttcttccatatactgtttgagtattaatctgaaatttggacaccaaacgttaaaactaataatagatgagtgggatgaagaagatgtgttgattagacaaatcacgagacagacgacataccatatcttaaaaatccacgtgtgaagtgacagttttgagcttctgtccaaaagatttaagatgcctctctacctcttatttgtctcctattgttttgtagtttagttatcactctcataatctgtacttgattgtgacccgtacacataattccattattacatctcattttttcgtagttaacgttaaatcgtacgtatcatatccgcaaattgattttgtcatttaccctccaaataatcatttcctttttttttccccttccaaagcaaagttctttcccacaaaccttttaccttggaaacgaaagagattgagttttagtgtcctttcctatttaggacaatcatatgaactcaatgaataagtttttttttgtggtaatcatgtttctctaaaataaaaaatcagtagttagtaatatacttacggttagtttattgatgtcaatatagagattatacgtagatgattgatatttatatatcacggagaataatatatatacgtgtgatataaagccaacaaagatcttatggaatatggtagaagactaaagaaaacatgaaaattgatcctccgactgttaatttaccacgcaaccaaaaagaaccaaatgaaatagtaacttttgctgtgtcgggtcgtgactagattttgtgtcgttgtgaagaaaagcttcaaaactctttggatttaaattggtagtttcaaatacattttaaaaaagaaaaaaagaagaagaagatactcctagtaggagaagtagctagcggtcaaaagggtcaagaaaaaaaaagaagattacggaagacgaggaggggcacacgtgtgagagatgtggtaaaaagtgttctgctgcaaaaattctgagaatgttaaaaaaaatttaaaaaacctttattcttttttacttaacacttcccaaagtctgaaatctgctcgtgtgggcctttgcctttctttttcactgtcaggcctccccacgtgcgcctctctcctcctcattccctttctccttttactattttttatacatttatatctgtaatgctgaattgctgatatgtagctcgataatattacaaataatatagttttggatatctcccaatagttattattataaacttttattatcgtaataaaacctctctatttgtagtttgtttcttgcaaaaattaaaaagcataacaaaaccatatgtacgtaccaaagattgacaaaaactacttcatgaacagtaagttagttttcaacttcttggacagaaattttttcaatataaaggtaatcagaaaatacaaacttaaagaaagacaccatgtacaagtctcatagtcatagatatacaacaactgaaacatgaatacaaacaattttgagttttatctaatgactaatggtaccaaagctcaatggagcttggtattgttgaagcttcagttgatttcatacaccattctctctgaaagctcagcgcccacaaccttgcggtagctttgtaacatcggttccagttgcttcctgcctacgggagttatgatctgccgcatttccttccaaatccatttttttttgtttagttgtcatcaatatgaggagagtttgataatgctcaataaatacccaattagctatgataattcaaaaagaaacaaaaaaagaagaagaagtttgatgtaccttgtatctatattgggatccataaagaccgataaggatgttgttaatgtcgttatctttggatccagggtctgactcaatatgagagtcctctgattcagtctcatacatttcctcatcatcatcatcatcatcatcatcatcctcatcctcatcttcatcctcatcactgcagcccataaagttatcattcgtctccccttgttccatgtcttcatgttcacttgctgctggttccacgagagtttcagaagcaccagctagtaaagaacattgattatgtgaaatagcaatatcggacaatatgacatatggctttttatcaagcatcggccttgctacttcaaatggaacccacctggaaacacaactccgagtgttaaaaacttacatttaccagtctcttcacttcaatgacatgtctaagaagaggacataaatatctttttacaagtaccagaacttcatatgagaggagatcaatgataaactaaggcatagagtaaaaaaatatacgactcagtttggttgtaacttactggaaacggagaggacatagaagctcagatggacgataggctgctttatatctcatcttgctgcaggaatgtatataataaccaagatagtaatactgaagagaagggcagcgagcttggttctctataacccaattaatttcttgaatggcagaatattttccgagcgataagaatgcatagtctggatcccagaataagtatacacttgacaaacatttaggaagaatgtctacaaccccgacggcaattaggcggccatcaattctatattgttggtggaaagagccgaagccacaaggcggaaccttttcatcacctgaaggttgaacatctattaaaggagagtcgaccaaaaaccttctgtatgaactttctacaacgtgccctggcttatcattgtgcactttcagctgataccgtttgtataactcatgttcttcaggatcaaaactagaccttttcaaatgtatctccagctttcgctttcttgcctgatggttttctgaatccttcttagcgtgaagggtttcacttccatctaaagaattggctcctctcgagatgttaccattaggtacaacatctctatcagaaaaagaatctttggcagatgaaaggaaattgatatggcccttacagactttgatagacacatcaggagtttcccccaccttatgcattgcactcaacaacatctcagaaatagtttcaggtgataatctatttccttctgcactatttatcccctctttctcagatgtctggatgcgttttattgcagctgctattggaaaagcaatgttgctggtgtataagatttgttctgttccttcagctagtttctttcttctagcacagaaaaccttcttcactgaagcttttggtatctgcatattagacgggaattccccactccgtatgcataattgcacagcttggtcaatatttttagacaaatcatccataactgcttcaactttcttattctcttcacttttagcagctccaagtgtttttctccttgtatctgaaacatcaccagaggaagaagcacctctttgttccctgggctgcacatctagtttgccatccaagaacctttgacaaaacattattaagaaaattcaggaagctcttcaatgaacgacttcattagagaaatctgaagatcgtgaagaatatttacacatcagaatcatagatctctcctcatatgcatgtttcaaaggtaaaacctttccgactaagccaataacatgaaacaactaacaccacaaaaactttcatctattgatccaaaaagagaagcaaagtgaagctatatgcacctttctagtcttctagaaactcgctgctgctctttagtaggaacaaaatcacttgctttcaaacgtatcgtataaggagggcaacacgttttatccatctcatgtttgtaaagataagtaccagatcttctccagcctcggtcaataagagctacagaaaagtaaagcaaagatacataaaagatctctattctgtcaacaaaattggttcatcacacatagagtccaataatagcaacaaaccttggtagtcataaacggtaagagtctgtgctgataaacctgcattgacattcactatgtttatcaatcatttattcattggaactttaagatcataaacaaaatcaattcttatcaagcatatgagcaattcgagaagattctactctaatcgatcgattcaacaacctaatccgtaagaaaagcaaaattaaacgaaccgtgagagatactggaccgagctggggatttacagtagccgcaagtgcttttacggcggccatgatcatcgattacgctttctctgttgcttccaccgtcgtggctactactcgcatcgtttttcaaagacataatcgccgattattcattcagaagaattttgctaagctctttccgtttggagaagaagacataatcttctttcacatttgactttttttttcaatattaaaacattgttgctgactgttatgcaattggcaaaatgaaggggttgttatgtaattataaatattttaagggaagaaaatgaaaaataaaaacattttggggcaaaagataaacacgaaaaaataatggaatcgataaacagattttcgatagcatcggcagatttggatcaaaaccctaattctccagttcaatcttcggaagatggcaagcctgtggcgagcagtaatcggcggtcagaacaacaattccgaagactacggaggcgtagagttctggtcaaacccagaacgaaccggctggctcacgaaacaaggagagtacatcaagacttggcgacgccgatggttcgtgctcaaacaagggaaactcttctggttcaaagactccgacgtcacgcgtgtgtcacgccctcgcggtgtcgtccccgtagaatcgtgcttaaccgctaaaggagcagaggatgtactcaacaagcaaaacgcgttcgagctatcgacgagaaatgagactatgtacttcattgctgattcggagaaggagaaagaagattggatcaattccattggacgttccatcgtgcaaaactccagatccgttaccgattctgagatcgttgattacgataacaaacactaaagtttctctgtttttgtcttttgtcaaagtgattatgatcacagctttcattgatggagtcttaaatgtaaatcttacaaaatcaagaaatgaaaagctttgtctctgcttgaaaacatgaactcatatccgaaaaacatataatataaaacctaattcttcaagggcaacgcttctggttcaaagacttatatggttcttcaaacatgtacttaccaaatatggtaacagaagcaataccttttgcacgtgatcaaatacaataacttcgtcgtacagactaagatgcatgtatggaaagttcctctcgtcattaagtgtcctaaaccctacccgcttccattcagggccgggtctggaaggaacaacaaaatacctaaaacccctctcctcttcttcttcttcctagtccgacactcttagagtcttcaaaaacattgcaagaaggaaacaaaatccatcttcttcgtctattagaaaccctaacttgagaatgtaagtattgatttcccacaacagttttctttttcctttaactaattaggtttagcagaaaacaatcaatgtaggcaagttatttttttttgtttcggccttctgtaaattacaggtcttggataatcgttaagaatcttccttccaaacatgtgacagaggaacgacttcgagatgtcttttcacgaaaaggagaaatcgcagacgtgaaattgaagcgtaaaaggtacattcaaatcgagtgtttttcacagctaattcttgtgtcactatatttcgttttgcttttgcagtgatggcaaaagtagacaatttgcttatattggctttcgtactgaacaagaagctcaagatgctatcacatatgttaacaagtgtttcattgatacttatcgaatatctgttgaggttattaatcttcacttaattactcagtttcacttatgtagtactagtttcaaatctaaatcagattctccttggtatataggttgcggaccctcctccgagggaagaagggaaggttaatgaaaatagtgaacattctcatgaacaagatctcggctagcctttcaaactctttttctgttgtcaacattctttatcaaaaacactcaaacaaatcgaagcattcattgtaacaaagtttttttggttgaatctatttttacgttctttcaaaaaaaaggaaaatactgaacatttttctaatgcttatgctaaaggagacaaaaagattaagaagaaaccagaggttgatcatgatcctcagcttcaagaatttcttgagcttaataataagttgaaaacctggtccaatgatatgtgtccatcggcaacgatcaggtctcgcccgatggtgctgatgagcctaacaaagcgaaaatatcattattagattctaaaaagactagaaagattaaagttgttgctctcgttggtgatgatgtttctgatatggaatactacaagagtcggacaaagaaaaatctgtcggattcggacagtgattgtgaaacttatggttgtgaagatgcaattcatgtttttcctattgatggggatattgaagctgacagagttgacaaagagtttacaattcatgttttcggattcggacatcaggatgtttaatttggatggtgttgcagggcaatggagaaattagataaattacctttccaggggcggacgttgaatatttcaccagctaagccccgtgattatggagaccaaagaagcacttgacttttaacgaataggtgattattctctaacctgttcttacttgacttttcaggttgttttccttgaaccgattgaggcacgtgaagctctgaagggaatgggcgtacaagcgttacaagtaagcttttgtttctctatgtataaagtctaaaatcctcattctttcttcccctaaagtgcttcttggagataaatggttgtcctagtctaaccaaactgcttcatcacatttccttattattacagagatgctcccctgtatctggggctcctagagatattcttgagccaaaagcacttgccgataacaatgaaaatacgagtgatgttgaagaaaatgatgtgagaagaagactcaacttggatcagcaggttggaatcgattcggatataactgaggtatgcccactttatgattgctgtggacgttttgaaaccatgtgttcgtccttttgtgtggtattgaagtatctgaactaatttatgttcgggtttagtattacagtgtaagtttcacgttaggtactgaataatttatgttgactggcttcaagttttctgatcaatcttgtaacatttcctttaaataatgcattatatttcagtcaaatgtcctttatgttaagattctgaacttcaagacactgatgagagtttgaagaagcatttgactgaactggtgaagcagggaaagattctgagttttaaggtaagttttgctgacagatgatgatatgcagttaaccatcatgtctgttttttatatggttttgtagaatttgactccgaagagacagcgaccagtgtctacagagatctacaggtatattatcctagttaagtctctttaatttgaaacttgaagttgattggactcgatgaagtagggtgacaattttttgtttgctcctagggaactgttgtggatgggcatgctttgatcttgagcttctctaaaaacaagccgagtggaacggttgggaaagatttagacaaggacacaattttgacaaagttacatgtgaaaaatatagcttttgaagcaactatgaaagaagtaagacagcttttcactccatttggacagatcaagagcgttgggcttccagagaggactaagggaagatatgctggttatggttttattgaatttgagacaaagcaagaagctttaaacgctaaaaaggcattatccaacacccatttctatggacttatcttgtgtactcatctctctagcctgttcatctttgacatccttgaatgcatcctcaactcgctatttgccgtctttgcaggtgatcgagtggaaaaaggttgacaatagcatgaaggcgatccgatatcgttctgctgccaagtatgtggatcaagaaaacaataatccaaagaaaaggaaaagctcgacagttgttggttaaagaagaatcaagtttgggagaatagctgaatattattgaccatggtttctattgtaacatttttcagagcttcattaatggagtctaattgcaattctcacaaaatcaagaaaaagaaaaaactttgttctgcttgtaactgttttatacacatgaactcggagttcaaagaaagccagcctctgttcttgggcacaatcattttttcacaaatgcagattcagccaagtcgatggctcgagcaagaccagcggctttgttctggcactcacagtgttcgtcttgcgggtcactatcagctactacaccagctccagcttgaagataagccacccactcacgccgtttgttagcatccttgtaagagtacattgtattgtattgacatgctgtcggaaaaacgattgtcctaagggataaagcaatgtccatgtcaccagtgaaggagactccaccaaaaccgccactgtatggtccacgcctcgttggctctagctcatcgattagttccatagctttgacctttggtgcaccactaactgttcccactggtaaagccgcacgtagtacgtcccagcaagtcaaaccatcttgtaattctcctgtcacctacacacagaattagaacttaagatattaaggaacacactatgcgagactttagatatttgatctactactagttatctaattaacaattaccgtggagcttatatgcataacatgggaataacgttcgatgttcataagcttctctactttcactgatccgtatttcgtaacctttccaacatcgttgcgaccgagatcaaccaacatgatgtgctcagcacattgcttttcattctctagcagttccttttctaatctcttatcctcaacttcattcttccctctcttgctggttcctgccaatggccgattcactatcttgttctgcttcaaatatgatataaaggttagcttcaaaaatgatataaagattaatgcagctttgagaaaagagagatttacctgctttactttggtgagaatttctggacttgatgctaccaaaatgcatcctctagcctgaataacagaacgaaaacagcattgatggtttatccacaagtacaaaatgcaaagttgttgagaaatgttctctccatcaccaacctgcaaataacccatatacggacttggattcacaactcttagtgctctataaacttcaaaggggtctgcaaatgttcgccgctcaaaacgttgactcagcacgatctgaaatatgtctcctgcaagtatatgttctttggccttgaccacagcctccttgtactcttcgcatgtcacgtttgaattatccaaagatggcccaaattgtcgtgtctgaagattcacgttacctgcagccagttttggcctgcatagattcacagcggaagaaaaatgaacaacttttaagaatagtagccaaacggagctgaaaaacttaatcaattcaaagagatactcacggctcaatatcatgtaacttggccaccaagttctccaaatgttgcattccattactgtatgccttttcgtaaggaaggctcccatctagtctaatccagtgaatgacatatgctttctgtaaaattttacaaggaatctctagtcaccacttcaagaacaagataacgcataaaaaggaaactaagatgcatgtctcagttaatcataaaacatggatggtgacaaaatgattaccttttccacgtgatcaaatacaactacatcgtcgtacagaccaagatgcatgtctggcaagttcctatcatcctcaggggcctttgaaaatggcaatttcctcttctcaacataacgaacagtgtcgtacgagaaaaaaccaacccacccacctatcataataaagaaatcttactaagagataccacttcatgaacaagataaagcacaaaaagtaaactaaaacactaagggcaatcaatcttctatctaaaagcgcgagaaaagatattcaagaacgtaaaggcgaattgggcacaaaaggtagagggaaaactagatcacaacagggacagaatgaccagcataagaaagttctctactttatcaattgctcttgcctcttgggaaatcagacgtacatgtttacaactaggaatcccatgaccccatatgatatggtatgtagtgaacacgggttacgtgcattaattgctaaatggttttgagatagaaatccatgaaacttgacatttaaaaagatcactcaaaagcaagagcttgtctcgaagacatccataccattatcacatatccccagtccttaaaactagtggcttcattccttttaagttaactattctagaaagtgactcattataaacaataaagaagaatctcttaccacaaaacgcatctggaaggtcctgaactagttgaggatcagggttccatttctcagagatttttcttgggatctccattggatcttcgacgaattcctcagtcatggtttcattgttgtgatccattacaataactttattctcctttgccacgatctccatcgcaggctgagccccaacaacgctataacgaccctatcgagaccaatcacatcaaagaaacaattaggaactgagacatattaacagataaaaaggatatgtacaaagaaagattatatacttacaacgctagacatctgagaaccaggctcaacggactcgaaaagaaagctaggagcttcacggtcatcttctttgaccaaacaacggtaagcaagaacaggagtaagctgatcagagaatatacagcggtaaattggtataaggtttgtactcttagaagcatctgccaacttctttgtatcacttactgcagagaacaagtccaaaaacatgtatcagaactgttttcacgcttaagaagattcacattcacaatcaaaccaatcaaattagtcagagaatagaaattataagcttgacataaatgtcgttcaaccattttcccgcattttatcggtaaaaaatcaaacaatcaaaaacccaaattaaaagaaaaaacgaagagcattgcttcacctattgaagcttccggagaaacagagacgcatttaatcgaacggaaagaaggcgcgtaagccgagcttctaccggagtatccagtaacggtcacagaagaagaagagagataacgagaagcaacagaagggagaagccggcgagagaaagtcagtgcttgcatcgtcgctacgttcatagaggaagacattgtaacggctaagaactcggtggcggccggaatgtttgaagatcggagaagaagattcagaggtgacggctaaatgagtaaatttgattagtgattattctacgagatgtggcatatttataaagaagatgaccatgtgacttatttagcaatttactttaataccccttacctgtattttccaatttccctcattttttcactataagtcatgtgcatgaaccatgaaggcagcgaacccttttcggaaaaactaagcaaacttgtcattcacaaagatattgcatcagtttcataagcaaacgatacgaacggtcgtctttctcaaaagtcaaaaacccttatcttcttactttagtgttcgaaaagtctttctttattaatgccattacaagacaatcctcaagtatgcgtttttcatttttttccaacaaaaataaaaacatagaaaagttggtaacatgcctgatagcggaatgttaacaatactacttcttttaccagattagtatttaatttcttcagtcaattatataatagtacgaatgtagaaactttgacattttcttgaataaacaacgatcatagtaggactatgtaaattggaaggttgctttagcctttagttgctaccaaccaaaatcaaatccatccacattaaaagcatgtgcttttcttcttatcttttaccttccaatttcataatattattctttccttctattatactaatattaatccttcctagtcatttctttatgttattaaagttttgaattgtttttcttgaatagagaatttaacgtcgttatagcatcaaatttgtcacatactctcgcatgtctataatgtagtttaaatttctattaattcgtctgatatatatatatatatatacaaagttgttaacaatatgattatcactaccccataaacaaagttggtcttttctgtttttccaaccagtgaaagtctctttttcaaaacctagattgacaatcccacacgtaattaataactgattagcaaaatattagttcacatttctgtgagaaatttggtttgtttcctaaactgctccatgagagtaaaaatatagagcaagaacaaaaacataactttagatgtcaaagtagagcatagagaccaaaacaaaaagttacaactatatctctgatttcttattgtgcggtgtaatgatatgagtcacttcacaagccaatcatcatggcttcattgcccgtgaaagcaaatgggtaaggcaaacacacaagcaaggagagaaacaaaaccaggattccaagagacacatacttatcatcaggcaccgtgatttcttcagccagcggcgcaatcggtccacgctgcaggaagaatatcagaaccacccagtagaatgccacgtcgctgaacaacgccgataagcccaaaagcgctatggatgcacccgtgagccgtgttgcggtctgaaatcattaggagacatatataattctgattactacctaatcaatctactatggggaatggactcgaacacaaagacgaatagtataagacattgttaagctttttaagtcattctaattagtgttacctttcttccccaaatggagaaagctattttgcccccatcgagctcccccgcagggatactgttaatgccattgatgagaagtccagcccatgcccagatcacaagtgggttaagagatattgaagttccttctttgagtgcatcacctagtaggagctttgctataagagaaaaagaaacaaaatttaaacattgatcaactctccagcttcagcctgcaacactttatcatatttgattgagagctaaagcttaccaataccaccagcaaggaaggactcgtgaaacactgatgcatcaactacaacgccaatgccgtcactgggaggcacgaataaccctataagaaacagaatcaagcctagagaaaagccagccaaaggtcctgcagctgcaaccttcaaaagatcttctcgcttggctacgatatttttgattctcgttatagcaccgaaagagcctatctgccatctaaaacatgttcattaaatgtctaaaaaaaccaaatttcagctgaaagtttttccttttctttcaaatagaacatcgcatcttcacctgccaacttggaacaaagaatggaacaccaagctttattcctaagctatttgcaactaaaatgtgtcccagttcatgtactccaaggacaagagcggtgacaagagctcctggtaagccatcttttaacagttcaaggttgtcaaaggccgatctgcaattaaattcatatatgggagggaaattttttattcagttagatgttttggaagcataacatattctagagaaaacatgttcaagatgttcttacagtaagtcggattgcaaggcaggcacattacggagaaacaatgtaaacaatgccaccaatccaaaagaaccagcagcaaaccattcaggaacagctgcaaattatatgtagtatccagctaaaacttaataatctgagagagatatccttattaacatggaagtgtatagcaatatacctgttgtctcgggttctaaggaccttcttggaacaacaacggccacaggtttatcatcctcaggattcgtgagaaggaaaagcttgtactggtcaccaaaattattctgcagattgatgagcaatacactattactctttgtcacaacatgtgcttgtcaacgatcatagttaagaaaggaaacccaaaaagcagaattgttacctccatcctcgtctttatcttctcgtaacttgtagcaggcttgcctcttagatttcctttgaacaataccccaccctaccaacattggataaaaacgtcaggagatccaacaataagagaatttcagaacctcgtatttatgtttcattaaaagcaaagttggtaataacgttaggaaaaaagactgatgagtttctcactgtctcacctcatatggttcttggcttgttacgaagaaggtgtcaaatccaaatacttggcccctgagaatatcaatggtttccttggggagtctcatggaatcgtccaattgtaatggctgttcacaacaactttttatgaaagataaacaaccagaaaacattatgctgtcgtctttgtaaataacatggatgataatacttacattcacaccaggaagaggagaaccactgctaacttctaatttatcaccgtcctattccaaatgcagtagagtacaacacattcagaaacaaaaccaagaaacaacgcatatggacacgttatgccatgttttcaaattagattcaattactttcaagtttaaattactagactaccaaaacttaaacttacaaattgagctttaacttcactatggatgcattagtttccaagtaagaagacaatacctgagaactgaactgagctttgttttcctcctcattgcccggcgcttcattcacaaccgttgactgtgaattcaactcagtaggaatttttgtaggaggatcatctgcagagctctctttgccttctttattatcctgcaaagaagaacttacgaactcagacgcgtatacgtaccaacacttctaatggaccacgaaaaagtttccacatagggaaaatcataaacagaatcatagtctctagaagaaaaagccacattgatacaaaagcaaatacctcatcatcattgccttctggttccgtttgcgtctccgtcactctaaccaaagtctctctctttctgaaaactctaaattcaaagccaccagaataagtagacaaagaagtagcagtgctcacgcctcacggattaacaaaagaagaagatgaataaaacaatatacctttcaagcttcagatccttcttccttcgagatgttcctgtttgcccaaaattgagactggaagtagcagctacaaaaggctgaaactgaagactacaacatgagctgcattgcgacaagacgccgaaattgccgcgaaaactagccaccgcgagattcatgtccttaagaaagcgaccaacaaaattcgaaaagtcgagacttttagattctccgatcaaaactctgatgccattattacaaagtaaagatttttaatttatgttcttcagatacttgtacgatttcagatgctgtgtcctctcgtggttctcttatcgttggaggagagaggatctttcatttatccgttggaggagctctttccaagaataacgcctcgtcgttttcgccttttagagcgacatgtagttcctttcttaatatctcaaacgacacgtttatgtggtaaggatagaatttgggccttaaaattaaacaattaggctttagatatactaggtcttaaatatattggacctggtgcaaatgcaaagaaccgggcctgaataagaaagaccaaagcccgattatccccagttttttgccgacacgactgccccttcttgataataaaaacggcatacatgttcttttatttaaacgacactaggttctctacttaatatacaaaacgccacgcatgtttgcacgcaatccttctgaaagtcgttcatctgtagaaaggcttgaaagctgtgtgcggattgtggaagaggaggcgatatttttcaatcgtcgctcgtttgggaaagtcctcacatcttagatgaactccaatcgcttcgagaaactctaattcctcgggagtttccgatagcatcatcgggaaattgtttttccgttgaacaatcacaatggatggtaacaaagatgacgcgttgaaatgcctaaaaatcggcaaggatgctatagaagcaggagatagatctcgcgctttgaaatttcttgagaaagctcgtcgtcttgatccaaatcttccgatcgatggtcttgtttcggatctgaagaagcaatcggatgaaccagcggcggaggaggattcgccgggatctgctgccaacgagtcatctaagccgtcggatcgaccttctcttcgtcaacgtggatcttcgtcatcagccgcgggatcgtcatcatcttcgtcttccacggaagaacaacgaacgatcgtgagggagataaaatcgaagaaggattactatgagatccttggattgaaaagtaactgttcagtggaagatttgaggaaatcttatcggaaactctcgttgaaagttcatcctgataagaacaaagctcctggttctgaagaagcttttaaatccgtctctaaagcttttcaatgcctaagcaacgaagacactagaagaaagtacgacggcagtggttccgatgagcctgcttatcaaccacgccgagatgcgagaagaaacaacggattcaatggattctacgacgatgaatttgatgctgatgagattttcagaagcttctttggtggtggtgaaatgaatcctgctactactcagttccgatcattcaattttggtggaggaactagaacagctaatcaagcttctgatacaggattcaatcctcgtgtacttcttcaaatacttcctgttgtgttcatactactactcaactttttgccttctcctcaaccaatttactcgctttctcatcgtataactacgagctcaaattcaccacgcataggggcgtcacttactttgtgagatcagccaagttcgagcaggaatatccgataagtagcttcgagagacagagggttgaagagcaagttgatagagattacttgtctatacttggccagaattgtcgccatgagcttcagagacaacaatggggatatatccgcgaaacgccacgttgcgacatgatgaagaggtttgatgcagctgctgcataaaccatccaggtcagagagagactgaagcaccaagttagtaaactcaaatccaagaaacttggttggattgttctgagacatagctatggtacttactaacttctgagcatttttgttgatgcttcagtagtttgatttctaagtcccaaactcatatacgttgattactgtcctccttatgatgtttagtatgaaacatattatgtgtgattatatcttaattagaataataattactttgtttgctttgaatttttacttgagttaaatgctattacatcagaagtttcctggtaaaatacaactgagtcttgcagaaaaattaaactttttgacactccactatccacacaaaaaaaaggagccctagaagcttacaagcttaacatatgtatagatttgatacccccaggaacaagagataaaatggtattgttttaagccacaaagaagaggaaaacaatcaggaacaagatgataacagcaaagatcttcatcatgagccatctatttgacgaaattcgagtgagatgctgcagaagagcgctacgtgctccctctacattaactaacgattcatccatattgtcatcgattctgttccataaaactaacaggtgttagatgatgttcccagcaactcggaaaatgtcgggttgtgggtaagaaaacgttaacgaacctgattgctagctctccttgttgtgtgaccattgtagctagctgcgggaatattccactgagctctgttattcttgattcaacactgtgaagtgcaaccgctcgactttggctatagttctcctgctttgggactgtttgctgcaacaaggacatctccatttgctgtgaaggagcattctcgatcgcggatctgcgtctgttttagcatgacataaacaaaacatcatgttttatacatcattttgaccttcaagcataacggtgaacaaacacaatcaagagttgtaagtaatgggaattaggacatacctgagctggctacctggcggagctccagtatttaatggaggtaatctgatcggttacaggagacaaaacctaattagataagaacaactattacataggaagtagttcttaaacaaaactcacagtggttgttgtaaattcccgaaaggatttgatgaacttgaccaaggaggaggctcaggtacagattttgcattattctgaggcggactatctactgcattttttgtggaaaagagttgtttccggttttcatgagccttcatgttctgcaggaagacaagacatatctcaataaaacactgtccattgtaggataataggcagatacaaatcaataaaaggttgacaaatctgcaaatccaacctctgatctcgtagttagaacatcttgaagctgcttagtagctcccataagtctggttttcaagtcatcacaaacagcagtgtaatgaccaacttggtcctgtgaatagttcccatcagcaagctccatgttctgaagggtttgcaaatccgagagagccatattcagccccgtgatatcgttcctgatcaacacagttaactcctgtatttccacagtccggtcattgaaaatcgtcgattgttttgccactgtgattcatcaaaagtttcaggtaaacaaaaactaaggctgctctcaattgtaatcacaacaatgtcactagaatcgtttaaagatcatatgcaatacatctaaacacagacaaataacttccgcagcaagcaacatggaattttctattttcttctaagcaccatttcttgttgcaagctaaatgcataaaagcagggtttacgttacacctttcctacaagacagctataggaatctatgtattaacctcgttagaatccaaaaaaaaaaaaaaaaaaagcctaatttcattatccggatcaaataccctaacatttctcatgtttattcaaatccagacgaaattgattccagcagaaattaaatatgaagatgacgagcatagatctgatactggatcgtacatttagcgagcctcgtgatcttctgtgacgtttctttaatacctaacccgatccgggaagccttcttattgaattcggatcccggagacgaccgtttggatgatgccggatcatcttcatcttgatgaacggacgggattgccccgatcttcttcaatgtttgggacagtgaatgaagctccaccgtccgatctctgaacgtcgagcccatcggagggtcggaattgaactaaagtcaccggcaaattgatgaatttcctcagatgatgagctttatttcgagagtaacgagagatgtatcaatcggagaaagagactgagaaacatatagggagcatattcgatttacgtcaaaataacaaattttatgttattcaattataaatttttaaaagtttaataaaatctaatgttattgaacaagtgattctaaaatctacttaaaaatcccatgttattaaaaacatttgagacttaagttaatttgaatggatttacttacttcaaaatacagaattttaaatctcataattttaggttataacaacttcttgaatttgagaagattttacaataaatcataataaattcttaaattcactcaattttttcaaaatcatataaaaactcaaaataaatcaaatcactcgaaatataacattgaatacatctccacagtagtaagaaattgatagaagtgcgtgtcattattatgttataacatcgaacgtcttgttgtttttattcttgttggaccgtgtcccgttttaacatttggcaaccaaaaggtgtgcgtttaggcattaattaatctaactttgggcccaaaacccaatattatttccgtcttttttagtttagaaaagtctttgttttttttgttgctgatttcctaatatcaaatttgtttcgtatataagataaatggaatgagaccgaagttttggaatgagtcacatgatccgagccagaccaacaaaggaagcatatgagaagcatgagaaaaaaatcacttaagtatcttaattttgttcatgtttgttgtgaagggcttactaagatattaataaagagaaaagataaagtgtgagattagaaagttgtatataagaagtgaatggaaattaaaggtttggggtaatgttggatggatcagcgacaaacgtggaagcgaggagatccaaaaaggaagcttcccaagcttcgcgaggcgtaggagtctacattttaagcatgccacaatttcatgcccttgtttcccaattttgcgattttttcatgttttttttcttttacgtacaaataacatttattcaaagttcagatgttatgatttatgctttatgcttccatacttaaagatttttagttatgatttatgcttccatgcttttactttttttgccatggaaccatttctgtaagtatataatcatcgattataaacctaaattgttttcatttttatgaaatatttacattcttagcaaaaaaaaatagttcagatgttattaagtgagtgtttactgtttatcaacgaattaattagtgtgataaaaatttgcaatataaatgtattgattctctcaatttaccaatcgttttatcttgaatgcatttagagatgggagttcctgtttttttttttgcaattggaatcataaaacgagaacttacgcaatctgaacaaggtcatttaggatagacattttaaattatacaaaatgacagtaatttgatttttgacaacgcatgatgttaacttaattttcttataagatttttttttttttttttttttaaaaacttttgatgatcacatacacgacattgacctaggagttagagcaagaaaattaaaaaaccctttgccaagaactagtaaccaaaacttatgtcgcatgaagcttcatttcttatacgttatatacagtataacattaatagaaaaactagaaatatttctttaatggtgcatgtaacatcattgggaattgcatgtgagtgggatttacaaatttacaatgtgagaccaccttccactcaatatatatatgttccaaagtgaaattttcgttttaatataacatacttgaatatagaaccaaataatatgtatcatgtgtgacgggttcaacgttttcaaatgtcctaaaagaaacaaagaaacaaagtttttgatttattattttaaaatcacaaaaccatataaagtttaaaaatcttgttaaacttcataaaatccgtctttaaaatttttaatataaaagtttgattcatattattgttctttcttaaaccaacatttcgttgatgaaagatggtcaaatgaattttttgttgtcaagctagagaacacctaaattttttccaattgatattatgtatgttaacacaaaaagagttatctaatacgattagttaatttatggatgattccaagtagaaacgccaacataaactttgactttgaggccgaattgatctgcttcttttatttctcttacaaatttgaaattaaattagtcaagtgtgatgataaaatacataacgtttgtacgcattagtatgttgtgtagcggagagactcttgtttataaaaacaatgtttggtttattctaattgtcattttattctttggatctttagttctcgcttagcgtctcgtgcatatttttcctcaaaatcatcaccattaaatgactcacgtacacaataatcacaacaacatacatatatatcaccatgccaaaatacatctgaaaaaaataaattcctagtcgctacactgtcatattttgattgatatttagactatttagtcattcagataacattgttacgaggaagtatatatacatacgtagcgttgtactactgtaactggttttaaatttatagtattaattttgttgatgttccgattgaaaaagtcattttaggaaagaacgaaaaaatagtttgaaagtgatttttttttaaaaagatataatcctacactgtcatgttttgattgatatttagtcattttgtgtgttaattaacactttattatagacagggttagttattaatttaaatctaaatgttcttgtaaaggcttccacttaattttctaatcaccatctgccgaccaaactactttatcaagtcacagcttttgtggaaaaatttccgttaattcatgagcttttctatttgttcacacttcacacaatcattaaattaaattttgcggctaatgttagaattatcgtacgacaactgatcacacgctacatgttctctagcttaaatttgcaacatatataattgaaacatcactcaaccccacaggctacaacatcccacatttaatcaagaaatcaatcagttcacaattactgatgaaattacgcagcaagtaaccctagctaactaggataaaagaaaacgatcaattctcgggaaaattcagtctctcccgaatcccaaaaacaaaagcatgcatttcgtaataaacaacgcactgattctgtttgattttttctacctttatcctacacaacactagttaaacgacacaaaactcaaaacacgaacacagttacttaatctattccccttattctttctttttgattataatagcatatcggaaaaaaatctacaaacattcaaaaaaacatcatctactcatctatatattcaaaccttggtccattcacatcacgaagtccatcgcctataatcatataacatatccaaaaccctaaaacgcaaacactaagataactatttcttgaaattaataatgtcgtcgagaggattcaacattaaagctagaggattatgtaataacaacaacggaggaggaggaacgggggcgaagtgtggacggtggaatccaacggtggagcaagtgaagcttctgacagatctgttcaaggcgggactgcgaacaccgagcacggaccagattcagaagatctctatggagctgagtttctacggtaagattgagagcaagaacgtgttctattggttccaaaaccataaagctagagagagacaaaagtgccggaaaatctccaccgtcaagtttgatcatcgtcaagatacagatctttctaagcctcgccgagacaacgtacgtcgtcatcaactaccagcgaaaggttaatcaagatctctttctagattgttttataatcacattttacagtatatattatcagtttatcactaagacgctaataatgtgtcttggtttcttataaatatttttgaagtttgtaaagtagaagagaaaatgatagagacgttgcaactcttcccattatcgaaagttgagagagtgagagcaaacgttactgctgcgagccacaacgaatacacacgagagcaagcatatacgacggcgttttctacattctcaacatgtggggctgagatggaacattcgccgttggatctccgattaagctttctatgaacggatttgatattaacgtacaactctagtggtgacgttgctaagaaataaagacatgatgatcacatttatttagatctagctagattttgacaaatttcccttgtaacaatatcaacctaataatatcgttgctacattttttttcattagcttcttctcttcacttattgcctgttctgttctgtggcctacccgtgaaatgagtacttacgatttagggttataacattaccatagtggaagggatgatatttctttttgtatcacatttatgatttacacttttgaaagtctccacaacttaatttgtcattattttattttattttctcctctacaattcatattttcagcactcgtttgaaaaattacttcaaaatatttgataaaataagaaataaaatcctatttaattatccaccgtcttaataaattttcgagaaatgtatattggaaaattgcccaataaatgacgtgatcaggcccatcatattgggcttaacaaaagaaaagcccattatagggaaataaaataaaacgaccatattagaagcaatttagtgcaaagtggtttttcctggagaagaagcaaactctcaagctccgtcgggaaaaaaaggaaaaccagatcggaaagttcacgtttttcaaatcttctccggagaaatcagattacttgattcttcaaacaatggatgtgattaagacgcaacagatttcagcaaggacgatcgagaaagtggttgttcatccactagtcttgcttagtatcgtcgaccattacaatcgcgtcgctaaggattcaagcaagcgtgtcgtcggtgttcttctggggagcagctctcgtggtgttgttgatgtcaccaacagctatgcaggtatgccttatttatcctttttcctctagtactcttggatcccagatctcagattctgttgaggtctctaaactgaaacttgaattgagtggttattcatacctgggttctaggcagatgtgtataataacaccatttaggttttttttgtggctgttctgttccggaattgacctcttctagagttgatgtttacttcagttaaatcacgttctcgctagggtttaagattcaatcgagcccccgtcgagaaagagattgttttaggttgatttagttgcatttaagtttgcagaggtgcttgcttatctatggacactgtcactagaaacctctttaatagatggatgttgtttacatatgaattcgtgttaacatgttgacatcttgaattgtagtgccctttgaggaggatgacaaagacccaagcatctggtttcttgatcacaactaccatgagtcaatgttccacatgttcaagagaattaatggtattttctcaggaaactgatgcttatactgtttatgacattgtagaaatccatgcttttaacactacctacttgcttttcagccaaggagcatgttgtaggttggtacagcacaggccctaaacttcgagagaatgatttggatgttcacgcgttgttcaatgggttagtttccagtttaatcattcagatatcaattgattggcctttatggattgaggatcttctggttcttaaattgtgataaagatttgttttaggctgaaatctgtgtttctttcccactttacgttttttgtggcttcggtttcatctccaattaaggttcactttgcttttggttttgcagctatgttccaaatccagtcctggtcattattgatgtccagcctaaagaacttggaatccctaccaaagcatactatgcagtggaggaggttaaggaggtaagatacaaacccttccaaatattgtcccttttgtaaagttgtatgcttattataatcagatgctgattaaacacttctttttctctccagaatgctactcagaaaagccagaaagttttcgttcatgtgtctacagaaattgctgctcatgaagttgaggaaatcggtatgtccaaaagggaaaacagttcttttgatgatttcatcatctcggttgagttttaaagaaatgtgttttgtgattgttctgaggaagattttctgacacttacctgcgtcattcttgttcttgtacaggcgtggagcatttgctcagggatgtgaaagacacaacaatcagtaccctcgcgactgaggttcttgtctttacaatacatgaaattttcattatcttcccattaaatgtctgttgaaatcatgatgggggacttgtaggatttgtattgatgttcttgcaaggttacttatggacataatagttttctgctcgaggacataaataactttatagtattttgcaccaggtcactgcaaaacttactgctttgaaggggttggatgcacgtcttcgggagatccggagttatcttgaccttgtaatcgaaggaaagctccctctaaaccatgagattttataccatctacaggttagaactatatttccgtttcgtgttctgaattttacaaattatggagaaactatttgacaatgtccaaacctatgtgttttgcgctctttaaaatattctagtcactgtctctgctgttggttgatttcgtctaatgaaatatattctcgtaaaatcgacaggacgttttcaacttgcttcctaacctgaatgtgaacgagttggtcaaggccttctccggtgagtttctgctatcattttgatattatattgggctgctttcttagatctgcttcattaatctttactgtatttataatgtgcagtgaaaacaaatgacatgatgctcgttatctatctatcatccctcattcggagtgtaattgcgctccacaacttgatcaacaacaaggttagatctttactttactctctctcacggcacacaataatgtgattctgaactaaatcttgtgatgatgctgtgtttcagttactgaacaaggaacatgaaaaagcagaggactcaaagcctgtggccatacctgccaccagctagatcaggttttctcgtgacttactgtagtcatcattgcccgcgatgaaggcagctattgtgtgttctcttccccaaaacaaagggtcaagtcagggtgggggaacgaacgagtttagtttgatatcgacattgttgaattctctcagttgttctgattcagaatgtatcaaagagtcttttttcattttatctttcaagttcgttaggcttaggcctcttttgagggggttttgaatacaaaagttcacgtcaatgtgtcgaaatctccacagagatggtcttatcctattgaaattaagattttttttttcacatttcccccccccctccccccccccttctgttatactctcacatcgtgaccgagtatacagccccggttgaatgttgttcgttttccaaagtcaacatgttcttcatgtttgtccttagtatgaaatttctgattagagccattgaccacaacaagggtgttacttatgaatttgtttactagcagaactgaataatttgcatattacctagatgtaaaaaggaagactatacattttgatgagcttttctttaaattgaaaagaaacaacaagaagaaaaagtaaagtgaaaaaggattatggaggaaaataaagttaataaatggcgtaatgttcgtgaaaaggatatttgatgccaaaagacagaaacgaaaacaagaacgtgctttgatacgcattatgcttcttctttttctaagtctacttcttttgaacaccttctttttctattgtgtattatgttaatccttgttaaggatactcattttgcaaatcaatatattactgtcctgttttacttagatatctataagaaaaaagtttcaaaaatcgaaaccgttataattttgtgtaaacaaaataaaaatcaaaataacgtagctcactacgaaaagtaacaatgtagttgtatactatacagacgtgacgtaagcattcaagaagacgactttcatattagtatgttagttagtggttaggtcgcatatcccattgaggtgaccaaatccatagtgacgaagtaaccaaagtgattaatttatataaagaacgttctgagtgttactaaatagacatatatagaaaggtgtcaatacaaaaattctcagttttatgatccaaacatattataagttatacggctattattgattgacctttcattgggttccattcaaacgcctcatcaaaagtggagccacgaaaaaaaaataacaaattgaattgtgtgatgccactttcgttaaaaatatatatggttcatcatcttcatcgatgaatgtcataggtggtgttagaattatatcgactccaaccgacctacattattaagtagtatcttagggttttattcccgcatgcaaaaaataaataaggttcggatgctcttaaagtgactatatatagtatatactattcactattactgatcaaatcaaattaatatatggagatagagtaatcatattacgtagttagtagttacttactgttcgtgattaaaaagtgagcttttcttttatattctcaaattttttaattagaaaactaaaagctttcaaatttataacaaagcgattcaatataacttctctttatttgcacaaaaataagtatctttaacgattcgttcatccaatgaaatttcctaaatcacttttgtttatgttttttaataaattccaacttgacttctttcacaaaaagaagggaaaaaacaaagcattatatattccttctgatatgaaagaaaacatatatcacattttctagctctttattaaattaactaaaagaaatacggaaaaaaaaaaacattcttaaaataattttaaaacaggagcttgtatatatgttccacttgtactaaactgctatttttgtttgtaaagagtaataatatatccaaggacacccttaatttatttataaacttaacaaaattgagggagcaaagggttggtgtaataggtgaaaagaatgtgattctgtgtgccgaaagtggaatgcagactcagcttctaattatataccgtttacaagttagtggtcagctttgccacccatacacacacatacaaatatatccaaccctcactttttaattcctttttcttacataaaattctatacattctttttgctaaagacaatttcttaccttagaaaacagtatttgtgtatagttctgtgatgaatcattttaagaaaatataaaacgtaaatgagtaatgttatactaatttatctactatcatcgatcaaatgttcaggtttagagacaattttccaagaaaatgactgaccgttaaagttgcaagtaaagccataaacccggtacttggtccttttcaccattattgatagttttggcaaagagacatatatactagctaatatatgtttattccataaatacaagacatacatattcacattcctctaataatgtaacataactttttaaataaaacataattatggtttcgttgcaatagttaaaatttcaaaattctcattttctcgtttcaagatcttgtgagatacagtaacctccttcaccgtaaacatttgctccggaaaacttaatggcaggatcgtaggaagagaagaccgaggatagattctgaccaagaaacataactccctcctctgcattatccctgtcggtgaaccctagtttcggctcggcctgttttgagactaagcaaccgtgatcagacgatggacggctaagattggcattgagaagattgacggtggtgatgtcgtgaatgctaggccgtcgtttgtctttcgcaccggaaagctgtctttggtagtacttttgggcatgacttgcaacctgagttggtgtttttgatcccacaaagttcctcgatatgtttctccaatctcctttcccatacttgagaagccctaacaagaatctcctgcagaaaacaattaaacaaggtctcagcaaaccaagaaaacaaagtaacttgcaactcaagacaccaaagaagagtgaaacaaggatcacaaagattgaaaactttgttcacctgtgttcttcctccgtccatggaactcctttcctacggtcttgatcaaatcctctggctccattaggaagtttacgatacgcatcaaagtcacgtggactcacaacctgatcaaatccacaaggagtaactgaacggtaacccgggatcgggacaagtcctgcttcgatatcgaagaggtcttcttcaagcttagagtattgcctcatgacatctgatatggtctttccagggatcatagcagcaactttgaaccagcgatcaggcgtgtcatcagcgtagacagcaagagctcgctcaaacttcttgttctcttctttagtccagctcgagctttgcaagcacatcatctcttgaactacaaaccggtggtcagaagttggcacgtgcgagagtagtggatgcagagtctccatcgtttaaaggctacgagataaaagttctacctataaaataaagtacttaatatttttcctctaattcttggaagcttgatttgtgggtttagtaaaagactgaagcttcttataggatctaaagatatataggaatcaaactgggaaaactaacgaatagtttaatgatggaatcaaagaacctgatttagtgagagattatagcgtatattaattgaagaatctggaaagaaacacaaaagactaagactttgaagaatccttgagaatctgcaaaagtgggtcgtcaaagtaatacaaaacaggcaaaactcagatggtagagagagataatcagtaagatagatagggagagattgtgaagcaaagggagagaagaagaaggtatttgtggtttgtgttataaagagaaagagagagtgtaaaagttttagccaatggaaccactccactcccctacttggcttcattttattccaaagaggattcttcacaatgacacgaattctaaaaataacaataaacttcaattataaaattctaactagctactagctaggccaacatttcatatctttccaaaattttaataaccactagtatacaccgtttttttttgttaggtagtttttctctaatattattcaaaataaaagcgacaacacataaagttgttcatacttaatgatagtttacgtgttatacgtcggctatgtctaaggcttaactaatcataaaacacacataaaataaggagaaaaacttcaaatttactaaaaaaaaccaaaaacaatgcgattgctttacttaacaaaaacaatgcgattgctacaaattgtttatagatgtaacttaattaatgttattcgagataacacgtaagcttaaacttaacgacactttattctttatgtctttttttgtatttcgtaccacttgaaaatgatacttctacgaaatttcataagccgccacaaaaacaagattgaaaaagaaagaataaatataataaatgcagaagcgcctgtagctcagtggatagagcgtctgtttcctaagcagaaggtcgtaggttcgacccctacctggcgcgttaattttagtttcttactttttagaaaattactccttaaccttaaaggggtaattaattattgggatgcgactaaacctttttttgcccactttgggtactgttttttgtcgtcactcgctttatctactttttaattcaaaaaagattctaatcatcaactctcactcaaaagcccctttcacacactccattgttgtcggtgtcccaaaccttgttctgctctctcgtaatatgcatagaactaaatgctaaatatcttctcctaatgaatgaaagtgagaacaattctaacacaaaccacttaagaattaggcaattcaaaggttcatcaacatgattctctacctgtctgtttttatataatccatattcatagaactaacaaagaacgattcttttgggtataacatcagacagagacagaggtcagagtacaaaaaggatggcttgtaaaatacacttgaacctatgttgtagtaggaataggaaatgaagtagattgaagtctctgcaaccatgcgattctcaaactgggcttcttcagctctaagaagatctctctatactctctcttcagaaacaggtccaacgcaaacatgtagagctcactaccttgttcgacctcttcaattgcgttgaggcttttaatgcattctccaatgctgtacatcggctttgccgattcaatctcaacgaataccggactttcctgcaacataacgtcattcattaacttcatatcatccaatggttgagcgttttcactgtctatccgatcttcttgagactctgcataacaaccattttgcctggaggtttctgcttcatctacgtgcatctttgataatggagttgtgtcacgccattgtggtgattcagaacgattgtggaggagcttcttgcgcgaacgcgaaggaggagtgtatgtctctccaggttctatcactccgttgaaaatgattgcaagttgatcagcatgaggaacttccttgtggcggaattgtcctgctcttgggttttcctgtaataaaccaaagacaaacactatctgttcaaaatgtagtccaatgggagaaggataatagttaagacaactaacattatcatacccgaatatagattcgccattcctcttctgttgcaccaaagctacgagattcaggatcccatttcatgctacttgctccaacgagttgacaccagatcttccaagctttcctagtgcaatcccagtggtttttcagctgcggtctcgtataaccaaggccggtattttcattaatagtccccagaatcgtcttccacccttccttgttaaaatgagtgtcgggtctatttccctttaaagtctcttgaaccaacagatcaagaaacagcttatgtgtagacggagaccaatacccttttgtttgagggttagatgaactacacatgctttggttatcttcatcttcttcctcgtaacaacttcttcgcctcttccttacacccgagacttcatcatttttcacctctacattacaacccgcaaagagaatctctagcttcttgagatcatgcggaacactcaaccgatactgcccagcatcaggattctcctacggcacaaagcaatcacattttagcattttataaaatcaacaaaaatgaatgtaacaagtggttttgatttgtaaacctgtaaatagttagcccagtcatcatcagttgcacgaaacctgttgctctcagggttccaattcataaaactagtttcaacgagtctacgccatattttccactgtctgctcattgtatcccaatggttcttaagctgcattctatcgtacatggcgcctgtttgctcctgaaacgatatcaatatgttcctccaaccttctttcgaaaaatgtgtccctggtttattccctagcatcgtttgctccacacataaatcaacaaacactctgtgatactcaggctcccacactgcttttggcctcatttcttttttaacttctgttctccaaaactcctaacaattaaaaacgatacctttatcattgtgaactcgtttttaacaaaagcacagagagacagagacatttgcataaacattaacccaacaattctagatattgaacacaaatcatataaacaaggcattgaaccagagaacgcagacgcaattacttgaaacgtgtttcagggaaaaatatgattttgcgacctgagacttcgcctacttcaaaatcccagtagtaaccgaacacgaaaatggggaaaattgcacgaaaccctaactcgattaatcgggagactgaaaaactacgatagtggttaggatttcgccggcgggaattgggaagctgaagaagggaaaacgttaccgggaatctgatggaaacgcgacagcgattgagtggccactctgtgacgggtgtggctggaagaagccgatcgcgatttttcctctctttctctgctttttgcgtttgcgccgcgctgtacggattttccaaggcttttctaagagttatgggctgggccgagttctttggtcatgggtcatagcccaataaattacaccggttcttgcctgactatttgtttccgtttgaagagatactctgattggttaagaggacacagactgtgagactggtttgcgttgggtccggtcttgattttgttcaaatttctgctcgacttagatgttttttttgctttcttatcgaaacatttttatagctgattatgtgaaggagttaggagaattgaatatgggtttatcgaaaaggtgattattgttccaatcaaatatatttaggtgactatcggcatcattgataagtatagatatagtttgtgggggagggtgaccacgattaccaaaattaataggggactccagcaataagatttgctttaaatggtgccgaccaaataataaataacatttgctttaaatgggccgtaacgtataaatccagatacaaaaataatggaaattagtccaaaatttaagaaataatggtacagaaatagctagctagctccagctcccccaaatcgtcactagggaacaaactgctttctactcgtttttttttatgatttcttttgcttattctgttatggactttgtattttcttgttttctattcgtggttttcttgtggactgattagcgttaacacgttataaatcttgtatactttactttttgtgttatacagaaaatcttcgagagagaaagataacgaggcataacacatgatttttaccaaaaaaatatattaggaagacatatatatggcttgaaaatgtgactgaaaagttgagattctaacaaacattttgtctcaacggttaaaatgtgattgcactctctaaaccgttagtgtgacatcgtgagaaagcagcagacacatgactatgatgttaacatttattatcttaaaatgcatgtagtctttactctttagcatgggagaaaaaacctcaatccaaagtagagtttggttatgatttcggtggtttggcatgtagtctttagttttgatagagaaaagggctaagagacatgcattgatgatttgattctagtttatgctgttatcgactctgtgctagccattatatttgtttagagtcagaatttatgatcagtacgaaaattccaaaaacaatttctatagatatcatcattgatatgtgtccctatatattaatttccattaatgaattcaatttaaaatgaaataaaaaatgttggttactatagtagttcctaaaatcaaatttgtaaggcatgaaagatgaaagaagggagtcatgtttttaatgcatcctctttgtcctcattcactttgttttctttcccttttataaaaacctctctccctatctcacacactcacaaaagtgtctcccttattttcaggcacttcaaaataaatatacgaaaataaaataaccatttcttaagtctaaagaccttctctttcaactagaagcctttaagccatgtcttcttcttccttgatacttctcttctctactctctctctctttctcaatgtctcactcgcagacaatcacacggcggttgttataacaacctcagatactccaccgccacttcctccgccttctccaccgccacggcataacttcacttcctctctcatgcccggaatcgcagtcgttatcgccgtcctcactgcgtttttctctctcactttcttacttctcctctacgtcaaacactgtaaacgacgaaacggcagcgtttacgtaaaccacccgcagcgtttcgcaatcactagatacggaggaggatattacaacggtggaggagtagtaggaggaaggaaaaactccggtatagaccggtccgtgattgaatctttaccggttttccggtttggtgcattaagcggtcacaaggatggtttagagtgcgccgtgtgtctcgctcggttcgaaccgacggaagttctgaggttattgccgaaatgtaaacacgccttccacgtggaatgtgttgacacgtggcttgacgctcactccacttgcccgctttgccgttaccgggtcgacccggaagatatactcttgatcggtgattgtaactcctggttcgagctccagttctctaaagatgaatcaaacagtgttaataataatcctcccggtttaacccggtttattccggttagtcgaatttccggtcgtcattcctcggctggtgaacgagcgagtcgactcaacgagattagaacatcttcgtcgtataaatcgaatccgatgtcgtttcggagatcactcgatagctctctgaaagttaacgacgccggcgaggagaaatcggaatctgtcgccgttaattgcttggatcgtctacagagaaaagacggattgttgttgattccgaatcgggagagctttgaggggagatttgagcaccggataattatctccggcgggaatcgagacgatcagaggtggagcgaagtaaggccgtcggatcttttgtatttacgatcagagatgatactcagcgattgccggaaattagctgcggcggagggtggcagagatgtaattaacgggagaagtgtgtcggagttaacgggaattgagagacggaggagatggggaggagagccgagacaacgacaagccacggcggtgatttcgaggtggctcgcttggtcccaccgtgcctccgcttccagcattgtttaaaatttatattatgatccttttagttttgttttataacagttttggccggtttagttttgttctataacatttagcccaaactaatttattagaggaatgcaacaatggcaggtagggataaattagtgttgttcttttttttttttgaaatgcgaattttttggagtatgcacgagtgcaaggaagcacaaatgatttctttttgtattttaatttttgaggaaatattaaggaaagtgaaaggttgagttttttaaaattaatgtctttcttggtgtaataaagggcgagtattggggatctgataactaagtttaaatagaaaaagaaatgactcgtgtttgtctttctatacattgaactcataacacttgaaacattatgtgcttgcaagacctttatcaatgagttcttatactagaataatcaatgattttgaatatagtaatggagtaaactttagactttgtagcattgttagtttttgggtcctcaaaagaaggttccaattcaaattttgatataagacaatgctctgacacaactcatgatccatccacatacctctatgattgtttgtatatacatcaatttaatcacacgaaacattatatacaaatttgattatctcgaaatgttccatacttccaaagactttccatgtaacactagtcgtatctttatgtaagaaccaagaaatattcaattcaaaatataactcgtgatttctgtagacagtagtacatctctttttatgaaactttgggaagaggcgatttaaaattactttttacatttttattttacccttttctatatatggagtattgtgtttttgttattatgaattgaacgcaaagaagtcataacgtgcaagtagccagagagaactcattccaaatataagtatgaagcagatcatttactttcaaagtcattgttgattgatacaaccaatttggaatacaattaataagatgatgatatagtatttcattgactactttaatgttttgaattaatgatatttcttgccatcactttacaactcatcatttccaatttccaacattctcaaaaataaaaattattgtttttcttattcattttgtggtttttcgacagctgatcttgttccttgtttgtaacaaccacttccacttgtgttgcccactccctttattaactaggtatcgagaaaaataaggaaaagacgattgtagaagcaagcacacgtagtacaagcaaaaaaaaagtagaacaagtttgctttattcatttagagaaatcggtgtagtttgtatgattgatgattcaaaatcatacaaaagtaacaatttcttcgataaaatactagttttgttttattgctcataagagagtatataaaaattcaggtaaaaatttaaacgcgattcaaaaaatttaactataacgaaaataaattaactcataagagaaaaaaatccaatttaattgtttaaaattttgcatgattatcatgatacatagtctagtctctagtgtttgtggtattatcataataagtcaccatcaaaattcaaattcatgttgtttgacaaactctacatgagttccacaaaagaggaaaatcatcatttagaggcaaaagcatatgtcacattgagatacttacttaatgttatctaaaacagtgtttttttgttgtcatttacattttatattgttttgtttggacttactatcagaagaaaatgaaatggttgaataagttgcgttttgttaatttacatgtcgagagaaaaatggttaacagagataaataattaaaatctcaccagcatggacacataaaggagaacattccatgtggcctttgcctgtgttatctcatgtatagtccatcttattactaaccatagataatgacattttcatagaataacaacgaatgtattttgtctactagtcattgccatgatttcatctgcataaccttactattctcctccgaattattgcgtgtacatacattaaaagtttggtcgtgtaaaacgaaatgcaaaagcacccaattccaagtgtttaaatttgtttaaaggcctttcattacaagtttgattgagaacttgatacatttcacatttgacatttaccgtcaaagtaaaatctatactgctttgattgttgttagtcacataagcaagaggaattataggtaccaaaagcattaccatgattttttttctcttaccactaatttttaccattgattgttgttttttttttaaataacattttctttgtaccattgtccttttctttctttctttctttttttcttcaaccattatccttgtctaggagaactgaaagaatggagttgcataagaatatgggcatagcaactcttgggaaagaaagaaaataaatgatttctaaacagactgtatatgaaatccaaaattactgacaaaatcagagctcaagaaaaagtggcccacgatagaatctttgaagttagcagagtttagagctgcagagtcactagatatgcaagatatattatctgacaagtaaagtaagaaaaaaaaatttgttttatagtttcttaatttctttaactatgtttcctcaaataatccttaggtactaattaaactacagatgttttcagacaaaaattagacatgataaagaaaagttaatatctccaaaattagaaatttaaatttaatcaaaatggtaacaatctttgcatgaaaaaaatcatggaaagtgtcgagtgaatccattggttcatagaatgagagtccttgggataaaaagagttgatacgtgtgtgtacatggtcctcatcattatcgtcctccctttttcaatctctattacttttcgcaattcttgttccttagcttcttcatgaaaagcccactcgagtacttgaaagagtttctagacactcaaaaactcaactgtcacagtctccaagcttaatcaagccttttttggtttcttttcagcttttttgtctgacttgtaagtctattatattaaccaatttactcctatatctctctccgaccccattttggctttttcctctctctatctcctgaaaattttactcttgctttttttttcttttccctgtcgagagagttaatattattgtcacattacaagttttggtaccatgactacgtggagtctttctccatcacactcatgcttcgaagaaaccatgttttagcaaggaggtttaaaaacactacatagagtgtgttctttacacattttgggtcaaacaatcctgaaaatttacgacatatatttggaatggcctacttggtaatgtgtggattagattcatgaaagtgagatatgctgcagtgaatccggatctacggcttgatatgataatggctgccgttaccagataaagaaaatgaagcgagtgatttgacaagacaaagactatagacaaagacaagactatgtcttcttcataagtaaaaataactctcttgtctcctttctctcttttagatatttcttctgcaaactgttatcacttcctattctgattctctgctctgccactacacagctatttgatctgaacaactcaggaaccttgagatagcttaatattgaattgaattctcagataaacattgagaaaatggattttaagaagaagatagaaggaactttctctctttcgattaaatgaatcaatccgtgttgttgtaaaatgttgacatcacaaaactaaaatgtaaagaatcgaagaaacaaacctaattcaacaaacaacctacagaggaaaggcaagagaatccgagaagaaagaacaaaaatgaaaaacaaaaaggttacttattcataggaggaagttctctaaattcttgcctttggtaatcaatctttgtgtggctttgcttctctgtttctgccaaaaaaaagagatgtttttggcccagcttttcattaagacaagagtcagtttggcccagcaaaagagactacttgcctgtatatccataggggagaaaatataaaacatatatataggggggaatgatgaagaagaagtaaaagctttgtgtgtgtttagtgttctaatttttgtttcgtttcttggcttcgctgtacaggataactccacagacggtgagggagtaacccagcattccggtcactgacaccggattcttgaagattagaatagagaccaccactgctactgctcctttggcgtttcctagcacctatcacagagcgatccaaaacgacgttttatgagtttatgtgaatcatatctcaaaagttcgttttgaaacgcagggaacatcaagcattatcatacacataaaaaaagcaaacccaactcaacatccaatacaaatgacaggatctcactaacaggaggaccaagcagataatcgtttctcactagttctacacttccttggactaactttctttcaactccaaccaaaacccgtatcattttttctaccataaacaatgatgccactaagaatgtaaaaggaatgtgaactgtaatcacctgtaaagtcagggcgctagtgtggtttgtgactaagaaatttgtcaagttgactaaataggcgagcgctgaattgaatagaagataccaaacgattctgaaatcatctcttgcaagtgcaattgtaatgccgacaacatttttctccatgataagagtagcaggcagaaggagcacgacagctattggagccatgtaaaggaggagattcatggagttcagcttttcccttcaatacaatatttagaatcttttaagcaacactcatataaatacttgaactattgatatatagacctctaacaaggcgactacaacaataccagccatttcttacccttcagaagaaagcaaaattccttgaagcactgatttaagtgctctcgcagctgttgctgcaatgcacataaggaatccaaacaggtgaaagcttggctcaccctgacaacacccataaattaaagaatatcaagcatagaatcaaacacatcacacacacaaacagaacaaaatctccattactcgaacttttttagcataaagttcacatggttaagagaagatgagagaaacacaaaatctagcgaatacaagcacaaaacaataccaaattttctcatgtgaagcataattcaacaatgtctgagcttgtcacaaagataaaagctagcatcattggccaaacatgaaactgaatcaacgatatcacgttcattgctccagaaccatacctatgttcccaacatatctagttcattgctcctacatcacatctacatcaacctctctaacaactcatccaaaagcatacataagggattcaaatttaagaggtcaaaagaagtgaaaataccccactagcaataacaactccggtgacgacagggacgagagtgaagtaagtcaaccaagcctctttcttacgcgtcatcaggtaagcaaacacggcggtgaaaaacggcgtcgtagcaccaatggcttggttaaacgaaacaggaagaaagcggagagagatgttaccaaagaccaccgacacacaaaaaacgagacttagagctgcgatcttaaagaactgaactctggatcgaatcgtctgcatcggaaccatcttcaaccaagcaatggcgacgtagctgagtaacgaacaagccgtcatgtgacacatggtgagaaagatcgggtacttgaatccgtaattgctaagcaagtacttgttcagcaacaatacaccaatgttcgatgagtaccaagacgcgactagcccgattgtgaaaaaccggccattcgtcgccatcttcatcgcttttcttcttcctaatcctgggtcgactcgatctgatgagatgagattcaaactaaaaccctaacgaatttcacgaaattgggattggtgggaatcgaatctggacaggagatggagatctctcggtcctccgatacagaattttgacgcgtcgtgatgatgttattccatcaatgggtaagatttggattaggttacaacacgcgaaaatgctggagacgaagaaaccgggaaagagaagaaagttgggatttttggagaagaagaagaagaagctctgcaaaaaggagagatctttgggctaaagctgcaacaacacttctctttccttttttaactaatttattttttctttcagtttcatgatattataattggtgcgttatgtaatgtttctttgggctaaagttttttttgtttggttacttgaaaaatcaaagtgtgaagatgtgtaacaatgaaggaaaggagccattgactttgttattggttattaccgaatctgagttctaaatttaatgatttacgttcatatactaatccttgaaaattcctagctaacgaaacatttcagttctgagcatatttaattgactaagtaaatcgaccacgaatctaattgtaattaacaaagcgtttggttagttaggcaatcgattttacattaatttttctaaaaatacgaactattcagagaaaagcttatctaagtagcagaagtttggcagaattatgatgaagttgaataaatttagcaaacgtttttgacaaagtgggtgttaagtctagtggtagaagaccaataaaagctttattagtggtgtagcaaagggaaattatgtaatatacaatagtttagaatcgatgctcgattcttaagtcaaaacaatggtaggatcatctgcatttgggcttgatgttattagccgttacaacttgtgaagatgaattacaactcgtataaataacaatgaaatttgcatatgaatcatttagattcaaatttgattttataaccactcaatttcacattacattagccacttataaaacaaaggatttttcttaggaatctcgccatatccataaataccatcttcctttgcttcccaagtacaatttctacatctagaagaatctctaaccgctttataaatatcgaacacacctttttttacttgttcttggctaaatccacagaagtagagtgtcgaattcataaaattcacgtaaaacatccaaccatataatccacctttttgtagaatatggaagccatgatcatcatctcttgatttacaatgaactcctaaaagataatcattgtcattataaatcacaaccctagtaagaggacctttcattggaaatacttttccatcatgttgtagagtttcacagcctatcaaagatattaatactataaagatgattataaacattgagtagaaaattgttaggaaatttatgttagacgaattcatcatgaagattttcttaatcatgatattgcattttctagaacttataatttatttatatataatgagctaactttacaaaaaaaattataatttacattaatttatgttgaataacctaaaatagtcatgaaatcactagaagtttttgtgaagtaaataagaaagtaaaagttgctttttgttcccaaaaaaaaaaaagactaaaagttgcttaaataacccaaaatataatagaaatacatcaattaggttaggtattcatatccaaaaaattaaattgacagtaatgatccaaaaaatagtagatttattagaggtgggtctgtctaggtgtccaggtgaacaagtgagaggagagagttaatagttttgtctgagaatctgacgatcacttaactccaaaacccagtggcaatcatgtaattttactgtaaagtttcaaccagaaatctctttttttctctctctctctgcgctgcaaagcattgatcatcatcattcatcatcttcacaagtctcgttttcataatttatatgaggattcgtcatccgggtctatacgaatatggaatccgtacagccacatctcgagacctttgtctctgttaaagtaatcaatagctcaagtggctgtgatggcgatggagagcctcgtcggagctccggtgcggtggagaaggaggaagaaatagtgaaagatgaggagaggagatccaatgcgtcggtgtgttcggtggaaatagatctggagcttggattgcctgagaaagttgtacatttgtcgcaatctgagagagattgcaggatttgtcacatgagcttagatgcagcgaatcttgaatctggtgttcccattgagcttggctgttcttgtaaagctgatctcgctgctgctcataaacactgtgctgagacttggttcaagatcaaaggaaacaagtaagttcaaaatctccatatttcttgagaatggttgtttggtggttacttccattaggagtacgtaaaaatctaagctttaagatagtttaggaaaggctaaatgactaacatttccattgatgtaggaaagttttttactttctttaggttattgtcacttttggttattgaacagctttcttttgactgtctttttgagaagtttcagttttgaggccatttgttgtcagatgagagacgcaaagcttagctttttctttctttgtgatgagattcatggtttggttttgctttgcagaatctgtgaagtttgtgggtcgattgcgggtaatgttgttggaagtgttgaggtggagtctgaggaaagccggaatgaagcaaatggtgtagagaatctaactctgagaacatctggtccacgattggtggaaggtagaagcttctggcaaggtcaccggttcttgaatttccttttagcttgtatggtctttgcatttgttatctcatggctcttccacttcaatgttccttctacatagcaacacaagtaatgttcaactctccataagaagaagagattcattagagatctctcggaaaggtacttcactcttgtaccaatgccttttttcactattaagtttgatgtaagtttagagaggaagaacaagacctagaagagctcattatgctatttgcgggtttaatttctatctagaatatgtaaatctgtttcttgattgcggatgatgtatatagctctagtcactcttaagcttaatgcaaatgcagtcttgtgaaagtctcttctcttatctcattgtattatgaatgatctgatcacttgcattgcattttgcatcccaagagttcagtgatttacagaggaactcaaaaaccaaaaatagaaaaaatcctctgtttccatgttgcaatagattaaaaaggctatgtacaaaaaccgaaactcaggccatgcttttatgtctcttcagtgacctctgattcatcttcttcttccacaattgctaagacctttgaggaactaatcctcaaagaagcgcttcggattttcataggcagcttctcattattagcagctaaaccacattcgatttcttcttcttcatcatcgtccttcttcaggtcagaaggcggtaaaaaacaatccatagacagacccttaatgttaaaatccatttcctcaatctcccaagtctcttccatccgagtcctcgaatgattatccgagttctcaccaaaccgaaacagagacaccgagcttttaccagcgtgtgctaccaagataccatcaacggtcctgtaatcttggatcaaagactccattgttgtctcccaaaatatactgttatcgtcttgagctttgattcttagaaggtgagagtcttcaagttgaatcaaaagacctgttctctggctgaaacatccccacacagtgtgccgtatgatctcaacattgctgctgcttctcgccttaagcgccgatggctcagcatcaagtttgagtatgaaacagtcttcatcatttatcttcttctctcccatgcatactgatcttgcaaatagattagccgttgattttggatcaagaccctgtttcattttgtttcaacgattaaggtctgaaacctttgtaatgattccattcagacaagtactaaacacaaagatacttgaaacaagtcaacgacaagtaacttaattcatcattattacaaatttcccaaaacaaacaaatgctattggtttggtgacaataaaagaagatcttattaggttgtaaataactatacacttggtaatgggaacaaaagtctactttgttataacaaaaatactatttggagaaaatcaagtagcaatatctttgttaacaaatatatctatttgggaaccaactaatgtatactagttataagtatatatttttggttgttgttgttagtggtggaccatagatggttccaactttcaagttccaacaaccttggtaacttgtaagcattttctccactttgaaatgagaaaacaagagcgcaagtacatgggacacgtcacactttatttaagaccacatcaaatctcaaaagtcataagtttacattggaaaaaatcaatggttttatcttaaattaaattatatgataatatattaatatgggtatatggttctcgcgtaatgtacattagaaacgttcttcactctagtaatttttaattagtactagcatttattcgttatcaaattttccaaatcaaaatccaaactattcaacgaacaatattgtacgatgaccaattctatcgtttgacaaagttgaaggtaggtttagctagaaaattctcttttggaagtaaacgtggtaaagaaaaacaaacgaagcaatgaagaataaaaagcaagaggaagtttgatgattgaaagatctttttgctgattgacaaaaaaagaaaaatctttttgccaacaatcaaggaaaagaaaacgtcaactactaagaatcataaaaatcaggaatagaagaagaatgaattattgaactccaagtggaaaagctcaatcacacagtgccataatgatcagtcgttgcatatgctttatgagacataaaggatctttgtcttttcatgaatcaagtagaaactagaaatgtagcataaccacaagaaaaatatccacattatttttccaaataatattatttacaaacatttcacaaaaaccctataattctttgtataaaacaacctatattgccttgaacaaaaaaaaaacccctataatttcgcaaaaacataatgaacaaagtaaaccaaaaagatgaacgtaaaaaaaggagctatgcctctctactacattaacaaaaagaaagaccattcttcaaatattctcgtttctcccaatttcgtcataaattaacttcttgatataatgttttagggttttgttgtttaccatccttagattttgcaaataaaaaaaaaaactaaaatttggctttctattgatttcccctcaaatattatatgattgaatggatttgactaataaacaacggaaaaggaaataaaaagaaaaatgaattacctggaggaaacggcgcaatggtctaggaggaccacgagaggcatgagaaggatgccacggagtttgtctccaagcgactttggcgtcactaccggcactgattttgcagcctgaaacgacaagctcaagacaccataactctatccccttttgccacagcacaaagcctcctacttctcctcctccactcttgatactccttgcctttaccattttgctgttcaagcttccttctcctgtgcaaaactctgatgctgtcatcctcacttttcccatcgcatacatgctctctaccgcgtttaacgctcgatcgcctcctaccgctgctatgtactgctttactatgtattgcgccatcgacatctcctgtaattttccaatacaaaaaaatcttatatatgatggcggatttaggaatcaagatattgctaatgtttttaagtcaatcacatttacatgtaaattttcatttaaaacctagacaatcttttatttttttcatcaaatatttttgtacagtgtaaataaaactcaaacatgctttttcctcccgtgtaggttctgacaaagaaaatgttgtttcgatagtaaaaattgtggttttatggcaaaaacaaacgaaacttagaaatccatgccataatataaaatatatcaagcactcgatccatattgttgattgggtttaagatgaaattttggtagatgtagggtgataaaaaaagaaggaagatgtaattacgagaggttggtctttgatgtctttgtggatgggattctcataatcgttatggtggtcaggctgaacggggagagggatcaaaggagccccaacaactccgagaaggagctggatctctgcattacgaccaccaaagagtcttgtcatgtttgtggctgttgcggttccggtagcagtagcggtaggttttgaccagtaagatttcatttggttccatccaggttttgtcttggacgcagcaaataactcctcaggcatgggaacctctaggacggtctctaacccgtcctcgaggttgtaattcggacaaagtttcctcatattcgcaaaaacaaaaaaaaaagggtttcgaagggagaaatttaagctgagtgaagagagggaggctatctgtgggaaatttggatttgatgaaaacttaaaagagattgaaattagaaaaaagacattcgtcgttgtcaccaaccgaccggaacgtggggaggccttttgttttgtcgtgtctgcacgctctctcactctgcttacgtctgtttatttatacacaagacatgggatcaagatatgccaagtacaatatctattttttggacaatctttaattgctaacaaaaattatgaccacatcaacctctaaccgaattgaatatgatacccacccttaaagatttatattgtataatttaatattttttggacaaaataatcgtgcaacaaatttactacaagcagagtattgacccgtttgaaatcataccagaaacttcatagacttatacgatcattctttttttttatatatatataatagtaaatatcatttcagttaaattggacatgatctctaaagatcggaacattggatgttgaatccaataccgaatgactatgaatcgaacaaattaatacattggctatggcaatttcgtgatatcctcgctacctaaagtcgtaatgaaataaaacattcctaattttacaacttttataaatatattaataagtttgattttcttaaaatagtattaacaaaagtaatacacgaaaaaaaaaagaacaaaaaaaaaaaagtaatactcgagcgcataaagttttttttctcttgattagttgagttgatataatacaatttaagtatctagttgttgaattgaaaattatgaatttggcttttggacataacaaatcagaaaagctataatttaaaattaattaacgaaaaaaatggacttaagcaacctgaaaaagataaacttgagcgggtttattgttattttctaatcactatgatactatttgaattcactctattcttaaacctatgtattctctaactagtattagtatgttaaattgttaatattcaactggcaagaaaaaaaaaactgttttaactgacggaatacttttgtaaattatagttgtaaacacctaatagctaattatagtatttattaaacatcaaagattgcaattaaatagacctttttgataaatattgaatagaccttttgacttgttatgaatcttgatatatcaattagtggcatgcagagcgggagtcgttatatgtgaaccgaagttatttatgactaaataggaacattttggtgtaaatgtatctcccaattcaatgaactttttttttttcttcatctaattactattttagttctaagactatacaaggcttataatcagctattgttttaattgtaagactatcgttttctcagtttctgcaaagataaactcagctattgaatatggtttcaaaaaaattgtatggacttgcaaaattatttgtatagatcttttctatagttaaaaagtgagggctatatatttttttttttgtttggttgtaaaaaactatgtgtattgcacgttcatttgttcttaaaactatatgattctgtgtttcttgtattttttttttctttttctttccggaatataaaaggaatcaaatacctttgtcgttgctttctagaatatgcattttttttttttgcaccgtatataaaacctatttaattttatatttgatataatactgtaaggtataatattacctttttattgactccgtcgttttcaaccattttgaaatttgattctctcgcagttaaatagacagataatttctggtgatcgtataatattttgtaatttttatgtttcgttttttccaaatactgtataccacaaattatttaaaattcttcctaattttctagtttttttttttttgtaataaagctccatacattcgtaaacttgaaaaaagaacttctgttaccatctctcaaaattgttgaaggaacataaaattctttcagaaaaaagaaaaaaaaaggtaaacaaataaatgaaatgttatgagacaaatacgaataaacaacagtaaagagtagaagcaaataaaagagaaaaaaaaactatataccgaaacagagaagcagcggcaggaaaactcaagactgaagatcactttggaaactgatacttgagatatcgtcacgaaaatgtaaaatgaagctcaaagtcatttcatagctgctggtcaaggtaaggatctctaggcggattcgagccaagatactccgagacctcagtaacatacgttttcagcttcgaggtggttcgggtgagccaatcggtgtttgtctgatccatctcatccttcatattcgccatcttctcttcctcttccaacatgctgacccatctcttacccatatacattttaaccgcatccacaccttgtttcacgacttcatcaggcgggacaacaagcgggttttggtccaagttcagtttggtcaagttcacgagcgtgccaaaagcgtctggaagagaatggatctggttgttgctcaagtcgagttcttggaggcttatgagatctccgaatgaagcagggagatcttggagatcgctgaagttactgctcaggttaaggtactcgaggttcgtgagcagcccgaaagaatttgggagaccattgagttcgttgaagtgtgcatcgaggtagcgtaaggatctcatttcaccaatggaagttggtaatgatctgattttgttgagatggatcaagagcttctctagtttcactagctcgaatccgatgtttgttggtaagtaggtgagattgttgtagctcgcatccaagacaaccaacgatctttaaataaaaaaaaaaacagaagtaagaaaaaaacagaggaaacagagtcaacctttaaagataaaaaacacttacccacaatggcagatggaatctggtaaagttgtgagtttgttacaagagacattcaaaatcttcaactttgacaataaaccgatcgaatctggtaatgtctccaggaaattagtggaaacatcgagttcgagaaggttatgcaaaccagctatcgaatcaggaatagcctgttacatacataacctttgatcaaaaacaagcaacacacacttctaaatctatctcaatctagacactaccataagaaccgatccaagaatctacctctatgctaaaagactcaaaatccagagcaaagtttacatctttgacaagcaaacacacttttgaatctatcacaagtactgatccaaatgtcaaagaattcaccctaaagagtcaaaatccagagcaaagtttacatctttgacacataaacatatcagaattctaacagatttgatcaaaagattatgaatttgaccattagggacttagaaaaactgacctgaagctgattgttatagagattaagaacaaggagaccttgaatctttccaaatgcttcaggaagcaacttcaatttccgaccagacaaatcaactcggtccaatggattctccgcagcttgttgcagtatactcacaacctcttcattgacttcaacctccgcagcttcctcctccgccaccgcggcagcattcttctcggcagactcatagatcctcacgagcctctcctctgcttctttcaaaagcttctcataagattcatgaagctcgttaagcttaaggatcgatttataccaaatcttctcttgctccacagcttctctcctcttctgttccttctccgccacgtcaatatcgttaggagagagagcgatctcttcgaaagattccgacaaagacgcgtcgatctcacggagcctagcacgagctctgtcgacggtttcgtgatcgggtcttggtcctagggttcgaagaacagatcgggtctgagaaacgtcggcggttgcgttagtcatggaggcaagaacatcaggatgagccaagtgaggcatctgagtcactatctcgatagagtggtttgatgatgaagaaggatcggatttggatggtggtggctcgacatcggaagaggaagaggatttggcggtgaatgaagggagacgatccaagacataagagagaacagggaagttcttagggttaagctccgtcgccattgttgggagcttgatggaagagacgattgggagattgaggaagaagaagaagaagaagaagcgattattggttcgtgtctcatgtccttccgtactattagcatctctattgccaagtcaaagtcaaagatcgttaaattacacgtggttttgtattaatacaagacaagtgtcaatgttatcctacaaagaagaaaaaaatcattctaaaaacacttcttacacaaataataattttacacttagtagaaacaaattaattaaggttttagaatagataagataaccaagaagtttagagaaaactttaattaaggtttttgaaaaagtgaataatttttgttgttattttgtcttcattttaagattgtgaggcccaatattggtgacacaaatgttttatgggcttgagaatgatcttagggaaaactatattgttattcttttggaaatgaaaaaaaaaagctcatttttgagactatgcaatggagactctgttttcgatatgtatgataataataataagttaataacttttggaattttactgatttttctgtaatctcatgatgattcatgatgatgaagacgatgttatagttatacctaaacatttgcttattttcaacttaaaaatgtatttattttataaaattcaacttttaaagtaaaaaaaaataaaactcaatatctctgatagtgacgacacagggagtattaaaatcgaaaaacgtcaacaaaaccggtggaaagttgaatgggtcgaaaccaaacgcatatagccataaaagcattgtctccattatagattctccatatctgagaataaacaaacgattggataaaccgataaagtacatagaacttcgatctttttcacaataacccaaaaaaagagagaaagcaaaaaaaaaaactagagcgtttcaattacaatggaggagaagagaaatggtctgcgtgtgattctcttccctcttccattacaaggttgcatcaaccctatgcttcagctcgccaacatccttcacgtaagaggcttctccattaccgtgatccacacgcgcttcaacgcgccaaaagcttcaagccatcctctcttcactttcttacagattcctgatggtttgtctgaaacggagattcaagatggtgttatgtctttgctcgcgcaaatcaaccttaacgctgagtctccgtttcgtgattgcttgcgtaaagtgttgctggaatcaaaagagtcagagagggttacttgtttgatcgatgactgtggatggctcttcacacaatctgtttcagagagtttgaagcttccgaggctcgttctctgtacttttaaagccactttcttcaatgcttatccgagtcttccacttatccgaaccaagggatatcttccagtttcaggtaattaatgcttcatgaaatgcttatttttaatggtcaaattgctatataggaaaaagttatctaacttgggtaggaaattcgtatttttgtaaacatatttgcatactgtgactacaaatgctcttcgcactctcacctatgatgatgtcagtctattaaaaggaaaatgtgtcatccaataaaaataaggaaagtaaaatttttgcatttgaccaaaatggtatatttgtatttattcataattgtgttgtttttttaaaaaaatggcgtcatctctactaataaaatagcatggcatgtcaatgaatattggtctaacaaataaaaagttaaagttgttcacgtaactaaggaaaagagtaggatatttaggttatttactatggacactctattttgaattctggttatcaagtttataagattgttttgagcctttgtgtcttagaatcggaagcagaggactctgttcctgagttcccgccgcttcaaaagagagatctttcaaaggttttcggggagttcggagagaaactcgatccgttcttacatgctgtagtcgaaacgacaataagatcttcagggttaatatacatgtcctgcgaagagcttgagaaagattcgttgactctttctaacgaaatttttaaagttccggtttttgcaattggtccgtttcacagctacttctctgcttcgtcaagcagcttgttcacacaagacgagacttgcattctgtggttagatgatcaagaagataaatctgtgatctacgttagtctaggaagcgttgtgaacataacggaaacagagttcttggagattgcgtgtggtttaagcaatagcaaacagcctttcttgtgggtagtacgacccggttcagtactcggcgcgaaatggatcgaaccgctctctgaagggctggttagtagccttgaagagaaaggaaagattgtgaaatgggcaccacaacaggaggttcttgcgcatcgtgccacaggagggtttttgacacacaatggttggaactcaacgctagagagtatatgcgaaggggttcctatgatctgcctaccaggaggttgggatc

SEQ ID NO: 699 - DNA, 54252 bp, Arabidopsis thaliana
aaatgctgaattcaagatttgttagcgatatttggaagattggaattcacttggaaggtcggattgaaaaaaaggagattgagaaagctgtgagggtgttaatggaggaaagtgaaggaaataagattcgtgagagaatgaaagttctgaaagatgaggtcgagaaatcggtcaaacaaggaggctcatcttttcaatctattgagactctagctaatcatatactattgttgtaagttgggaatatttgctaaagatacctcaacgtttctataaattgcaaaaagaaaagcacttgattatattgtctgttgtctaaaacaaaccaaacattcaaaaaagctcattgctattttattactgaatcaaaaacttgagtggtttcacttgtcatcaccaaaaaagaaaaaaaaacatttcgtgtcatagtcaagtacacttgtcactgccttagcaatgtaggccagtggttgtcttattgaatagactccattctccaaaatcattgttttgctttctgcagataagaaaagaaaaaattgcaaagagaggaagaacaaagaaacttgaatggagaagagaaacgagagacaagtgattctttttcctctaccattacaaggttgcataaaccctatgcttcagctagcaaagatcctttactcaagaggtttttcgatcaccatcatccacacgcgcttcaacgcgcccaaatcttcagaccatcctctcttcactttcttacaaatccgcgacggcttgtctgaatctcagactcaatctcgtgatcttttgcttcaactcacgcttctcaacaacaattgtcagatcccatttcgagagtgtttggctaaactcattaaacctagttcagattcaggaacagaggataggaaaattagctgtgtgatcgatgattccggttgggttttcacacaatccgtggcggagagttttaatcttcctcgatttgtcctctgtgcttataagttctctttctttctcggacattttcttgttcctcagattcgtcgtgaagggtttcttccagtaccaggtacggctttgactcatagtaggtcattgttcttattgttaattgagtcatcaaagacacaattggtccgtatttcttgaactttctaggtttgtttcagattcggaggcagatgatctagttcctgagtttccaccgcttcgaaagaaagatctttcgagaattatgggaaccagcgctcagagtaagcctctagatgcttacttgcttaagatactcgacgcgacgaagccagcttcagggattatagttatgtcctgcaaagagcttgaccatgattcacttgctgagtccaacaaagttttcagcattccgatatttcccattggcccttttcacattcatgacgtcccagcctcgtctagcagcttgttagaaccggaccagagttgcattccatggttagatatgcgtgaaacgagatcagtagtctacgtgagcttagggagcattgcgagtcttaacgagtctgacttcttggagattgcttgtggactaagaaacaccaaccaatccttcttgtgggttgtccggcctggttcagtccatggcagagattggatcgaatcattaccttcagggttcatggaaagtctcgatggtaaaggaaagatagtgagatgggcaccgcagctagacgttcttgcgcatagagccacgggagggtttttgactcataatggatggaactcgacattagagagtatatgcgaaggagtacctatgatctgcttgccttgtaagtgggaccaatttgtaaacgcgagattcataagcgaagtttggagggttgggattcacttggaaggtcggatagagcgaagagaaatcgagagagctgttataagactaatggttgagtcgaaaggagaagagattcgaggtagaatcaaagtcttgcgagacgaagtaagaaggtcagttaaacaaggaggttcgtcatatcgatctttagatgagttggttgatcgtatatcaatcatcatcgagccactagtgcctacgtgacacatgaaatgggattctctatacgaaactcttgtcaattgattatagaacaaagtggattcatttgtttgcatttgcgtgactaactgctgtgagttaatataatcatttatcttttttcataaagatttttaaaaagaattatttcaaaaaaatcttttttacaaacactcatacgggtccacgtttacagacacgctcctttttaatttataatcaacctacacgtacaacggatctggtcttccctcagattaaataaaaaatacacaaatctgatcttttctatatagactatagtatttatcacattgagaaacgtagaatattgtcttcactctaacaagcagtgataatataaagatttcttacgttattatatatacatatataccttgactgaatttatagaatctttgcataattggattggaaaaagaaaaaaaaacagaaagaagaagaaaggttcaatggagaagagtaatggcctgcgagtgattctgtttccacttccattacaaggctgcatcaaccctatgattcagctcgccaagatcctccactcaagaggtttttcaatcactgtgatccacacttgcttcaacgcgccaaaagcttcaagccatccactcttcaccttcatacagatccaagatggcttgtctgaaacagagacaagaactcgcgacgtcaaacttctcataacacttctcaaccaaaattgcgagtctccggttcgtgaatgtttgcgtaaactgttgcaatctgccaaggaagagaaacagaggattagctgtttgatcaatgattctggttggatcttcactcaacacttagccaagagtttgaatctcatgagattggcctttaatacctataagatctccttctttcgaagccattttgttcttcctcagctccggcgtgaaatgtttcttccattacaaggtaattattcactttaccatcttatatgatctatcaatattttactctaatattgactttcttggtccaattttcttttaaaatattttaaaatagccttttttgcgaagtacattaacactggcaatgcatatgaaaacatctaactactacctccacttctaaggttggttttatcggtcattatagatgtttttcttttttttggcaaatgtcaagattgggtgttttaaattgtaaaaatacccaattttctatatatttcgaggtttaatctatgtttcggtccataatctactcagttacaaaaaggtcattgtttagcaaaactagcatttttggttctattagggtagtacaagtcttttagagacactaattaaagattttatagagataaattaaaattctttggtcccaaaatatacagtcttaaaaaaaaagtattttcgtggtgaattaatgctgatatcccgaaattatgttttgattgtatcccaattgctttacagattcagaacaagatgatccagttgagaagtttccaccgcttagaaagaaagatcttttacggattcttgaagcagattcggtgcagggagactcgtactcggatatgattttggaaaagacaaaggcgtcttcaggtcttatattcatgtcctgtgaagagttggaccaagactcactgagtcaatcacgtgaagattttaaggttccgatatttgcgataggaccttctcatagccattttcctgcttcttctagtagcttgttcacaccggacgagacttgcatcccatggttagacagacaagaagacaaatccgtaatatacgtgagtattgggagcctcgtgaccatcaacgaaacagagctaatggagattgcttggggtctaagtaacagcgaccaaccatttttatgggtcgtccgggttggttcagtcaatggcacggaatggattgaagcaatcccggaatatttcatcaaaaggcttaatgagaagggaaagatagtgaaatgggctccacaacaagaggttctaaagcatcgagctattggaggtttcttgacacataatggttggaactcgacggttgagagtgtttgtgaaggcgtccctatgatctgtttgccttttcgttgggaccaattgttaaatgcaagatttgttagtgatgtatggatggttgggatacatctcgagggtcggattgagagggatgagatcgagagagcgataaggagattattgttggaaactgaaggagaagccatccgagagaggatacaacttcttaaggaaaaagtaggaagatcagttaaacaaaacggttcggcatatcaatctctacaaaatttgattaattatatatcatctttctagccatgcatatgacatgttgtttctttgtgttttaagtttttcaaccgataaattgtttgtgtatcagaaatttcttcttttgtgtgttttgcattgttggaataaatttttcttcttaagttggaatacacatatacttaccactatattatcaggccacgttttcagcaactttttactattatcctgcaacctactagtccaacggatcttggaaagaagcttaaaaagagaaaggttcaatggagaagagaaagcaccatattgtgaacagaagaaggaataacaagaatataaacacaaacactcttgtgacatgggcaccacaacaggaggttcttaaaaagttggttgtttgctagatgttgaaaaagtttaaccatgaaaggaagaacagagcacaataatcactcatttgtccatgaacttgagcaataattattaatcgaatagagagacatggtcgaaagaactgaagtatctaagtttgatgcgactttacagagcaagatacatgatttttcataactgttatattattgatagtagtagacgccctatctttgggttgaaaacttgagtttccttagcagcttttgtgatattttgaatcatttttatgggatatgtttgagttattttgtttttacgatatggtattggtaatacatactagttactacatagtcgtagactttcatgtttatttacaaatggatacaggtttaaaaacatttacttgcgactatttgatacacgttagttacctgttaaaccagattaaataaaactaaaccacttgcacttgttaattgttagtgcttcgttagttgtaaagctgagtaattttgtttccactcgagagagagaaaatggatcttatcttcttttttttttttatcatcacatcgatcgagaagcgtagagttagggcctaggggtccactctcatattaataacataaatgatttcttgtgtgatatagcttcactgatttatcagatctttttgcatttgggtcgacaaacaagaaagaagaagaaagcttcaatggagaagagtaatggccttcgagtgattctgtttccacttccattacaaggctgcatcaaccccatgattcagctcgccaagatcctccactcaagaggtttctccatcactgtgatccacacgtgcttcaacgcgccaaaagcttcaagccatcctctcttcaccttcttagagatcccagatggcttgtccgaaacagagaaaagaactaacaataccaaacttctcctaacgcttctcaaccggaactgtgagtctccgtttcgtgaatgtttgagtaaactgttgcagtctgcagattcagaaacaggggaagagaaacagaggattagctgtttgatcgctgattctggatggatgttcacacaacccattgctcagagtttgaaactcccaatattggtcctcagtgtgtttacagtctccttctttcgctgccaatttgttcttcctaagcttcggcgtgaagtgtatcttccacttcaaggtattgttatttcttacatttttcgtatagaccaagcaactcgttaacctaaaaacatatatctaaattttctcacagattcagaacaggaggatctagttcaagagtttccgccgcttcgaaagaaggatattgtacgtattcttgatgtagaaacagatatactagatccattcttggacaaagttctacaaatgacaaaggcgtcttcaggtcttatattcatgtcatgtgaagagttggaccacgactcagtgagtcaggcacgtgaagatttcaaaattcctatctttgggattggaccatctcacagccactttccagctacctctagtagcttgtccacacccgacgagacttgcattccatggttagacaaacaagaagacaaatccgtgatttacgtcagttacgggagcatcgtgaccatcagcgaatcagatttaatagagattgcttggggtctaagaaacagcgaccaacccttcttgttggtcgtacgggttggttcagtccgtggcagagaatggatcgagacaatcccggaagagatcatggaaaagcttaatgagaagggaaagatagtgaaatgggctccgcaacaagacgttctaaagcatcgagccattgggggattcctgacacataatggttggagctcgactgttgagagtgtttgtgaagcagtccctatgatctgtttgccttttcgttgggaccaaatgctaaatgcaagatttgttagcgatgtatggatggtcgggataaacctagaggatcgggttgaaaggaatgagatcgagggagcgataaggagattattggtggaacctgaaggagaagccatccgagagaggatagaacatcttaaggagaaagtaggacgatcgtttcaacaaaacggttccgcatatcaatcgttacaaaatttgattgattatatatcatctttttagccactgacatgttgtttctttgtgttttaagtttttcaaccgataaattgtttgtgtatcagaaatttcttcctttgtgtgttttgtattgttagaataaaattttcttcgtaagttggaatttacatatatacttaccacttaattatcagccacgttttcagcaactttttactattattttgcaacctactaatacaaacgcatcttgtctttttatgtcccttaactaatgaaaatcaaatataaattagaccactagttacatgccctagagggaaaacgaatctggtctttctttattagcacatcatgaagagtatagttttgtctcactctcgagtaataaagaatgcgaagtgctaataaagaaagaccagattcggaaatttctttatgttatatatagatgtttgttatcaaaagggaaagaattacaccattcactgaaatatcaggagatttacatttggaaagaaggtcaaaaggagaaagcttcaatggataagagtaatggcctacgagtgattctgtttccacttccattacaaggatgcatcaaccccatgattcagctagcgaagatcctccactcaagaggtttctccatcactgtgatccacacgcgcttcaatgcgccaaaagcttcaaaccaccctctgttcaccttcttacagatcccagatggcttgtctgaaacagagacaagaactcacgatatcacacttctcctaacgcttctcaaccgaagctgtgagtctccatttcgtgaatgtttgactaaacttttgcagtctgcagattcagaaacaggggaagagaaacagaggattagctgtttgatcgatgattctggatggatattcacacagcccgttgctcagagtttcaatctcccgagattggtccttaacacctacaaagtctccttctttcgggaccattttgttcttcctcaactccgtcgtgaaatgtatcttccattacaaggtattatttacttctcactttaccaaaagctttcttatatgattaccaacatttccctatattgttgagtgttgacctttttgatccgatcttcttttgataaatctgaaaataacattatttgttaagtattattacaggcaagttcatacgaatacctcaacttttggccttttcttggtcattactcattagaaatcttatatagcaaaaatatcatttttctataaatttcgaagattactttgagtctcggtctatagtatacttcgactaccaaaaaaccatatgaaaatataatccatcaacatttgttgttcacatatgaatttacattaataattttggtttcatttgtgaatacaagtctttttcatttgctaataacaaaaaatgcacatgtaagtatagaatcttttggcaataatatataagatttttctagattaacaaatttattttcgtggtgttagttccaatcaagaaaattttgattttatctcaattgttttacagattcagaacaaggtgatgatccagttgaggagtttccaccccttcgaaagaaagatcttttacaaattcttgatcaagaatcggagcaactagactcgtactccaatatgattttggaaacaacaaaagcgtcttcaggtcttatatttgtatccacatgtgaagagttggaccaagactcactgagtcaagcacgtgaagattatcaagtcccaatctttacgataggaccttctcatagctacttcccaggctcatctagtagcttgttcacagtggacgagacttgcattccatggttagacaagcaagaagacaaatccgtgatttacgtgagttttgggagcatctcgaccattggcgaagcagaattcatggagattgcttgggctctaagaaacagcgaccaaccgttcttgtgggtcgtacggggtggttcggtagtccatggtgcagaatggatcgaacagcttcatgagaaaggaaagatagtgaattgggccccacaacaagaggttctaaagcatcaagccattggaggattcttgacacacaatggttggaactcgacggttgagagtgtttttgaaggcgtccctatgatatgtatgccttttgtatgggaccaattgcttaatgcaagatttgttagtgatgtatggatggttgggctgcatctagagggtcggattgagaggaatgtgattgagggaatgataagaagattattttcggaaactgaaggaaaagcgatccgagagaggatggaaattcttaaggagaatgtaggaagatccgttaaaccaaaaggttcggcgtatcgatcgttacaacatttgattgattatataacatatttctagtgtttgtttctttttgtcctcatttttaagttgatcaattgtttgcgtgtattcacgaaattgttcctttgtgtttggcatcgttggaataaaagttgttgtttattttcgggaataaaacttgatcttaactaacttgaaaatatgcacatatattgatggactatggatcacaaaaaattatgcttttagggttttttatcagacggttttggctttagtataatcctagtcattgacaccttaaacaatgacacactcaaatggatatgtgtatttgaatacttatcaaagtcttcctcttttggtgcaatttagtttcctattttcttgcaacacacaaacttaccgtaattaattagttaatggcttaatgcttataatatataaacctcactaacataggatttacttatagataccaaaaattattttgcaccatttcttttgagctcacccactccactcacacaatcatgcgatcttttccgccgtcaccagctcccgcatctatcgaaaacaatacgcatcatcatctacatgaagacttcactcttatggtcatcgtcttcgttttgtatggcattgttgccataaggtatgcaacctttaacgatggttgtcgtggaactaatcttagattccagagaccgcaaccacctctaccgttaccacaacctcagccgccaatgtgtccgcgggagattgcggcgatgattaaagacatagttgtggacgtggaattatgttgtccgatatgtcttgaggatttgaagaaggttgataatgatgatgataaagtcgtggtttgtttatccaagtgcaatcatagtttccacatgaattgcatattctcttggcttagagaaagtcaggattgtcccatctgtcgtagcactgtttacagaggtggagttacattgatcaaataatgcgttataaacgttatcctcgctagtttttttttgggtcataaaattaacttcctatctatttcactatttgtttgctgctttgttccattcatggctttaattgagtgaaacagttgaagaataactagctgtatttactactgtacccttggtagatcacctctccttttttcacagccgcagagaagtgaacataggcaacgggagacttgtcacagaatcacaatgtgttgttggaactgaataattttataaggcaaaggattattgactacaagactcttgtgttttaaacgaaaacacaatctgcaaatcattttaggttgagagaaactaaagtacaattcgcaagaagacaattcgcgtcacagccacatcaatgtggagtgttatatggtcactccagtgtaaaatcaaaaagcaacgatctttaagaatccatggccaaaacgaccagtcagttcttaagtcttagactcacaggtttggtctctctttgtggcaaatgtttctgcaaccaacaatgggaaggctatggtagcatcacagtatacctgcaagaatgatccaatattaaatatgtactcaaaaccactgagtgagatataaattaggatgtgaagaaattaaaaagcagaccttaacggttttagcagaacccctaattttaccccaagacacggcttcatcagggcgtgcacccgagtcgctcccatcaaattcttgcccggtgtttataaatacagcgtaatctgcaccattgcgcatcatattggcattacatatgtggtgctttggcaagccccctccaaggattatcatccctgtctttttaggatttgcatggacagcttcgccgttcatagctctgatatctgttcataaaacattaactggttcaaagaccataaacactgtgataaaattcaaattaccaagagactaaccatcaaagagtttgataaacaactaacaagattattattctctaactcttaacccagtgccccaaacctaaatcagaatgcccctatgctattctcctagctcccgtttgaacctttagatatcaacttacagtaaagtccgttgctgaattggaaaagctacaatgcactactagttacaatattcctgcactagatgtagcaggaatatttatcacactgacttattgagtaaaagaagtaccttgtactacatcgatgatgaggccagaggtacgaaaagagtgaaaatacagcatatccccaagagagccatctgttaaccctgggcagaatactggaatattcatctacaaacaccacaagaagcggaaaatttaaatccccgagttcctcacaggatgattaaaaaactaaaaaggttaaaattttggataccttgtatgcccaataaaggtatgaactctcattgttgatttcttttcccagccgtgctaacagtttagaaggagtccacaacacattctacaaggaaaaaccagagaaagaaggattcaccaacgaagtcaatgatgcaagagaggaatcaaaatctatctccactagtgacgcacaaacagaatcatctcaaatcatataaaaaggaaagataaagcaatacctcttctttctgttccttcaacatctcgtcaaagatgggaatgatccaatcctcaaacttgcagtagttatcattaggaaccagcaaattcccaattcggttcaatccctttgaccttaaataagctccaggtagagagaaatcacctttaaatgtaggtgcaaggcattttatgagatcttcctcaacaccaccagttgtcgtgactataacatcaacctgcagaaaaaccattgaaatcaaaactaaagctcgaaaattttaacatctataaaaaagcagggtgataaagcaaaaatcacaaaccatatgatgctgaacaagataacgaatagtatctctaacaccagatgaaacaagatttgaagtgaaacctagaaagattttacacttgacagactctctaaacgatggattcttctcctcttcactacagtcttcagctactgtagtttcatcagccagtctccaatctagcttcaatacaaattcaaactctttgtcattactaattcacccaaaacaaaggaaaacaaaaagaaggaatttttatttttgatgaattcgagaaacgaaccatttgattgacgacatcaatagcttcgccgagattcgaggcttgaaatccggtggtgagcatggatcgcataagctttgggtaatctactccttgattgaaatcgtatccttcgattttatcacactttccttccaatgattcggattctttgaaaactgttgagtgaaccgaagagaaaacacgatcatcctccatgttgctcgaatgacaaaattgatttccttggatctgaaagtgtagtagtagagggttttgggagttctagggttctaggggaaggaataaagatgaactatcttcaaacgaatctttgctgacaaatgtttgagtttggtccgaatctaaactcggttaataaattcgaatcattttccacggtagggcgcgattaaagatccggtatttgtatggttcggttcgttccggtacgttcgattttactccttttttttctattgatcaacaaactgacaaagcttggtggaatcactcttattgctcgaacactttaatcaatcaaatcttttctattcaccaatttgtacaacaaggaattataactgccaacacaagaatctcataaacgcaaacagatactgagatatttcatgacatatgtatatcttttccttcttctttggcagcatccatatgtaaagacgtatgtatagagacgtatacttttcacctcatgttcttctgggagaaaacactcaggtttcattctcatccagaactgatttgatgatgatgatgacaactattctaatatccgttctggttcctcatattctccaagtttatctgcacaaatccaatttaccaacacatcaacaacagagccattacaacacaagccaaagccaactattaatgtttccttagattaccaggagaagatcttcgtctgtgccaaacgatttccgggcattctccaggcattttgacgagatcctctcatgtatcctgcaaaacatttctctatcaattcttactagttccaagatgatgcatacgtgctctttcttacttagcgaaactctcttcttaaatagtaatgagaactcgcatctaaaagatggaatatcttagtataaaccaacctaaatctctcttcccattatgtttagattttaactcattactaaacagtttcaatgtgtattgctgatcgatgaacatggcaaccagatataacatttccaagaaaatgctgtagagcaccgatttgtaagtattgaagcaatgagatataacaaaacattacttggaactggcgggatctctgatctcgaactcatccctaacagcatcatagccacatatcacgacatagtgacctattggaaaacatgaaggaaacaagttgatgtaagaaattttgctaatgtagtctttaccgtttgtgcttctagatttaagctttcgttagttaaagaacagtctttttgtctgatcttggcttcataagttcccggagttccaatgattataacaggattatcaacataagatataatcaaggatgtgaaactggggttaccattttggaagagaaaagtctaggctaagggacaattctcaccagtgtaacaagaattgctggagtgaagaccagagacaagcacttcctccaaccaagacttgctgcaacagtaaaagacgagcatgaacactatgcaacttctttatcatacttcttgcacaaaagcacttgaaacaagaaaggcacatacacccttaatcaagggaaaataacatttccggaaaaaggctaagactgtcaatgagcaaattttgtgaagaacatgaaagaagcagcacacatccaaattttttgatgaagggatctgactagagcgaatatatgagaagaagaacaaaagagataagcgaccttagcttgtcctggtcgactaacgcaatggcaatatagttccccgacaatagcaaacaagaaatctcatggatactaactgatctgcactgcaaaaacgaagaggttgattgaatttgatttctatataaataatggattacacaagggaagattttatgacaagtgactttccgcagaaaatcctgaaacaatgcacgactgaaaggggagtgtctacaacaaaagatcatgtcgtggtatctctgagtagaagaattgcccacgtatttcaagcaacactaatggaacaaaaaatagccagcactttttttaaagacaggggcaagtagcaacgtttggccaaacagttttacctgtataataatgccagattcatgtgctttcctgaagagcaaatcgacacgcaccagatcttcagggagctgctcctgcatcatgattgccaaaaacgaacatcttgaacggtttctacttagaagaaaaagcaggcatgttcagaagttcggaaaagcatcaacatttcacttactcactaaatcacacagcatgacatggtgcatgagaaactattaaacaagaatttagaggtctttgccatctatagtttagataccttgtaaaattcctctatggaataattcgggtttgctccaaatgttatcgtgtaatatgaaaattccacacagaacttctgcagtaaatatgcgagatcgacagtccaaatgctgcagaaatgtcaaaagtcgatgataagtattgtattgagatagcattctaatgttctcatcttgaagaagcagatagggcaaataatatataatgggattacactgctgatgaccatttattaaggtatatacaaacctatttgtggagcatatctcagccaaatcctcaagagtgcagcttgcgatgccacttgctctgagaaccataagaacacaagcgagaccgcaatcccatgaagctaactgatgtacatgagggacctaatagcaatacaaaggaccataaatgtggcaaaagaggacgataagttgcagcaactgtagatttcctaagttacaaagatcaatcttacatccatgtgggacgaggatggcaaccctgcatctctgtactttccatcactcaccaagggatcatcgaataggcagtatttcggaaaagtcgaatctccatttccgtctaatatcccctgattcctctcctcaactcttaatagcttgttaagcagaaaacaaagaggccacatcaattaccaagtgagctgttacgcggtcataaaacaaacttgtaacagccttctctaatgatcttgttgcggatataatacacctgaatatgcaacacaacggaagaatcatcaagataggaagacgaataaactcataaagctcaaattccttaaccagtcaaagctaaattccgaaactgaagctacctcaaacctaaaccccttaaaaccatgactttttcttcgaaaacagaaactctacctaaaagggttcaacgaaaagtacccaaaaagaaaagactttttgaatcgaaaaccccaattttgttaaaatctcagtggcaccagaaagtctcgcagttgccaaccaatgacgctgaaattcagatgtgactcaacccaatcaaaaccccaacatctaaaatcgagaaatctgtgatcaagttccttacgattgatgtaccaatcgattggaaggggagagaagaaggacatacctttgattaagatgcaagggagatgattggcgagagagattatgggatctgcagctcaatgaggacgatgagttttctaattactactcaattttcctgggaaaatgaaaaaggtttggaatttggataaaggagacgggagctgtatcttcacgtttctcgtgttttcatttgtttttttgctcttgggatagcgacgaatcctgagattattctaatttcaatcttttcttcttcttcttcttattcttgtcttcttcttattcatccttcaatagttttcttaccaaataaatagcagcaacaataaaacccctttcaaataagttggaacgtgattttttcacgttctcaattacttgaaaacgtgatttatatcaatatttcaccgttcagatttcagaagataaaatcgtttaccactttaacgttttcacgtttccaaacatgattctgattttgattttgtgcaaaatgtattttattagtctaaactataaaacagtttatgaatattctagaaaaaaaccctctattcagctataatatttgtttgattcaataattttatgagattttaactatcaatctcacatataccaatttgtcttcttatgaactttatggttgtatttattatgattagtgagtatatattttctagggttgaggttggcaattggcatatggctaaacaaccctattgcttaaggcttagtttatgtaggttaaacttgtacttagatctaagatatctatatgcgggcagcacaacatgctttcaaccatgtttagatagtttcaattgcaaacttaagcaatgattcattactactgagtatatgagaattgaagcaaggtttagtcgtttagatagtttccttagttttcttagcttagatctcaacaccgaccaaacataatcatttatttggactataagaactctcacgatatcttggtttgatttttacttgttggatcaagggtttgagggcaatagtttatatttacctaacttgaatggagcattcgtccctgaattgcattttgcacctatagaaggtgagagagttcatgctcgggtataagaagtaatggacttgaacaagagggcgccaaaacttttgtctaatctccattgatactgtaattaaaaaaaatatcttcataaccaaataaagagtctatagactatatataggtcagtcgttttcctttaaattcaaacctcttatgagattttttaaagaaatatcgtaagaaagaaaattttcaatcatgaagtctataaaagttgtatatgccaaacataaaaagtttgaagacaaagggtttgaaaaccgagattgaatgtagaaggcgggacacataacaaaaaaagtttgtaagagtcattaagagagtagtaagtatatcaagttatcaatatagatcgatatcaataccttttttaaaaaaataaaaataaagttacaacatttgggaaaagtaaaatttaggtgagtgctgtgtcgaaaaagtcaaaaactgtcactttaataaaagtactataccttatacatataagttcatttgaatttttgtaaaacacatccgtttaacaattcgaatttagacagtccataacctttcactttattttgactagtaatcaatagtattgctttatcgaagttcaaattttagaattgttagatgtgatggacaaatggacatgagtcgttatgacgtaacaaaatcctaaaaatacagatgtttgttctttgttttttttaacgcaatggaaactatacatttttttgaaaaacctaacaaattttgtttataaaggatatcaaattgttatcgtagaaactagaaagtaggaaaactaatttaaattagataattaagctctcaaagtcattaagctacgcctaattgtgggaggttaggcccttaaacggctacgaacttcaaacgaaatcgatatgggaccatgcgtttgaattaaaacctcagattactatattgcacactacagacatccatattaacgaaaatgccactcacttacccattgcattatttcctgacaacaaacaaaaagatggctgcattaaatccacttaatcctttttaaactcctaattattacttatttactttaatattggcggcctatgtcacattaaattttggtactcttcaagaagaatgtctccactttcttttgtatgaacatttttccggtctactctgcattcaataatattcagaaagtggttttgttgatatttgttgccatttttcgttcaataaaatcttataaactgaaattcaaacttatcttagacccaatgttaaaaaataaaaaaaaacttatcttagaccctgaatacagctatattcgtgtttaactaaaacaataaaacttatatttgaagttattacttccaaacaattaaacgtacttacatcttgtaagatttctttagttaacatgtcaattttggaaattcacctgtctcatttacgtaactaattattgccttgtaattaataaaccacaccgagtcaccaattgctatttgtggtaaaatactaaattcttgatttaaaacatgggcagaaccgtaatatccacaccattcaagaaatttgtccgccaaaaagataatttaatattttgaaagaaaaaaaagtcaaatatattctctttctactcgtgactgaggaagagaaacagagagcataactttatatccagccgattttttttcaaatttcttaccttttgctctcactaaagccatgttcttacctttatagtgagtgttatctaaactcttttgggtcttttgcaaaagaaaccagttttcaaagttcaaaattttgtttttaaaaatggagaatttagtgaagagctgcgcagggatcgagaagaaaagaagcaatttgactccatcgatggaagatatacttacagagtcaaaggagagaagcagcactagcggagcgagctacgaaagctcctccaccaccaccgtcgcttcgtcttctccaccaccaccaccgtcgcagattctgggttggccgattagaaaagcttcatttcggaaaaattcgaaggagagtgttaattttgatcataagaaattaacccttcacgatgattctgggtttaaagcgaaagagatgaattctgcaggttagtgagaaaaaatcaaaaattgaaacttttttactcagccctaagatctcatgtgttttctttgttgttgttgttaatctgattgtggattagatgtggagatgatgaaggagagatttgcaaagttgttacttggtgaagatatgtcaggttctggtaaaggtgtgtgtacggctttagctatctccaacgccataacaaatctctgtggtaagtcttaaaaaaagacgaagctatcttgtgtttgttaaaatgcttgaaccaaagtgttgaatttgatgtttcttcttttagctacgattttcgggcaactatggagattagagccactttcaagcgaaaagaaggagatgtggagaagggaaatggagtggattcttagtgttagtgatcacatcgtcgagttaacaccttcaacacaaacttatccagacggcaacaagtttgaggtaagctcttgattttttaagattgttgcaactgcaattactggagtttgaattgtgaatcttcttcaggtcatgacttgtcgaccaagatttgatcttttcatcaacctccctgctctccgtaaactagacaatatgcttctcgtgagtttcacttaactttcttatacgatgatcctctcaagtgaaacctgttttgatctctgatgtaattttcttttgcattaggatatattggcgagtttcaagaaaactgagttctggtatgttgatcaagggatcgttgcttcggaaaacgatggctcagcttctttccgcagaaagattcagcgccaagaggagaaatggtggttgcctgttcctcgtttagcaccgaatggtcttactgaagaagcaagaacagaattgaatcataagagggaatgtgcgacgcagatacttaaagctgcaatggctattaacagccttgctttaaccgaaatggatgttcctaaatcataccttgaaacccttccaaaggtctacatctttaactcaaaacatccctataaaaaccattgtaaggttttttttttgttctgacattaaacttttggtacagaacggtaggtcctgccttggggatgttatctacaggtatgtaacatctgacaaattttctgcggagtctcttctcgattgccttgatctgtcctctgagcatattgctcttgatatcgcaaaccgtgtggaagcttcgatatatgtttggaggagaagagttcaaacaaaacttggagtcaacaataatacttcaagcactactccaaagttaacatgggaaatggtcaaagaactaatggctgctggtgacaaaaggggattgcttgtggagagatcggaaactctcttacgttgcttgaagcagcggtttccttctctaacgcagacttctctagacataagcaagattcaatggaacaaggtccagacacacaaatcctctaaatacattacagtacaaaatggctttgcttgttcttatatattcagtcctttgaaaatttcaggatattgggaaatcaatcctcgaaagctactcaagggctttggagagcttagcatcaaacatcatagcacgaatcgatgatttactctacgtggacgacttaacaaagcaatcagatgataacaatcttttgtcaagtccagcggtcagcagcattatagctcacaagaaagtagtaccactcccttatctaatatctgcatcaggaactccatatagaacaagcttctcaacaacaccaggcttctctccttcaatgattagccccaagaaaggagagaggagaacaccttactccagcaaggacactaacaaaatcattgagaaaggtcttccttctcgaggatatggagtgagaagagtcttgaacaattatcttggcatggaatcaaaactgaaaatatgcgttaatccgtcagataatgcagatacagcagtgattaaccaaatcagcaaagacgtggaagaagagaagaaaagaaactcaacatcagtccatcaaaagggtcctccaaagtacactgtctcttaaaagctaatagaagaaactcaatagagtgtataattaatgcagacatggattgatttgtttgatatttacttgtagtttctgtcttatttggaatggtaaagtgtctatctttgcaaaccaaatcagatcacaaaatagacaaaaatgagagtggttgtaacaaatattctcatcaaatttgttctggtttggtttactagctttatttatttggtaaacaatcaccaataacgtgtataatttaaagttatgattataatgtttctttttgtaacccactacaaaatgtcgttgtagtatagtggtaagtattcccgcctgtcacgcgggtgacccgggttcgatccccggcaacggcgattttttttttttttaaatctcttcctccttttttatttcctttctgaacgaagctctctctctgattggccggatctgccggagagaaaaatgacgacgagtattcacatcacagctctcgacggaatcgtcaacgtgaactcactcttcacactcgccgtattcatcggattagcttggaaccctaccgatccagacaacagcctcgtaaccgaccctaattgcgtccccacagctcgtatggctgagaatctcgtcgccttccatgtgtactctttcgcatcattcctattctcaagtctcatcgctctaggtctcaaacaagcaatgaggctcaacatagcttcttcgtttcacatctctactcgaatcgatcctgtggtttactatgtgaacaagacggctcttagatttgggatggttacatccggtttgggatcggtttgtggatgtgggtttctcatgttggctttgattaatgttgttcagatcaagcttgggactttgggctgtggtgctagtggtcatacttatgcagctgttgtgccgcttgtgattctggttccttctgcacttttcatctatgtttctcttatgttatatgcttttactcgttagagacatggtttttgattccatggttgatgcaattagggttatgtttgtatgatgatgatatgatggaaatgagaatgattctatgtttgatatggttctttgtaaatctcttggtttggcttctgatttaagtttagtgtctgagtttttggatagatgatattctagatttgattggagttaggcacttatgtgtgttttatcaggaatattaactggtggattcattcaaactgatttgatcccaggaaatgggtatgagattatgctggattctgatgcctgtttggtttgatctcttggattattgataaagcagagtctacttggaatcattcatcaaaaagagacaacttttctctgttcctcatttggatagagttttttcacttgtttatagttttgtgtcttctgactaagctgaatgattgatttcctctgtatactatcccattcccacatatctcgggaactgctttgtatgcataattgtatgaaaaaatagctttgaggactggagaaaaggaacctgatatatctagatctcatgaggtgatcagtgaattttcagcttaaaacttgaaggctcataaaaccatacttttggaagctttttctttggtttatgctattacatttgtcatgtaaaaatacctctttgctttcttcaaaggttcaaatgattagcttagagactaaagggcagcatgatcttactttagattaaaatagctatgcacttagaggctcttaatgcgactgattaggtgaagtaattactatgttcctttagtgcttcttccactacttctgtgtggaatttctctgatccttccaaatcctcctgcaatttcagttgctataaaacttaggttccataactagtagtatatgcatcaactcatcactcaagaatggaaacccatgttttatctcgcattttcctcctagttctctgcatctacagccttaaaaccatggtttatggggctggagaatgtgggagaaatcctccagacagagaagccataaagttggctccttgtgcaatggctgcacaagacacatctgctaaagtgtcagcaatttgctgtgctcgagtgaaacagatggggcagaatccaaaatgcctttgtgctgtcatgctttcttccacagctaggagctccggagcaaagccagagatctcgatgactattcctaaacgctgcaacatcgctaatcgtcccgtcggttacaaatgtggaggtaatgacataaaaagcttattaactttttctatttcattgcagctgcaattttgcttatcaaatgtttttaacttgttctcttgcagcttatactctgccttgaagcagcagacagaaagcaatagacgtgttcttcaaaaccagtctaaattgtcacatgttcacagttgtattacttggtttcaataaaaatatgaatcaaaatgatgattgatcatgaaatggtatgacttgttactgagatgattgtgagtatttgattacttgttgtatgcgatacattagtcatagatgcggtccactaaccgccctctttaactaccaatccccaacatgtaagattacacacgaaaaagatgaagagcatataaacaaaacccgaagatcacactgcaaagttactgatatgaatgcagtggatacatatggccattgcgaaatcaagtagactagtagttaggttgatcttagtaatacaaagaacctgcattaatgaaacaatccattaattgttgacttgagaagagtgatttgagaatagagatcattactaagcaatcacggcataattaagtaattaagtacctttccaccaatttcctcttgaagtagaggtggttatgtcagtgcgatcattggtttctttgggctgatgagatggagaagtggaggaaccatcggttcgtggaggtgaatagtgttgctggcctccgtagtaaatggatgagctatagtaggaggattctctcttttcatggctgctcctctcatctttggaaacacaacaaaaagaaagaaagaaaaaaccataaatcatcaacaccttcttactttttacttttttttttttggtttctacttttaactttcgaagaaatgagaatcaaaaggtctataatttgcagaaagagttattgcaactaacatttctgtaaaacaacttggtgaaaactaagtgacgttttaaaaaaaactcaaatagccttcttttttttgttagatcaaagattggccctgatgtgtatctttagtaaatgaaaaaatattactttcataattaaatcagatgatttcaacatataccctgatataacttattaatttatccctaaaaagaaaactataaattactagaggttactaatttatctccctaaaattggtttctaatatttacaaaatttgaaaactattttggaaattcaacccaaagagagaaagctgtatacaataccagtggcttgagagatgttgccttgaacttcaggagcagtgtgactgcccttcttccttgctacctacattattaaatggcttcaaattaagggaccctcaaattaacttttatttaaaaaaagaaacaaaacctatagaccacatacacatacacacacacacacacaaacatatatgtatatgcacccacaagaagattcatgcatggttctgatgcatacttgtcgtgtagctggttgggaaaattctttatcaatttgtataatccttatccattcccaaagaaaatcaacacaaattgtgtgtcataattcaggtttattcgagttgttcaatatgtaaaaaccaacaaattacaagtaaattcatcgaaatttgtcacacaaccgttatatatgttcattaaatgaaagataatcgaactatatatacatgcatctatatatgcatatactaactaacacaacatatatatatacataaatatttctctcaaaacaaaagaaaacatatacatatgcaaaggtaaatagatataccggaggaggaaaaatggagtcgagtatagttgaacaagaagaagcagatgctgatcctttcggaccaaacagattatcaaatgaagaagaatgcgatgatgaagcagctttggttttcttgatgtccattttatgagtatatgtagtaactaaacttcacaatgtgaatttcttgtgagagagactagagaaggagaaagagagagagaaatgaatgttgatattttgatgagtgagaaatggataatgatagttttggtttttgccctaattaactccccaacggtccgttatataaccaacttcttctgatgagaaggagatgggttcacgtgatccccacgtggctctgccgccgtcttcgactctcttctcaccgccacgtgtgctttctcgtagatgctatggataaactttgcttttactacttttgtactctttcttctcttcttctattttgtcatttggataagttcttttaccttcttcttttcttcctttatacaatgaagatattaaactctcgtttttattattgatctttggcacattacactgacaacaatctctatcttcttcgttttctttaaattaaataattcgatcatgtgactcactatcgacttattctcgaaaatgtcgctttgattttattctaagacttgtaagtttgacttccattattatggagtatggactaaaggtttattcattgacatcctcaaatctcgaatattaaactttcattttaaaatcttttatatatcggaggattttgtaggaggataatggttattcgacctttttttggtttttgatgttataaataagaaaatgtctagtctattggtattgggtccgagaatgtcatttatatacggataatgttggatagtgaaacaaattttatgccgttgatgtggtttacaggaatgtaaaatgctatactatacatatgatcatttaacctatacaaaatataatggttcatctaagatcacaacagataaaaataaaaaattatttcaggtaaaagattgattaagagagtccaccattgtggggattaatttgtagaaacttctcatggaatctatttcccaccttattcttcgtcgacttatgatatagcacattcatttctttagaatatatatatatatatatataacctgatattgatattttggtctctctactaattaaccaataaagaatgtatatatttcatctttttaccggaaattccgacctcagccaaatatatatatctgcagattttttgacggtgaagtgaagctaaatcatatcaaaatagatctgataaattgatatattccaacaaaaaaagagaggtcgcaaagcaaagcaaagcaagctgaaatgaaacagtaatgaagcatattccacgtcaatctcttctttaattttgattgcgttttatcttctccaaatctagtaagattcgccgtataacaataataaaaaacattgggatataagaataaaaatcacttgcaattctaatttcggcggatagatttgatattccacccacatacatgcagacacatatatgccgacatcaagtgaacataaattttatcaaaaaagaagaagaacagaaatggctttcacatgttaacaaacagaaaaagaggacagaaataatgcatgcttagagtattcttatccactttgttggaccaacttcttatatgcttttatgtcgtatgttgtttaggtttcatcttaatgcagaaaatattagttatagctaacgaatttaaaagtgtttaacctattgtaggtttatattgttgtgaatccgatcattagtagtttacggttgcgaatccgatcatactgtcgacagattattaatgggagatgattctcgtgttaaatctccggttaaactatcgctagacgagttccaaatttatattattacctagaaaacaaattagataatattcggctccgatatattggggtcaaatgacttcaagggccgctgaagctaagaatcggaaaagtggtcagctaattaattcgaaggcagcaggagttaggaataaaaagtagataattaattcgaaggcagcaggagttaggaattgtaatgtcttctagagttcgaatagtttaaagtttagacgaatgattcgaatctatgtgaagttaatttatacacaaatattaattcttccactcctaaatctctcactcagtcactctatcatggatatcaaatcatggtgatctaaggatcggttctcgattcatgttttacaattgtgttaagcgtagtgattccactattcaacactaatatgtttctaaatctcacatgtgtagatagcaaatgaaactgaaattgagcttctaatcactatttaaaccaaaatgtaacgttttccctctattttgactcatcaaatcctaatactctttcaaatgtgttattttcattttgaaacctcttaaacaagaccaacaacacagtatatagtcgaataagtttgcacaaaatacgttgaggagctaattctagtaagttaataaaattttgtattttatcatactttcaactttaccgtacataataatacattaggaacctttttttaagaaaaaaaacgaaaaatactcataaacgttggaaatctaattatagactgtttagtagatgttgttcaaaaaaaaaaaaaaaaaaaaactgtttagtagatttataatattttgttttatttcatatttttaaacatttccatagtatgtagcaaaactatatttttttattcagaaaatattaatattcactgctctttttttttcttcaaaggaggaaaaagcctttatcatttggacggacaagcgctcgagaaactaatttaattcaaaaatactttttttttgtttttctgtcatttcgaatctgtctctaatctcatagggttcaaaatttggtttctgctgttctctcgagaaaaaagtacagttcccgcattgttcagattctctaagattcattcatcaatctgacttttcccgggaaaattcactgtctctgagtccaaacccgaatccagcgatgatgtcgaacttggtagagccatcgtggcgccttctggcagcgagcggcggagatacggttaagcttttcgacgtttctgccgattccggcgatccctgcgttttgagctatactccgtcacctggttgtgctgtcaactccgtcaagtggaatcatacgagtatgtattctccgattagtctcatttcctggtttcctttggttggtgagagtttaggaaagttgctgaagtagtgattccacttttgatcttaggtttatgtaatgattcagctgagttttagtatttaacaaatctggattttctgtgatctgctgttcaaaattgaggttctgtttaactttaggaatcgtatttgggaatgcaattagtcaatttctgctggaagcaaacaagtttcttggtgaaaatcgttgtgttttggatgctctttaattcaatctggtgaaaatcgttatttgttctcttttcttttccatttgttgaagttatgttatttggtatgcagatttagtggtggccagtacgggagaagataagaagatatccctgtggcggaaaaatgggcagagtttaggaacagttccagttactgggaaggacggtggtgatagtgctgaggttatattcctttctctccactgattctaatttccatgtcttgcatctcttggatgatactatgtttgtgtcttgatgaattcaggaatgtttatcggctattagcttcagcaaaaaaggctccaggtacatttgttctggaggaactggtcaaattgttaagatatgggatctgcaaagaaagctttgtattaagaagttgaaaggtcatacaagtacaataacgggtgtgatgtacaattgcaaagatgagcatttggcttctgttagtgttggtggggatctaatagtccataaccttgcatctggagcaagggctaccgaactcaaagatccaaatgggcaggttgttcagtttgtacatgtatacttacatctatagaccagagcattggtcatcaaattaattgactttttaatcgattcaagacaccaggtattaaggttgcttgattattcaaggtctagtcgacacctcctagttactgcaggtgatgatggcactgtacatctgtgggacacaactggtcgtagcccgaaggtttactcttttacttattggtgttcatgtggaaaagactgtattttccattacattggctctcctgtcaattttgaaaagctattgggaacttttattttgatggtgttgtacaccttagtgggggaagggggggggcagttgggaagccaattaacttttctctgctttcatttccacagatgtcctggttgaagcagcattcggcaccaactgctggtgtttgcttctctccatcaaacgaaaaggtatctgaatccttatcactcttgctacagatacgcaagaaagtcagaaaaaagtggttgcaattgattctgcaaacaatgtgcatgtcaccctcaattttgataagcctgtctaatgctcttgacatagagtttataaacatagtatctacctaacctacaatctagattatctaccgtaacagataattgctagtgtcgggatggacaaaaagctttacacttatgattctggatccagaagatcttcgtcctgcattgcctatgaggcacctttctcctctttggcgtttggggataatggctatattctggtagctggaaccagtaacggtagagtagtgttttacgacatccgtggaaaaccgcagcctgttactgtcctgcacgctttcagtaattcagaggtaaatatttaacccactgcaatctatttagcatgtcctatctaacgaatctggttccatggatagttacattttgcgcttatcagtattagttgtttatttgttgtccctatcctggtttgtcagcggcttcatcaatttaatatctccaatagtagcagcgaatgtttttttcttttggtgtatattgttggggtcaactgactaatgatacataatactttggattgcaaagttaacagcatttgtttgtattgatcaggatgtaacaagtttatcatggcaaacatcaaaaccagttattgtgaatgagaaaaattacacttctgagatggctcttcttggcagtactgtggaagattcagttgtcattccagatccacttccctcaacgacaccctcagcttcacagtccgctatggcaccaggttcccgtggagtatccgcgagtactgtaaatgcatcatcagttgaacaaacaccaaatagaaatcatctatggcctagtgggccactgggcagactgcatgcacttcgtgcaaatgacagttataatgatgatatgggtgttttttcacctattattgacgtatcatctgttgagaagtgggctgatagtgaaggatataataataaggaccatttagttgttgacaacaagccgtcctctttgctatttccgtcatccagcaagggatattcgtttggagacaatggaagcaaggaacatccaatattcgattggaaaccaagctctacttcgaaacaggttcgtgtttcttcatcaagcaagtgcttgttttttttattaatcaatttcataacttcattacgtcttccaagtctctgttagtctgtttatttgtggttgtacagaatacactggctggacttaatttaacttgccttctataattctctttcgtatgtttcatcggtttcaaacgttttccattgtttacacaggatgacccgagggctgctttttcgtcttttggatctattacgccaacagcatcatccaaaagtgaagactctgccttgacacctccagaagcatggggtggtgataaattttctgagaagtttaaccaattggccaatgagaaattttctgataaatttagccacctgcatgcaccttcacgtctcgctgtttcaagcacaggtgctagtacatctggatcaatgttctctagctctcgagatttccccttgtcgcatggtcagacaaacttcgcaaacgctagcttagaattcccacggatcagagacttctcttcaacctttgagacatcctcaacacagacagacaacaacttgccttcaagcccattgtttacaaaaggcatcacagctcctggtaacattgattcgttgaggctatcaccaaattttactcgtaggttctcaacatatgctgagagaatcagcaccacttcttcctttagtgacggggcctctctcagtctgggtggctcacccaagataaagaaaacaggctcagaaacgagagaggaagttttaaatcatctgttggcaagaccagagacagtagttgcaacagaagcaggagctatgccgcttatgaatgtacgtaaaagtttcacaaaagcctgagagttcatattgtttggatatctgtaacttcactaacttttgcaaacctgtagcagggagggttgaagcaatctcaaacggatcaacagcaagtgatgggtagtagcaatttcacgcttcagctatttcaaagaacgctcgaaggaactctggattctttccaaaactcaattcatgacgacgtaaggaaccttcacattgagatcctcagacagttccacatgcacgaggtatcgtttgctcttactcgaatctcatccatgtcttctttaaatgactgaaactgtttcttttttaacagatggagatgtcgaaggtgttaagctcgattctggagaaccaagcggagcaaatgaaggagttaaagttgttgcgaaaagagaatcaagagctcagacaaaggctttaggggagaccgttgtgagttttttgtgtttaaatgatgtgtggatttatatctttctctttggtactcttcatgtgttcctctccccgatcgaatccgttttgatttcatattatgattgatccgtttgggttttggtagagatcttgtataatttgaaacactgcgtttcctaatctggaggaagcaaatcattaaccatgtcacaacgtttgccaacatgtttccttttctttttgttaactattgctcttgaatttgaaaaagatcaccacaactttgttagtacttaagctggaaactaaaaccgaaataatacaaaatagcttttaataagaaatgccatcctcttccacagtgggtacggtgattggtggatgacgactcgtgtattgaaatttgaaaagtgaagtgtgtttgtttctcttcattttctgattaatctcagtacatcgcccacaagatgtaacgaaccagttacaaggacctgcacacacaaacagtccctgagccatcttacattgctaactattcattatccgaaaactgaaaacccggattgaacactcgttcagaaaaaggggtttgttttatacctggaaacgtgtggctgagctactctcatgtacagtgtcccttagacattttattgccatgggtagtgaagtaaacacctcactgtttccatcactttcaccatctttttctccatctgcgtgaccaaacaagaagagttaagttgagataacgattgtgacgtgttgattttattccatgatcataaagatttaggactacctctttcactctgcacaaggctttcccacactttctgaagtgtgaactgccatgacaagtcaacctgtggatcattctctggcaaatcagctgctgtaccaaccttatgatacaccgacatgtttggtacaaacaatgccttcttgaaattgacacctacatcaaccattattcagcttctctaactatccgttttacctcaggccaagttttctgtttctacattttgtcttttgaagacacaagggctcacgaacttaccgtattttgcgcacatattctttagatgtggaagcagtagatttgggtcccgaactgacatacaattgaacaacaatatctgcaaagcagccagatgctctcgttcagatatttaaaaagctgagaaactagagaaagacaagcatagacataagaagatactctaaacccaatccttttcctgtgaattcattcagtctctcatatgatttataaatccaagacagaccacgaaacccggaccttacctgttcacaggtttcatttgaccatttatcatgagaggatcctgcagagccattaaccaaatgtcctgaactccctgactggttgtctcccttaaccgcaaccgaaaaccatttggcgcatgcttccatgctttctggactgtgagctccatccagataaaatactagatctcctgaagtccgagattcagtatattgatcagggacgacctgtgctcgtccttgcaaactcgctgtagctaaccctttgatgaatttctcaggcagaatactctaattcgaagaagaatgtcgaaaaagggatgaaattcacaaatgagagaagggccaagatacaaactgtgagtaagcgtaaagacggaaaagagcattttaccatctgagtccgactcggaacttctagtttaccaatttgctgaagccagatagaggcaagcgaaactgctagaccagcattgacatattggtgttccccatcaagcccaagtttctgaccacttaacagccttgcggttagtggctgcaccacttcgagattcacctgtcaatatgatgttaaagcttctcaaaaacacttacctactttcaagatctgtcaatagaatgttgaatcatctccgcaaaagcacccactcttactttcacagatcaaaaaagctagaatgggactataactaatgcacatatttgtggacacattgatttctcattatttaccgtaaaagaatggtagatctaaagcactacaatcaaccacgcaggacataaacagaaactatatatatgtacatacattgtctaccaaatttaatgaccatagtgctcattaattaaaattgagcgtacttctgtttcggaagctttctcttcaaggacacgcatggcttcatcaggttggggcactgtgaaagctggaactccaagctgaaatatgaacaatgaagatgaggcaactatggagaatattgctaagttacaatttaacagagttatagccaccttgaaaattccagccttctcaccagcaatttttccaagtgtatcacctgtgatgcattccacagataagaaagaaattataaaaacgaaatgtaactcaaaatatgtctgctcatttaatgcaagcatagacttcatgctttaaagttctgatatgaaaaaaaaagagtagaggcatggacaatattcgtatggcatgctgagaagattccagttacaaacctagaatttccatgtggtcatatccgagtgaagaaataccacataccacaggtttctgaacctgtaacaagtcagtagtaaatcaccatgagaacttaattaggcacaagaagctctacttacacccgtcctgaaagttattcatattttagtaattggagtcttttgaggatattactatacttcagtatacgattagttaaggatttgggttccgatcttatctaaggttttcatataactttcctctttcgtaattcaggatgttaggtaaagggatatgttcagacaaaagcatttcagctgaaaaaaggtcaaacataccgcattggtggcatcaaactttccacctaatccaacctccaatatagcagcatctacctgcataaagaagcaaaaagcagaaccccttatatcaataaagagaacatgatgttagtttatctatcatgtcactgagtaagaaaaatagtcagccaaggtaaagactggtatcaaacctcttctgcagcaaatattttaaaagctagcaatgcaaggaagcggaaatatgtaggcattggtatctcctcgttagttctctcctgcaaatcaaatagtcggcaaccttgtattttgagtaaaaaactaaagcatgtatcttaatttgcaactatgcacaccattgtaaattcttatgagttcatatcatgaaatactcagaccgcaaaacaaaaggtgacttcaacaagatacagggaagacactatacatgagctctaccgcatcaccaccccctcgatgaaaatagttccaataatacaatttctctaagtaccaaaacttcagtactgaacaccatggttttaagctaaaatggaaaaacaaaataagtgttcatgaaaaagggtgttttacatgtttatcacattctatatggctttcatcactaagattccaagtttacagaacgttactaacaactagtctactagtcaatcgagataaccaaactacagatattgagttcaaaacaaatgaatcaaatagctgaaccttcttttctcacgaacataccttgagcctgttatagcaccaccagaaatatcccaaaaatttctcttcacttatgtccacactgcagcaataaatagaacatatcagattaagcgaatataagcatttctcagtaaagaagagtgaaaaacaggattatgctagcgaagtattgttggttcctgattatatgagggccggtaactatatatttattttctcaaaattttcagcaaacttagaaaaacttacccatccaaacgaaatctttcccggacatcaatgaggtgaggtgaagtgaagagtccagttcgaaagccatagtttcgaataatagactctgtaaaggtacatgtggatcccttcatgccacataagaaacaaaaaggaatactgttaggtgctggatcagatagtaatcagccatgctaacaatgaaccactttcatcaaacaagttcactgaaggtttgaatcaaaaagtaagcaagtactagtttcataacaatttcctttgtgctatcccaaatctactatcacataagtgatatgagtcaagattaaagtagcaacttttgcaaaactgacactccatcagatgaaaccatacgcatctccaagcatgcaaggatctcaaaaccaatgttcttctcgcactcactcaaattggaaaaaagctcaagatgactcagtccagaaacgtatctctaatccccacagagcaaaaaccttaggcttcttctgacaaagcagtcataaggacgtaacggtcacaactagtgtagaagctgacacgaattcagaagatatctaactaactaactaaagtaacaaaaccaactcctaatattgacaatagatgatttagtatcatttattgagctttaccagaaaaagtaaagttgttgttgttaccttgcctttggtaccagcgacatgaataacattcatctttaaaatgtcttcttccaggtcaagtagctgccaaattaattacaagaagcgtattcaatcagaaaataaaacaaaaggtgcaataaatattcaaaactctacgagaatccaatcgaaaagagaaaccttgagataatcaaagactaactcaaagcgatcccctttattgctcttatcagcacgacttcgtttcgtgatcaaagacgacaaagcagccaacgcttcctcatatgaatcacctcctgtcaccaacaaaaacaaacaagtgaactcgattcgattactgttatcatcaagtgaggaagagctagagaagaataagaaaatcaataacaaaccttgagctgccatgtcgatctgctttcttaacgaatgaatctgaaacacgaataagagagaatatcagagatgccgaaactccgagattctcggaatatgagagacagagagcgaaagagaaagggaaacctgaaaagagagaggagatggtaggtgaggctggtggtgttggtagtgatggtggagccgaagagtgagaggaatcgagagttgacagagaaaggcagagctcaaacggcacgatgtggttcgaggtactatcgaaactgcaaacattctcttgtcactaacattgctacacttcttttgctttttgtttactctttttcggcaatttgttgacgaaagcggcgcatcacaaagacgaaaaaaaaaaaaaaaaaaaacagagcgcatcacaattttgttaagcttccttattaaatacaaacttaattgaattaataaaaagtctgggtggtgtagtcggttatcacgctagtctcacacactagaggtccccggttcgaacccgggctcagacatttttttactcttttttttgggattttttagtttgcacgtggggactcactcgcacacgtgtgtactaatctccatttcttaggcaaaagcaaaccggagaaccaaacaatcacgaatcgtgtaatcaaactcatcggagtctctcgaattcgtctttgaagaggaagagaagagaagaggcgagggagatatggattgggacaacgtagcagctgaggatgtgattgaggcgcttagagaagttgaatggtcgacgcctcctcgttcgtttggcgagttcttctctagattcgcgttccctcgctctttctctaaatggaagagccgtctcaaatgcaatctctactagtattacctctctctctttctcaatttctgtctgcgtcgataggatttatgattttgatcttgtgttgatttttgcttgttttatatgtgttgcagctataggacgaattactttatcttggtgattttcgttctgggtaagttatagttttgcagaattttattgcttttagctgtatttttgggaatttgggttttgatcaagatcttgtgcagtttgttaatccatgtttgtgttgaaacaggtcttgcgcttgttacgagacctctggctcttgtgggtgctgctctaacagctttaagtatagctttccttaacgacaggtaccatctcatgtgacttgttttggtttctacttatatatatctgctctgcaatgcgtttaaggcttcatggtaatgtgaagttggtgtagttttgcatgaattagaagggtattaggctactttgtatacagtgctttctcttcaactggattcttagtattggattcgaatcatccgataggtttttatgatctgtgatttttgaaatttgagtgtttcgtggtggctagttccatgtgtattcatatgaacttcatggtcgtttgttccatttgtattcacatgcattggtagatattaggctcctttgtatataatggttgctctagaactggatatcagtattggaattgataggttttctaattttggttcttgaagtcttgagtttttcaagttggtatgttctattcccgctgtggcgatttgatgttcatgttagaatcatacatcgatgttagttgcttttttatgagattggatcagaaagtattgtagtatgtggttgtgtgtgtgtggtccgctccctagcataatctattagtttttcaaacttaacggggttaaatgttgtcttttgcagttttgcagctagttttaatgagaagtttataagaacgattaggcatttctccccacacatggctgcaaaaatgagacctccccacatgtgagttccatattaattaggttcatggaagatataaatagggttcgtagttacatttgtaattttatttaatatgtgatcactgcaggcctgtcatccgtggaagatcgacagcaagaaagacagtatacgtttgtgggaaaccgcgatgggtattcgttattactttccttacaggtacttgaatactcataattcctctttatgtagttaatgtaatattggtgttaaaaactgatcaatgtgttaattttctcatgtatatatagccagtcttgtcatgtggttttcttcctgcggtttgttgtgggtcctctatgcacttctcacttcccttgctggtaaagttattcctcctgtttgatcatagatgtcctttgatggagtttatgttttgaccttaacattttttctccacagtgatcattgttcatgcaagcataagaaccccaaatctcaaggcacgcttaaacacattccgtgaagaattccgggctgtctggcgtaactacagtgaactttaagtcacaggtcgcgctacacaatctagaaacaaacaaaacagtcatctgacaagtgaggggatgctttccctcaaccatgttcgcagtttattcttatgatggcagatgtagctctatttttacatggttaagatggttattggcagttcgatagcagacagaatagattcacttgaaatagtggacatacttgaccaagttacttctaattggtgtagtgatgtttatacttttctcactgtctcacaatactctttttttatataaatagatccaaacataattgaatggtgtttcaagtacaaaatttggaagacaaagagcatcggaaaataacattgttttcttatttcaatacttgacaaagttcttgagagatttcaaccacagtaagtgctctctactatccttgttgatcatgtactcgtgcaagaagttgatcatgctcggctttatccctctaatctcaatgtacctatggaaagccttccttagcttttcatccaaaaccctgcagaaagaaaccatcaaagatcatcgctttgattctggtaacatcaaaagcttaaaactttttcttctattacctgaaggaaggtccttcataagcaagctcatctttggaaggatcatcaggaaatgtaacccacatgtccttgatcgcaatcctgtctggaaaagcagtacatctaaattccaaacttggtcctgtcttcttggaaagagttactaagagaggcacattcgattgcttaggcttcaatggcttatcctcatcttcatcttcttcattctctgcttcttcctcatcatcttcatcatcttctttgtcaccagtcacaagattagtcatgtgtacttcaactttaacagtctctccttcatattctctagtcaatgtcacaatcttccctcctggtttgtcttccatttcgaaagggaagccacttggagtttcttcaacctttattcaaacaaaagaagaaacagagagattacacaccattgccattgaaacagagcttcacgaaacacataaatcttaataaacaaaatttgcagaaactaaaacatgaaaatggtaaggatttactcgatgataatcatcagctttctcggcgtatccaatctcctcttcaatgattcgaagaagcggatcagttggagaagctctctttttggtcgatgtggtaaatggaacattccggtcaaccgacggcgtcagatgtcgcctccggccagaagcggactggtccaacaatgagtaaacgaaagaacggtttttccaataacttcccacaaaccgagaagctgcgcgacgtacaagagtcgccattttttttgtgttgaagctcaaattggaagagtgagggtttttatttccctttagggtttaatatagcaaattacaaatttagcgggacttaaattaaaaatcacagaaaatcaggaccggctaaaaatacgggccaatatgggcctagtggcccattacgacattaagagaccgtttccataatccgaaaccctagtttgcttctgtctttagttgttgccttttaaactaaactaacgaacttaataagcggcatatctaaatctgagaaaaatggcgattgatacgatacaaaaaacaaaaaagcttcggtggggagaaattgacgaagaagaaggcgactatgatttccttcttccgcctaagcagatgattagtccggaccagaacggtgtaaagaaggtgattgagtacaaattcaacgaagaggacaaaaaggtcaaaatcactaccacgacccgtgttcagaagcgagctctcaccaaacaagccgtggagcgacggagctggaataagttcggagacgcagctcatgaagaatccagtagttacctcacaatgcgttcaacagaggatatcatcttggaacgaattagagctcctggtaaaatcttcaactttgcattttagtttgttaggattcgttgttattatgctctgttttgattagggtggctaattagccagtcacatgttagctttatggctactgtttgtgtgaatggtcagtaagcacacctatagcaatgtcgttggtgattcgtttcaacactagaacaggatttaacccagtttttggttatggatcatcaactatatctttggttcaagttttttttttgtaactgtgtaacataacaaaggtgcccaattagccgatcacatattagccatatatggctgcttctttctgtgattggtcagtatgtcaccaatataagtatcttgttggtagccttttctgaatgtggacaaattctgtgttctcttttctaggctattaactgtacacattcaagtattcatttttacataagtttctttataggtggacacgttagtcagccatattgttctatatgtgggtggccgtaatgcccacctagatgttttgttggtggcttcttgcacgaaagtagatttctgctttcactttatagctgccaactacatttttagtttttgcattaccatcttaaagggtagtattattttgaggttttaagatgtttattcttttgaatatctcaggtagcaacgcggaacagtcgaccgtatcaggagatagcatgtctcagttgggcaaaccgggtgcggtcctcatggtctgcaggttatgccaaaagaaaggtgaccactggacatcaagatgcccacagaaggatctcttatccttaatggacgagcctttaacagcagaaacttctacatcgaccataactggaactggcagggcggcttatgtcccgccaagcatgagagaaggtgcagacagaaaagctggtggttcagacatgaggagtagacatgatgagaactctgtccgtgtgactaatttgtctgaagatacccgtggaccagatttgatggagttgtttcgtccgtttggtgctgtaacccgttgtcatgtagccattgatcagaagacaagcatgagcagaggatttggttttgtcagttttgtgagcagggaagatgcacagcgagcaatcaacaaattgaatggctatggttatgataacctcattcttagggttgaatggtccactcctaaaacccaattagatccgttttcattcgctgattataataatctttgtaagttgttgaatatatgtcattcatgattataagttctcgcgatacatagtaattcatgttggggtctcgtatgcaagttcctactaaatgtatttcggttgaatacgtgcaaaaaaagtaataaaactctctttattacggcaagcatgttacttagaaatgatcataagggaaggaccaagtaagggcaattaatcaagtgaatatcatcaaattcaaagagatgggaaacaaggactcgaaaggctcttcttcttcaaccaatccgaaagaggagattgctgctgtacctcagcctcaacagtcaccaccgcaattgatccgaaaatcgcaaccacagcagccattaccaccaccttcgtctgagatgcctcttctctatccgtgttacaaaaaagaagactatgagaaaatgagcgaagagacaatcgatatgctcttagcgacttacggaatcatgacagtccctggcgatttagctgacaagagaaagtttgcttttgaaacctttcgttgggatcataagaacaatcaccccaaagcttagcaactacttgtctagtataatgaaactaacgttttatgattggacctaaacacattcataattcgttcattaacacaagaaaatataaatcaaaatgctagtacttgtacaatatcgaatattttaatcactttaacatctcttgaacaagtttcagaaaaaattgttaagactaaaaggccctaattttaccaaaataattatattttattttgagttttgccaaaggtccaaaaatgaattgagccggaactgtatccaatatggaacatagtttttacaaaattatagttttacaaaatttaaactatatccaacatggaacaaagtttaaacccgcgggcctaatgggttttataaaatttaaacggatagccggttttagaaatcatagttttttttttttttgacaaagtttttttctttaaacttgttaatctgagacaatttaattctttgaagaatatatgaaaacactaaattaatcatgaacttttactatactaaaaaaataaagagatcttcaatcttcaatggtggaaactgaaaagtctttttttttactttaaaatttaatttaattagttaagtaaagaataaataaaaataccaaataaaaatcgtgaactttatttttaatgttatagtttgatatccactgttaaaacatgaaaaagattgtaccaaaacccatagtttctatgaaataatatcaaaacgggcctaaaaggatttaaatggatcaatgcaaatttaatggatttaaagagcaaaacttaacggaaatgggctttaataggcttaaatattttttggttaaacgggccgggcttaaacgggccgatctgcctgttataacatcactaaacaaaattatggactgcaacaacaataatgtcttcttttgcttagaagcgatttgaaactttttaagtagttatgatgtatttattttctgtagattgctttgatctattttttgtaatttttgtaattctgtcaaaaataaaatagtataaaatttaaccttttactaaaaagaaaaaaaacaagatcttgtgagataaaagtattaaaaaaagtctcatacaaaaaaaaaattaaactaaaagtttgtgtcagacttaattaaggcaatgtggtgctcacttgaagaaactaaatcctattttaattaataaaagcaaataaataaactaagatggatgtagtatgccacacgtccaataccaatgtttatctttgtaatataaggattctatgattttggttatttttaaaaatgtatatctttataaatcaatttaaaatctcttgaggttttgctaatttaggttattataagtaaataaatataactatttttaagctactatgttactattttttattttccttattagtgaaatttgtaggattttcacacatgttaagaaaacatattaaaaaaaaatatttttgtgatttacaatttgcaataactctaaattaatagtactcaaatatgtttttttcaaaatttataactcatcaataataactaataaatattgcatagaaaacttaaaatatttttttggaaactaattttttttttagaaaataaaataataaggaacaaagagagtataaattatgaactattgaagataatgatatcaataacacatcataatgataaacagctcatctaaaaaaaatctcatatccaccttctcctcaatgtttacaatctgtatagtgatgatatttgtgacatgctatgaaacgtttcaacaagatggagaaccatttccaattagaggtcctcttacgaggatcacggttaaaaacaataacgattatttgcttggaatccactgtaaatctaaagatgatgatctcggtttccatattcacaaagagggtgaattatatggttggaaatttcatgtaaattttcagaattcaacactatatttctgtggatttagccaaggacaagataataaaggcgtgttcgacatagacagggcggaaagagatttttatagatgtagaaattgtacatggaatgcaaaaaaagatagtctatatggttatagcaacttgcctcaaacagttacatggttttttaagtggttaaaatagtactaaattgaattatcattgcaaatataaataaaataatcttttaagaactgtataaaatttgcatattatgttgttaacctaaaataaaaacttgttgtcgagcatattagagcaagttttagtaagagagcaaataagagatgtgagcctttaaaagtataaactttaagaagtgtcaatggctgtttaacaaatcagaaaacaaatagttaaggatagactgaaaacaactgattttcttatattttccttctgattttcttatattttccttaattattttttatttatatttttctatatttctttctgattttcttatattttccttctgatttttcatattgttcttctgattttcttatattttccttctttttttatatattttttttatagacttcatagccaaacactatatgtacatatgtaatcttttatctgcttatagaaaactgaacaatttggacctagttgaaaaaaacaaaattttaaacaggaaagccaaacattaccgaacgattactcgaaccgattatctaactttggttacattggttttgaatgtgattttgggttgtttaaaaggatattgagttgggaccgggcatattcccgccagataattctgaagaatgtattaagagccttcaggatgtgatcttcttcttaaaattctttccacaatcttttctgcaatgattttatgacggtggccggagatattttaccggagttcctggaagtaaagaatttacaaactttgaagaaactcattacatttttttttcctctatgtaatcagtgtttgagagagatagagaaactatcttttgctagataagtttcatgtgtttgttggttaagctcatattatttatatttttcttgaatatttcttctgtttacttatacgacataaattacatatgtacttatagtgttttctagaatcatttacacaagtgttagaaatcaatgttattatttacacatgcatgctggaatctagctaaaatatgtttgtaacctaaactgttttttattatcaatgaaataattacaatttagtaaatagaaatatgtatatacatatatatatatattatgtggatatacgaagatggtttattgtgagaattcaaaaccttgaaagtttaaaatgaaagtgattgccatcttgaaagttctttatagaattttccctatcaattaatgttatttcaaaatattaactctatgaaagataaaattgggaagtatacttgttttcgagaaaaaatctagatttttgtgggttatttgaacaacctccatatattgtagttatgcaaataaatccagtgatttttacctaatttagtttaatcaagataaatataaatatttatatatatataaatattggatttacgagggtccccatagctttttataccgggaattttggttgtaaaatgttgatatatatcactctaaaaaatttatatatcacaaaaaaatctatcactaactaacaatcatgataaactcatccaaaatcaatctctattcttatgtttgctcaattttcattatgtccatagttgtgatatctttgatatgttcagaagctcttcaaattcaacaagctaaagaaccatttcgaggtcatcttacgagagtcacgattcaaaattataatgactatcttcttgcaattcattgtaaatcaagagatgatgatttaggctttcacatacttgctaaaggtgaactttttggttggaagtttcatgttaattttcgttattcgacgctctgtttttgtggttttagccaaagacaaataaataaaggtgtgtttataatttatgtagcatctagagatttttatagatgtgcaaactgtacatggaaagctgagaaagatggttttcatggatatggtgatattcctactagaggttatttattttataattggttaaactaatataatattgagttatttaagaagaaaacaaatgtaatgcaattttttaaaagataaataaaagtataatctatcaatattattattattattatttcttttgtgacaacaatttctaaaattcttggttaaccttgtcttggtccagtggtaaaggagagaaaaatctttgccaccttaattcgagtagcatcggccaccagggttcgaattctaacactatttttttgggcttcatgattagttttgagcttagaaaacctttataatcatatatctgagttatcaaaaaaaaaagtgttcctcttcccaaacacttcagcgacaattagaaccttgaactcaacatttattaattaacttgaagaaaataaaaaggccatggaaaaacaaatttattcagaggaatggatcttcttcttgtggataatagggtacaattggattctgaaacttatgattatcttcaaagttatttagtggaaacatctattcttttataaaccaattaaatttatttcaaaaatattaactctaagaaagatcaaatttggaagtatagtagatttggagaaaaaaacttgattattgttggttatttaaaatttccatttattgtaattatgaatatatatctagtgatttttttgcctgatttaggttaatcaatataattatatattttatttaaatgctcatatatatcactctaaaaaaaaattcatctcccaaaaaagctatcaataactaaaaatcatgataaactcatccataatcaatctcaattcttatgtctgctcaattttcattatgtccatagttgtgatatctttgatatgttcattagctcttcaaattcaacaagctaaagaaccacttcgaaatcatcttacgagagtcacgattcaaaatgataacgattatcttcttggaatccaatgtaaaccaggagatgatgatttaggctttcacattcttactaaaggtaaactatttggttgaaagtttcatgtctctttccgttattcaacgttttatttctgtggttttagcaaaggaaaaatgaataaagacgtgttcaaaatttacagaacgaatagagatttttttatagatatgcaaattgtacatgaaaagctgagaaagatggtcttcacgaatatggctatattcctatattatttattttataactggttaaagtaatataaaattaaattattttatattaatccctaaatgtaaataaaaatgtaatgcagttgcttaatccctaaattataaataaaagtactataacctatgaatattattactattatttattttgtcacaaaagaaactaggcctaggcctaggcattcggtgaaatcgaaaataaccgaaccgaggaaaccgaatgtttctatcggccccgagaattagagacgtccaaaaccgatcggcaaaactaatttaggaattcgtttccgatttggttcggttcggcgagctaaaaccaatcggttattcgttttttttctttgttacccctttttcatagttcttctccttcacagatctgttgctctgtttttcatcatgcagccacgtgaaacagaagatggcacgtagaatacgattaacaaaaaccctaatatttaatatggatgagctttgcacttgaaatataaataaacaatctaaagcccagcccatattattataacagttttttagaacccatcaaaacaaactcacatttaaaattaaaaaaagtaaagcccagaaacttatattttcatgggcttgttattttagttgtaaaatatgttaaacaggcttgtaaattgttttgcgggcttgttttcaattttggttaaccgaaaaccccgaataaaccgagataaataaaattttgagtcgatttagaagtgattttaaagcatgtaaccgactcgaataaacagagtaccgaaccgaaccgaatcaaatgtttattcggtcaattcggcaggattttgaaataaccataaaatcaaaaaccgaataaatccgaataatcggaattaaccgatttcccagacctaaaagaaactatcgtcacttgtctaaagttcgggaaaacggcatattccacaaggattgacagaaactaaaactacgtcgtttagttaagatcaattatttctaaaatgacatttccaaggtttcgaatacgaattagaaatgcaagcccaacaccattatgctacgacaacttttatgaccttcacatacgtaaatatatatagatatatataaatttgtcgtcttcttcttccgattttgttatcctagtcagctacattttaacactttaactaacgcgtggaatacgcagttttccctcaaaaatttcctctttcgttaacttgtgtgtcataaaatctattaattatatagttataaagaagagtgttggtccagtccatctcaaagtttgagctccgtggaccgctcgtcgggcctgataggtggtggtatcacacgcagctgtgcacatcatcaacaaatacccttccacagcaataaaatctcaggtttacactgtgggtctttctcgtcaagtctatgttcttgctttcaattcaatctttccaatcgggtctagaatgacaatttatagttttttctatctactgaattaaagacccgccacgccgggctataagatacaactgttgtactacactagagtgaagttgtgaagttctcgaacagacccttccaaagatccgcccggttcaacttgagtactcctggaagaggctagatatctccgacatggacccggtgaaattgaattctccgccacttagactgatgtggaaaattgatcccccaattgataggtttatttcgcactttagaaaaagtttggaaagaaaagtagacggaactggccaaccgctgcttatcacaatctctggtgccggtggatcgtcaaaatattggaaagaagttaggggattccggcgcggatgatctgtcttagagggcgcggatgatctcctcccacgtgagggcgaagtcatgactcgacgaggccaatcacgaacgctacaggtgtgggagcgatcctggtcagggaaggctaagacggcgcctcgcatatgggtagcactactcgtactatcttgaatgttgcataacagttagaggcctagctagcattagtttgagcagctagccgaaaatcggacaccaaattattgtagactgccctgccggaagaaaagtaattaagttaaagagtgtcgagtaggaggagtcagcttattctatagatactgtaaaagccaactcatgtaggttatttaacttcacatatagcccatcagcttgtgacttcttacaaaataacaacgggggatcctttatccccctgtcttaggaatcacttccccttcattgaaaacgtcctatccatcgtctcgcaaagagacgcccaagatttatagcaagttttgacttgagcgctgccaccgatcggtggcccgttccaaatgtaaaaattttaaaatcataactttttcaaaaaaccccaaaaatttatcatctactacttttacaatttcatgatctctttcaaacgtttcgtctttactctctataaataaaataaaaatcctacattgaaaaatttacacattctcattaatcatcatcgacataggcacacggcgactccatcattctctcccattaaaaaaaatattcaggtaaaaacttttaaaaaaaagttttttttttctttttttcaattggtaggaggttaattcccaatcaattttaggtttaagcatatatagaaaaagaaaaaaaaaaactcaaattcatccattttttttgtgtttttaaattttttctttaaatgatataggagtgtagatgaaaaaattaaagccattttccaaaaaacaattgatatgcatgaaaatcctggaaatgagattcatttaatttgttgtctatatctcacttactaatcttctcctttttgtaattccaaaccctttttattactttaggttagtcacttactctcggctctctcttttcttagctctgttttttatatctaaaataactttttaaaattgttgtgcttgatttgcagagatttggagaaaaacatgattgttgaaagtttcttataatttggagaagtactatctcaagtttgttaaattagtttataattcaagagttttagaaaaccatattttttccttcatttttgtgtgtataggaaaacatacatttttttaacatagatcatttctcatgtgtctcaagacaaatagatctacaaggtcaagcaatcatatttcttttattttcagtcatcttcttaggctaactcaatttcggaaaggagatttataggaccggacaagaagaatatacagtaaagctaaacaaacaaacagagaccaaactgaatatagtgaagaagaataatgaaagaacaaattttaccgcatgttttttttttcttttgtcaatctaccgcaggccataatgtgactcttatattggcttatgatagatttttgtatgctaactcatttagcaaatcgaagtatttttagtttaattctttaatgtcttataacaacttcattaatgaatttaaatcacaaattaaagttacaattaaatcagttttaagaaaataaaccattttaatataaagtttattgtagaaaactggaacttctagattaatgtttgttaatccaatggaattttacatagttcatcattaacgaatgtgtatgtatatattatcttttaaatccaaacatttataagtaaaatattgcatgtaattaatttgatataaatctaattatccaaaatgctatcatataaataataccaatctaatttttttcccgtacgtcgtacgggtggaatactagttctataataattcaacaaaacattattactaattatttggattaataggtttaatggcggacatcgagaatccaccagtgtgtaggatttgtctagacaagggagatcttatccacctcggctgtttatgccgggatgatatgtctcttgtacataaaaaatgtgcagagatatgattcacacagcaaaatactaggtaaatttatttaataaattatatatatatatatattaaaaatattaataactatttgattaaatttttgaattacaagatttgcgagatttgcagcaccgaagctgcaaacattcacgatttcgtcacattgcgatttcggcttcctcgagagttattattttttaatttttatatttttgtaatttttatctttttctgtttatttttttttgtgttgtttcattttcgtattataactattcagatgtgattgtaaacttattttcttaaacgtgaaaattggatttatacataatgtgactgaaaaaaggttgaaaacatcatttcttaaattgcgtaaaatttatatttttaaaatttttaaaactataattagttaataataattcgatccgtagacggtttgtccgctccgaccaccgtaacaattcaaaaccgaagaaaattgtttatacgaatctattccgtaatatatatatatatatatatatatatatattataagaaatttctttttaaaaaactaatccatttaatctataataaaagtcactcgccattcgacaatatatatatatatatattcttcttcactgccagtctgaggatttccggggaaataaagaaacttgactgctaattgctaaaggtaatgcttctgagaattggaagctaatgaagctcttcctcaatagcaatctgctcagaaactctattttcttcaagatctccgcctttgttttgatctccgttgcttgtttcttcctcggtaagcattggtctgaggatggcttccgccgtctcatcttcttctccgccgagccttcccgatctcccattgtcgcactctcacctgatttcggaaaaacctataacatctctggtttgatctatgagagtcacccgattttgcctccgtctttgtcaccaccgccgccgccagattctgttgagttgaaggtgtttggaatcgttaatgagaacggaacaatgtctgatgagtttcagattggtgattacgacgttgagtcggcggagacgttggggaatcagacggaattcgagagtagcgacgacgatgatattaaatccaccacagctagagttagtgtgaggaaatttgagatttgttcggagaatatgactgagtacattccttgtttggataatgtagaagccatcaaaaggcttaattcaacggcgcgtggtgagcgattcgaacggaattgtcctaacgatggaatgggattgaattgcaccgttccgattcctcaaggataccgtagtccgattccgtggccgagaagccgtgatgaggtatatctgtgacgctctctgttctgattttgtatttccaaaaggaaagtttctgattttggtttacaggtgtggttcaacaatgttccacatactaaacttgttgaagacaaaggtggtcaaaattggatttataaagagaatgacaaatttaagtttcctggtggtggtactcagtttatacacggagctgatcagtacttggatcagatctctcaggttaattgatttttatgtctcattgtgagaattatttgcatcacttgaatctgatattactttatttttgtggttgtatgtgtagatgattcctgatattagctttggtaaccatacacgagttgttcttgacattggatgtggtgtggcaagttttggtgcctacttaatgtcacgaaatgtcttgactatgtctatagctccaaaagatgttcacgagaaccagatacagtttgctcttgagcgtggtgttcctgcaatggtggcagcattcacaacacggagattgttgtatccaagccaagctt

SEQ ID NO: 700 - DNA, 83865 bp, Arabidopsis thaliana
gatccaagttttgttagcaatgaagggaatgaaggaaagattggtgaagaaaatcaaactcatcaccactgtcaagacgttgaagcaaagcttaactcttcataagagtaccattgatcgcacaatccatcatctaagagacgaaatagtcgctgaatctggtcaaagcaaaggttgtgttacaccaacactactagagcttgaggatgcagaggaacataatcttgaagaagaaagagggattcttctggagtttaaagagaattgcccacccggaggagaagattcggttgtattctacacgacgggcctgcgaagtgtgaggaaaacatttgaagcttgcagaagagtgagattcttgttggagaatcaccaggtgatgtatagagagagagacgtttccatggattcagagtttagagaagagatgtggaggttgcttggtgggaaagttacctctccgaggctgttcattagaggtaggtacattggtggagcagaagaagttgtggcattgaacgagaacgggaagctgaagaagctactacaaggaatctcacaggttgattcaccttgcgagtcttgcgagaacgaaaggtttttgatatgttctagctgcaatggaagcacaagattgcttgcagagcatcacgatgaagagagtagtaatgataatatgtggacaagatgcagagaatgtaatgagaatggacttgtgaaatgtcctctttgtacgtagttgctgttataagctaataataactatctgatttttaactttgtagtaaatgatgtgtgagaaaaacgttttgtattaggattgtttaatcgtattatgtttgtaatgaataagtgaaaaacaccaaatttgaaaatttagttctaaattttaagaagttaactctattctcatacatcaaaactctctctatctctgaaactcaacttcatatcccaagaatacagtaattattaaaagcttctctcgttggggacgttaattaaaattctctaatcaggcgaagtagactgatacgagagggatatcaacgtcagcatcattatcatcttcacaagcgactacaacatccacgtgacgtctataagcaggcaattcaaccccagccacgtctcttgcaagatccaccactcttctgttcatcctctctttatgccttgagaacatactgttgtacagtaaactgcttccgcaagatatgctgtatgcgtttagccctttctcttttagccagtctagcaactcccttagggtcgggtttcccctcatcacccaccggtcccaaacagtccagctttggtcttggtgcttcaccactttaggtggaaccggctcagccatggagaagagcggaagtgctaagttagcaaatgtgtttctgtagtcttctactttgtgtgacccgtctaagaccttgtacatctcaaggcaaacaaaacctgttgccattgcagttgatgtcgcaatcgcgggtatgattcttccggctatgaacttggctttaagcttgtccacctcgggaacactgtagttccttgctctcatgttggctagcccagcgatcatatccatgtggtagttggtatcatcgtcctaagaacagcaaaataatgttagtttgttgctcttataattcaaatacagaatctgaaagatacttggatacatttatgattcaccttttcaaactggattgccttcatcctgaactctggctgcaagctcatcctgcaccgcactagttttgcgtttagttcatcgattactgctgcatcatcgactgaagctgtagacaaagttgtagccttctcatctgtcacaatagttgcatctttcttcggctcaaagtcggggacaattactctttccacagcctcggctagtcctgctcgggttttagcccactcaggagtagggattccgaatgtctctgctcgcaagatagatgcagccatgacaaagttgatatggctcaggtcggttgaggagaattggagtgggcgaggaaatctctttggggcagaccagaacggagctcctgtactagtagcagcatcctcaggaaatgtgtaacataactgcttcacacggttggcgaagtagtcctcaaacctgtaagcaagcaattatgtaaagagaagaaaatcattttacatatagtctcaatgaagggtgtgggccaacagagagtacctcagacgagcccaggttatgcaatcctggaatgaattgcacttttctttctcgaggcactcaacaacacgtcccaaagtatcccttgcttgggcatcaccagcagttctcatcgctttcatgtattcaacaggatctgagaggtatgcattaacttcagctggtgttttctcaagcaaaccctcaaattcagagcgagcccatgttaagcaatgatcaatgttgtgaggaaatgagtgcacggtgcacattggagcctgtttctctggtgggtctctcgaggcaccatagttctcagtgaggtgagggataaccatctgtgtgttgcactttgcacctagggttcctgactcgaggagaggcttctggaaatacacacaccttgaatcaacataaagccttgcagtgacattgtccaaagcgttcaccacaactgtcaaattctcccagaagctgtcgtcaaagacattctcggtctcaggtccaacacgattttgcagagcatcaatgttgaggcgagaatttattccagctgctgctgttgcggcaactgtggatttagcctgtcctatgttccaatctcgaaaaagaaactgacgactcaggttgctcttctcaattacatcatcatcggtgacagttagcttcccttgggtgccacatgacacacccatcaaagccaagttctttaagaactcgcatccaagagcaccagcccctacaacaaaaactctggcatcctcgagtttcttctgaagagtagacccaaatacagagatctgtgcatcgtaacggctattttgtggtctaaactctgatgcatcaagaggttccttggggagtgactccaccgaatcaaagtaaaagaactgcacaaataatgcaaactaattaccacattaccaagtataaaagaaatactactaacaagggaagagaaactttagtcctggtataggactcatgtagagtaaatgcctgtataacatagatgaacagcattgctcaacaagtagaagtttaacatacaaagaccgaacagatgagcccctgaaaaaccaaacagaaaagtctttacctgaaagataggatggaatttcccagagcatgccttgacaacctcctgcccaacaatgccaccaaacattgcagccataggattcagaacagccctggatccaaaggccaaatgccgcaacagtttagagttgacatcttccaaccttgcatcacccaaaccctcattaatgtcaactgcaatttccactagtttctgagcatcttcttctgaaccagcaaacggaaatcggcctgcttgagacgaaaacctatcaagtgcttggaatgctaagtggagaagaggtggtcggtcaaactttgaaaagtcacttagaagaaagtcgcctggatctttaagtgcttctctaagaggtttaaagttcaacacctttggttgtttaacctgagtcacaatgccacccttcatatattgcccatagctagaggtgtcttcctccagggtaaatgaaaatggcttgacattttttatcttccttggttttccatcatttagctctgtcattccctcaacttcagagaaaacaaccaaatttccatcttcaaactcgagcctctcatcatcgacacacgaaacaaatccaggattttcattgctaacagaagcgatgatgccagagtgaggttcctccccatcaacatcaagaacagtaaaatgaggtccaaaatcacaaaacaaagacccaaacagccccctaacatcagccttgatgaatgcaataggaggctgatgactgtgacaataatcatcaatctctgtcgctttctcaaaagagatatccacaaataccacaacctgcatcaaggaaaaaaaaaagaaatcaaccactaaagccaaacattctgtacttttagtagaaacgttttcatccacgttcagtcacctctaatctcttttacagataattatgtccatgaatcatgatagtattattaacaactagaacaaggaagcaaagacaaaccaaataaaggaagggtttggatacctggaaatcagaaagctgctctttggttaacttcccagtcaaagttgagacagccacagcattgttgagttcttgcaacttgtgaacagaagcaagtgctctattcttaccaatgtcctcctccgtgaaaacaaagttactagataggtcccatagctcaaccacattttcatcgtgaagggtcactgacttcacaccagctagaataatattcttggctaaataagaaaaaaaaaaaaaaatcatccatcagaaagaaggaaataacgaagagaataaagagctataccagtcattagttcattacaaatctatagtgaatattgaataatccttccattatataatgtgtcactaactcattagaaaatcaggattaacaagttaatataccaattttacaatctcaacttcaagtgcccaaatgtacacacaacatcaaaacagcttaatcacgaaatacgtttgctcaagcttgaagctctttaacaaccagcaggacaagcacaggaataacatgcaagcagaaattaacaacgaaaagtacaaaaatcgttaccaatctcaacaccaaggccctgcatcccagagatgagaacgttggaagcgaaaagcttcctcatagtctcacggccgtaaacggcgagctgtctgctatgaagatcttcatcgatctcctgattgttggagttgtcgttaccaaactccgccatgctcatcaccgtatcgttaccaccgatgctgttgttcaaaccgatgctactggagttagaagcgttaatcgcagaaccatcagctgactcagtgtgatcgatccgtcgcttcttcatcggcgaagaagcagatgcgatgatgttctccttaacaacgaatggttccatatagagtaactgaaagagaatatgtatcaaataaacagaagaagcttcgaataacaaacaaagacaataaatgaattccgatgagaaggttcctagagctaatcgatgaaggaatctgaagaagaaacgagaatcggaggaaatgaaaacgaaaccgtacctttgagagaagatcggaggcgataagcggcgaatttgttgttaaagtagaaagagagagtatactaagcttttggctttgtaggttgtgtagaaagaagcggcggtatataacaaaaattgggcgatgattgttgggctttgaaactatttgtgctgaattcagaatcagcctgtgttgtgtggtaagttttttcgttttttcaagtggaccagtttaagataaatatctggttttggtcttgtaacattgaaccggatttgagtatgcaatagaccaaattttaattcaggttaggtgtgattgaatttaaactttgaaattgttaatcaatcaagttttgttttttatttgttgattgataaagagagagtagttgttggatatttgaatgtgtgtcgtacttgctaattcctaaagattaatagacatttcaaagaagtgtaataagagtgaaacttaagcataatgtgtggaaatgtaccttatgaactcaaccattttggtgtgagcatttgtgtttggaaaatgatatggggatgctctctctatcacttataccaacaaacacaatctatgttttatgtgtgatttctaaacgaaaaaaataatattaatggatttgtagtgtgactacattagcgtgaaaaaaaactcttgtatcttgagaatttgaccaacattgcttgacaagtatattcacggttgtatgataacgatgaaaaatgtctcacattatatttcttgtgtgaattggcgttggtaacaaagattgacaaggaccccttaaaaaaaaaagtcaagaaaaacattcaaaagacatagaatttcggttgaaccggattggtcagcttaaattactaacgtatggttggttaagcaagctgaggaaatgtgtctccatttcgtgatttcttcttccctcgcggggatttagtcttctctcttccagcagaaaccagaagaactgttcctcgcttactacgatccctaaccggacgcgaaatttcaaggttcgtcctcctcttaacttctcatcagttaatgtctcttttaagttgaatttgactagtatgattccaatttcagatgatagttaggggattttatctctcggatcgatcgttttgggttacaagaactaagatagaatcaaatgtttttgtttctccattagttaattagtctaagagatatagaacaaaaagtttcgcttctttcttgttatcttttgatgcacagaaaggtcatgaaacctagaactagggggagtgatcaatggtatttgtagccaaaactaaaaaaaaagtttgtttacctctactttgatcaattcgatgctagatcattgtttattcaatgtgtggtcctttcttcacccaatttctccaagtttccaactcatgaatacttgtagttttttataaaaaagaggaaaccttattggtgctcaagttatatgagtgatgattggattcactatcttactttccacttctattagtattgagataagtttagctacaactttgtcagttatcgttgaatctaatttgatttgtgaatattctttagtgttttttcatcacatggcctcctttgatgggccaaagttcaagatgactgatggctcctatgttcagactaagaccattgatgttggatcatcaacagatatctctccatacctttcacttataagagaagattctatcttgaatggaaaccgagcggtgatcttcgatgtgtactgggatgtggggtttcctgaaactgaaaccaaaaccaaaacgtcagggtggagtctgtcatcggtgaagctgagcactagaaacttatgtctcttccttcgacttcctaaaccttttcatgacaatctcaaggatctgtaccgtttctttgcttccaagtttgtcacttttgttggagtgcagatcgaggaagacctggacttgcttagagaaaaccacggtctcgtgataagaaacgcgattaacgttgggaaattggctgcggaagctcgtggaactctggtgcttgagtttcttgggacaagagaattagcgcacagagtattgtggtctgatttgggccagctggattcgattgaggccaaatgggagaaggcaggtcctgaagaacaacttgaggctgcagccattgaagggtggctcatcgtcaatgtttgggatcaattgtccgatgagtgatttactacttatctctgtgattgcttctttttttttttggttcttttgatggaaatgactttgtacctgaatcaaagtgatcctttgtaagttgtttgatgtgacaatcaacaatcactaaacaaaaagtgaacagtttcagattctttaacgttcgacattgtgtatgaaacaaactatatgttggttctgctttttctgatataactgagattttgtgctggtttgatttaggtctggttttggctaaagattagaacaattttgttttgctaagaacaagagtgcaaatggatgtgtgtaattagaaagataaaatttggtggaatcaaatataaccatttaagttgaatggaataaattgaatattccactcattccaacacttacaaattatactcctgtttaagctcaccaaagtgtaagagagacactaatttaataatgaaggagagatgccaaatttaagacaagaggacccccaaagatattcaggtttcaactgtaatagcatcaccttcctatttatgactatatttgttctgtctgtaatttataaaaagaaagaaacaaagaagagtgaagttatgtgatcaagaggcgcagagagatagatcttcccacctgtcttccttcttctgacaccgacacttatccgtctgtcaccctttaaaccctatctttttctcaactaagcttgtgtttaatctcaccattaatcttgtcactacgcatcatctcatctccttcctttattggaaactccgactttacctggaatcgtacccgatttgatttcactcgagataaaataattagtgcaaaaaagttctcaccatctttctccgtcttgtcggtcacgtttttgtcctcgtagctaaaaaaatcagctttctacaactccgtaaggttgtgactttctgtgctaatcctctttttctcttttctctgtaaattttgatcagatcataaattttttataagattttcttctggggggttttgattcttatcactgattttgtggattggtctttgttttaaggtggaagcttgagattatgcagaagaaacgagagatctgtggttatagagacaaattagacaagaccttatcttctcctgaactcactaatcacgagactctcaaatctcttctcagaaaccagcttgaaggttttgtttttctgaaatctgaaattttgcttttggatttttactttttggagtttactgttatgttaatagattttggtttgatggattttgtagagtgtgatgagaatatattggataaaagaacagatgatgtatccaagttacttagcaagcttaggagtgtttccatgactgatcatcaagtttctaaattaaccaacgatggtgattggaaagtatgtttttttttgttttgaacttcagagacatatccatttttgttcttattgtttcgaccaatgatcttggattgtaacgatgtagcaaaaaagtgtttgttttacagttgaaacatgatcttgaagattgccgtgttatgtaccgtgaaggactcgatggaagtccttttcacacattgctcgttgaaggttacatggatggtcctatccacgaatgtaagtttttctcttattagaatcgagacagcagaatcaaagtttaaacaatgattactgcagttgatgtttactggacttatgaattatgatgcaggtttatgcgtatcgtgggaatcaactctctacaagaaatggtaaagatcttggattgtgaacaacaggatctcgtttctggttggatgaatgtttactctaaaagtgttgtttataggtggccacaatatgcgtttcctccattcaggatcttaaaaagcacatgcttgcaaaaggtcggggtcggtgaacaaatttgtttagcaaggtttgtccatattgaaaacaaggatgaagtttgtttttggggttttatgtaatcttatgaagctaatctatgcattttatattatgggaagaaaggatgaaggtaccatggccattgacggaaagagagatgattctgcactatttctcttttgaatactttaaagatggcttagtcgtcatccttctgaacacggtaaagcaaaatcaattcatcttatgatccttggtataataatttgacattattcgtgataatttttgtttgcaacttttagatctctgatttaaatagcattggagtttcctctacggacatcatcatacctgaatcaccggatgcagtgaggatggatctcgtaggcggatttgttttacaaaaggttactccacagaggagttacttcaggttagtgatcattgtagtattgcaacttgttagttgtctttggttatgaagcttaaaatacagctcttgtctaattttgtagaacgataggggatatggatataaagctggacttgatgccaccatctcttatgaattttatatctaggcagctgatcggcaacggtttcagactatataaaaaggtcagacaatctggttttatgattttgtttgttttaatgtcaggtaggtacttgagtgataatatgtttccgtatttgaatgtaacagtcagttgcttccgtagctaaatttgatgaagattacagtagagctttaactgatcctttgtatactaagatacgtcgagctctatattcaactgatgaagcagtcgaggaagaaccaaagttggaaaccaatgaagtaaatggcgttactttgccaaagcacgaacacgagaataatggagatgctagtgtaaataaacctgtccattgcagaagaactgttcccgagattgaggaagaagaagaatctgaggaaagtgtttattcagaggatggaaatgaaattgccaagactcatgtggatatgagaagacggttttgcgtcagtccagaggtagaacaagctttagggactctagatagagtaatattcatggttagaaatataacgccagtcccagaaactgaggaattgtcgccaaatagagcagatgatcaggcaaaacaagtgagtgtattagagaacattgaaagtgttcctcaaacacaagagtcatcaagcgatttcagtgaagaagagaagagagaagaggatacgggacaaaatcagggcatgttaaacaaaggtaagaactcgagcttgcagagaaaacgtaaagctcgctgctttgctttcaggtcttggctttgaaggaagccaaagttttcatttacttgcaagagttttgtaagttggatttttttttttcacttggaagtttcttcttctcagttgcatgatccatgtataaagtttgttgattatttttgtaaaacttgttttgttcgataaaatttatcatatttggcgaaactagttcctcctacatttttgcttctagccaaaaataaagaataaaccgaatctttgggttatggttggtttgatttctcaattcggtttggtttcatacccaaatttgaaacctaaaaccctaatttcctttttctttcaaatccccaaatttctcgatctcgtcgtttctcttctctcgcaatcatcgcaccgtttctgtggaattctagtcgaaaggcgttttgatggaatcaaaggttactactacgagctcttctacttcaaaagatccattcttttgcttgaaatggccatgggattcaaacaaacaacccaaatcctcttcaagcgtctgcgactttcaaggaccgtggctcttcagatctatgcaaactattggctccattgctctcagctctttgacttcatttggccaaaaccccaatttcagaccaaagaagaagcctttaagcagtagtgagcaaggagaagcagagcagagggcttttgcagctgctttagctagccagaaagaagctacggttcttgaattttactcacacaaatgcagactctgcaattctttgctcaaatttgttttagaggtagagaaaaggaattcaaattggctcagcattacaatggcagacgcagagaatgagaaatggtttcctgaggtatcataaatattagttatctctctcttctcccaaattacagagctttttctcaaaaatgcatctctctgtttgtctaaaatgcagcttctccactatgacgtaaagtatgttccttgcttcgttttgttggacaaaaatggacaagctttggccaagacaggagttccaagtagtcgtgctcatgtcatcgccggtatctctcatcttctcaagatgaagcgaccaccatctaagtagtgaaactatgcttgattccactgttgatgcaaacaagtgatctacaaaaggttgtggattgtttgtttctggtgcatcaaagaactttaattgtatgtgcatagatgattaccagttctaggttgtggattgtttaccaataccgtggaagattatggtgataaatgataatagattgtttctgttgttgtacacatctctttgtttcttatgatttcacaactcctgctgggggagagagggtggtggactgaggaaggagtttgcaaaacttatgaagaaacattgtgcatctctttttggtaaagccaaatatattagaggacgaggacgaggactccgtagttagtgttttagtttccgtctctgtttggagattgtgtagaatgttttagtgttattattaaacaagtcatttgaaagatttttggattcatactgagaagacccaaactatgttgcaagctctacttaccagaatgtttaagaatattgagtttgacgacttaaattctgacgatgacttactaggaagttgactccaaaactttttcagtttgtttaaatttaaaagttaatcagtttgaaacaaccatcgtcatccgaatatacagtatataggccagtgagtacaacaaaacaaaaagctttcctcaagcaaataatcaaatgtatagtttttgcctttttgtcctgtgaaagaaggacttcacaatccttgttcagctttactccgttcttcagccattctcttcttgatctcatgtgctgcattgaaaatccccattgttggttggttacacacaaagcatttcttgttcttcgtgtgatgctgcatcattacattaaacaaaactcattagtatttcttcacaaccaaaaaaaaaaacagactcgtaattgtgatttaagttatgatcatacctttaaagcacaatgctcacagaagtaatgcttgcatttggtgacaactggatcaagaaaaggctccctgcaaatgaagcaagcaaagggcaatgcattttcgtcttcgtcgctatccttgtcagcctcatcatcgtcatcctcaactcccatagctttatttctcttcctaactttctctgcctcttcccactctttctctatctgccatcccggcttgtaatccccacggtcatgcaagaacttacacgaatctccatatccacagtatccggtttccttgtaatccttgcaaatgtctggctggtaatcgaatctagccgatactctgatgtgagcagaagctcttaaaggcccgtgtgagcctccagctttctcgctcgagattgtttgttctcttctaaacccagctttgtgatctgtatatccatgaattcctttgtacagcttctcatctgaagcctttttcttattccccttcaatgcatggtctgcttttttaagaactctttcacggatagctcgagcgtcttgattgaagtcggtttcagtttcaagggtcgctgttgctccactgtcgttctgaacctggatttccttggatgaatcgtagtgaaaaacgggtctctcaggagctccactcgttctagtagatggtccagaagaaaagtacaagttgctatcgggttttgcaactttctttagattttgtaaaatagagctttcgcttttcgaatctccgtcttcttcatcagcgtcaatggttcttttccttatgtttttacttttcgttggcttcttgaagaaagtgcaaactgaaacagaacaatgatttgattagtgtaaatgaaaatttctagctaacaacgaagaagaagaaaaaatctcaatgaggcaacaactagaattgagatacaaggaagtagtatatgtaaccttgttgagactcctgattgttggagttgtcgttaccaaactccgccatgttcatcaccgtatcgttaccaccgatgctactagagttagaagcgttaatcgcagaaccatcagctgactcagtgtgatcgatccgtcgcttcttcatcggcgaagaagcggatgcgacgatgttctccttaacaacgaatggttccatgtagagtaactggaagagagaatatgtatcaaataagcaggagaagcttcgaataacaaacaaagacaagaaatgatttccgatgacaaggttcctaaaccctaatcgatgaagaaatctgaagatgaaatgagaattggaggagaagaaaacgaaaccttacccagtgacccggttgacccggtaacccagaaggtattccgattcaccgtccgggtcggaggcgataagcggcgaatttactcggtctggtacgataagataaatatctggttttggtcttgtaacactaaaccaatttactcggtctggttcgattagggacaagtagtagtagtaatcgatacacgacgatctctccagagccaaaacctctcctgatcccgtaatgaagaaaacgaagacgatggtggcttccatctccacccttattagacggacctatccttcaactaaccagtgtaattcactcgcgacgattcaatcacaaacccaattgcctcgcgaatctctgcaacatcattcttcagctgagggacgactccgattctccgggagagttttctgctcggaatctggcgccggatgctggaactgtggcgagaaagctgcctttttgttctgtaactcatgccgtagcattcaacctgttgatgactccgtcgactattttcagatttttggcctgtaagtgtgtaacgagttgattagaatctagggtttgaggagaaccatgataataatgtggattcctgttttgttgggctgaggagaaatgatagaaagattgaaacttttagttgaattgatgcaaaagatgagacctttgaattgggttttgaattttcaataacttgttgtgtctatatagggagaagaagtatgagatagatcctggaagccttgaaggcaagtacaaagattggcaaaagaagctacatcctgatttagttcataacaaatctaaggtctctttgtttctggattctcttttactatgggacgcaatgtttattactcctctgttcttaaaaattagctcttgtgttttgaattgttaacagaaagaacgagactacgcagccgagcagtctgcaaaggtgactgaagcgtgccggacattaacaaagcggctgtcgagagcaatgtatatcgtaagctcttcttaactttcgtcattacgtttttgaggattctccaaagctgcaagttttcctgaaactatttgattatgtagatgaagctgaatggtgtaaatgtcaatgaagaagaaacaataacagacccaacattgttaatggaggtaagtgaatgtacttgccaaagattagtcttgatgccatatattagtttgtgagactttttcttctaccgtaaaggtgcagatacatgtctgccataaataaacacattttcacttagttatattcattgaaaatggtgtcagattatggaactcagagaggccatatcagaagcagatgattcaacatcgttaaaccagatccgatcccaggtaccttgaaaattcctgattgagctagcttccttcaaatggtctttctttccgttagctttccaaacaccttaaaatctgtagctctgggcatcggttgaatatgccaaactgatctaaccaatgcgattttgttgtttttctcaaggtacaagagaaactaaagcaatggtctgactctttcgtcgaagcgtttgaaagccagaagtttgatgatgctgtaaaatgtatacagagaatgacttattacgagcgagcctgcgaagaaattttgaagaagctatgaggcaattagtcctcccttaaaaacgaacacgtttttttttatgtttgccttatagctttacgggtcacatttgaaaggaacagatcatggctcataactgaaagtatcttagctacatgttttagtttagttatatagaacagaggactctgtatttgtaataagaggatttacagatttcgtatctgttcatgggctcgatttatgggtttcacttatgggctgtttatgggctgtttatgggctcgattcctagaatattcccatgtattctcaaaaatccccaaagagaagtcaggcatagctcctagtgtaggtgaatgactgaattcccactaaatctttctactcgtgtaaagagttattataattttgagattctcaacttactactttttagttgagcttctactgtaagtgtaaagacttgctaaaaccactgattagaatcaattgttacttgttctcctcgtttcttaaaatatagctcttactttttgaattgttaacagacagaaagaggactttgtaatagagcatttacagatttcgttgcttagaaaaagatttgctttgaatcaatttgcatgagtttcttcccatggatacagaattacagtgatatgtcagtgatagtcatgcagatacggtatctaagatacggtatctaagataccgttcgctgtgctactaaagccgatttcttctgtagagcaatccgggcaagatcatgcttgccttctctgtttaacccgtagaaaactgttcggaaattgatagtgcttggagcaatacccttatccagcatctcagacagaagcttcagggcatcttctgatttgcatgcttggcacaagcagtttatgaacttactatatgttttaaaatctggtgaagttcctctctcttccatattgcggaatgcattccaagcctcttccacttttcctaggctcatgtatccacatatcattgccgtatatgtaacaaccgaaggttcgcagctttctccttccattttctgacatgtctctagaaccttctcgagctgtttctccttgaagaaataaacaatcagagatgtgtagacatggacaccaggttttgttccaatttccttcatggagttcactttatccagtgctttttgtaagtctcctctctgtaataaaccatgaacaatgcttccataagtatactggtctagtaaagatctctctccttcaaaactggctaattctgatagagcttcttctagctttccaattcgacaaagagctcttatgtaaattgagtaggccacagtgacagggaaacctatcttgccgagagaatccaaacaactttttgcatccttcgtgttaccaacttcacataagcatcccaagtagtcttggactagttctctatctgggacaaaacctgaacgaatcatctcccggaatgttctggtggcttcttcaacgtttctgcctttcttctcacaaagaactgtgattaaacacttgaaagtcgaagagctcgggatcagacccatatctttcatttccttgaacgttctaatagcaatgttggtaagaccggttctaccatactgcattatcatgattgcccaagtatcttgtgttatcaagcagccttgccttctcatctcgtaaaacagacttctcatctgcttaaaatctttcccacatcctgcaactttgatgctcatgttgtatgcctctgaattgtgcttatagccatttctctttcccacccatgaaaagaaacgtaaaacagcgttgccttgtatcttggcatgacgtagaacctcaactaccagttctggtgtgaactggactgtcgatttttctagagcttcttgtgttctctcccaatctcgggaggatgataacacccgacaaatttcttgcacatccattttatcaacagcagataaagctggtggaagagctgactgctgcactagttgtggacaattatagtcatcaacaagctcttcttcttgactaaattctgctttgccagatccgtttagttcatcacaataggaattggatcttttctggatttctttgataagatgaatcttctccttttcaccatttttctccatactagagataacccaagaaaagatatcatctctaataactatcttggaggcgtgcatttgattaaatatcttaatgatctcatcatatcttgatgatctacagagctctttcacaaatatcgaatacgatttccatgtaggtttgatgcctttttcctccatgctgctaaacaccttccatgcctctgctactcggttttggcccaaatgaccagcaaccacggctgtgatagcaacgctgtcaggctcaatcccgttctctatcatctcattgaataagttgcaacccttttcaaactgtttcaacttgaagaggtgttgcataatctcagtgtatgtagaaactctaggtggacgccctgattttttaataacctcaaactgttcaagtgcttttgaaacatcgttttgcctgagatacccactgatgatgataccatagacattagagtcatccagtttccttctcttcattatatcaacaatctctagagcatctaccattctattggctctacaaagtccttttaccaaaatctcaaaatacttagcgtcgaggcacatttccttgttcttaagctcgcggatcagttccagagcttcttttatcttaccggaaacacaaaaactcttgagcaaataaccaaaagcgtcatgttctgatatctcacatatcctaaccatgtcatctgcaatggactggactacatcaactttctctgatttcgctatgcaatccagtaacatcttgtacgttcttaatccaaaagtgatacctttttccatcatttccttatagaattcaagcgcaagatcacctctaccagcaatacatagagacctaatcatgatattgtaagccgtagcatcgagttcgaatccacttttcctcatcttctcaaaaactagcagaccttttccaatcttttttgccttcccgtacactgagataagaatggtccatgtcctgatatccttatcacaaccattcttctccatttcactcaccaattcatctaccatatcgagatttctcgcttctccagctatgctaagcatggtattgtaaattccaactctatgcgaaaacccatccttttgtttaacccaattaaagaacctcatagccaaatgaggaaccttgaagcacctcttgagtacattctccactatttctggttcaaaccgaaaactcagtttctctaacctgtcctccatcgaaactaatacatcatctcccctgacgacactcgtaatctcatgaaccacggggctgaagtcaacttcttcatgaagaactttctgagccttttcatcctcacctgaaaatcccattgcagcattttgacgaacaccttccgtgcaagaaaccgatactccattatcagagacagctcctgacacatgggatctgagccgcgtggtctcatctagtttgacaacatccgttcctaaaatctcagtaatctcgttgaatagtgaagtgattgcagtagcttctgcttggatcttcgatgtggtagtagtctcacgggttttattagatttagatgactttgagaaacctgagaaagaaacgagttggttcctccttcgtgttggatcaaacaagcaagacttgaatcgaaacaaggctttcattgctctaagtcaactccgaagtttgggagggaaaataacggtcgagacaggtaaattatgtagtttataaaaccactcaaaaagcctttatttatttttttgtgaaatttatttgttttgaagaacaaaaattgaaataattgagagaacatcgtcatgagagtactatggaaaaacaaaattcagacaacttcagtattaagacttgagatttctcacaaagacagctaagttttgagtttgtcctccaataatcaacaaacacagcctgaaccaactcatttcccatgtccacgtccacgtgaatataatttgttctaccaaaatatatcacattataaatattacattctctcaaaatactacagtcagagacatctaagaaaaaggtgacgatggatgtaatttaattattcccttgctcttaccatacacaaagtggaattatactttccctatagtaaaagccaaagactccaaaacaacaaatccttaccatggaagaaaaaaactttgttctctctttttatttagtgtactctcattctcatacaccaccaaattaattaaaaaatgattgatatatctaattacagtattcataatccatgaagaccaaacaccccccccccccccccccaaaaatatatatttaaagaaaaaaagaactcaacaaaccaatccttctaattccatggaagattggttttttaaaacgttgttgttgttgtcctctctcttccttttctattcaccaaaggccaaaccttcaatcagctgttgtgtaaagagaatgtaatgaaattttctgttaccatcggtgattgcttgaacgcagaagaaacaaaaatatgcaaaaatactaacctttttgaatgtgtttacatcaattctttggcgggtttgcgaattcaccggcatttgctgagataagtgtccttgccaaaagcaccaagcatactacaggctacttccaacaatttccctgtttgtttcaatcacaacagcaacacctttattaggtcaaagtcgtccatcacaatcactttctaatctctccattattgtcaccttgattataataatattttggatttctacttttcaaaaacctattaataaattatctaatattttaactaacaaaacatcttgaaggtaggaaacatgacaagatgctcacagccagctagtgcatgaccaaacaagcaaacacacacaaaagaacgcaacactttctttgattcttgcttgtgtttattagcatccaatattcatacaaatcttcactctcctaacatactattaatctctgtctcttgctcgcagttgacatattctgcacctagccattgacagaaaaggtggctcatattttccacggcatacgattggattactagatccatcttccattcttggaacactaattttgttcgaattactaaaatccatcttactttctcagaaccctaatcttgttcttactcaaacattcacaactgacaacactaccattatcatgatctcattgtgcctcggttatttacctaaaccaggaagccaattggatttgatcatacctaaacactagatcaatgtaccaaactattgctacttcattatctaaactttgccacacgcagaaaatcaatactaagcacacaatttgaggaacacacataaaagatcaaatgcaataaaaacaaaagcgtacctcttctcggctgaacaattttcttaaccggtttcttaaccgattcaacaacctcctcctcttgtggaaacaaaacaccgtcaatcccctgaaccgaaatccgaccgtccgtatagatatcaggatcaaacaaatacgccgacttctcaccgtcaccaaacttaacggaaccatcagcttccttagccgcaaccttatgaggaaaacgcaacgtatcgaacttcaccttcccaaatctcctaacagaattgtacatactctcctccgtttgatactcagggattatatggtagtatacgatctgctccggtgctcctggctcactcagctgatccgtggtcaatttcgccattgcttcatcgttaggagccaaaaccgttaacacatagccttctgacaccaaccgtcccatctctgtcgcgagtgacgtcagattcacgagaatatctgccatctcgttgtaaccgccgtaatgtaacagtgtatggatgaaatctttgacttgagcctcaccgtcgaagtggtgctgcttgcctccaggtcccggagctggtgccggagctagcgacggaccaggggccatagcggattggatcggaagagctggtggagatccggcgggtactggagctgcgggtttcttgagacggttggttctcgggtcaacttcaggagctccttcaggtaagacggcggagattgattgaaggctacgacggcgattgaaatcttcttgaacagagcgaggaatgagaagccgttcaatcccgtggatcaatccgtcgggtcgggtcaaatcatcgggtcggataatctcagctaaatcaaccatcttttttccttgtccgttgctcaaacggacctgatcgttccctagcgtgtggtgcttgacccgacccgattcttctgaaggccattggttcgacccgacccgattgggtataatgtggaacatgaggagtgtttgcagagatttgagattacctggctcgagcaagaaccgcttgaactcagggtcaaggtcacgctcaagagcttcattgcgaggagcaaaaatggtaatattgtgacgaccaacagcgtcttcaagtgtctgaaggagaagagctttctcgacgagctcagctagctcagtgtaacgagagtcaagaagagctacgaggacagagttggagttgatctgacccgacccggaagaaggagactggttcttggataatgcagatgcggcggagaagattaggacggagaagaagagaaagagatgaatgacggcggagccaccatagatgcggcgatccatggagctctctctctgtaagatccgattatcagaaagatggaacaataaattttctttattttttttggtgaaagagtttactttcttttctttaatttttcttgaagtgtcggcgatggcaagtggaagtgttaaagaaaaagagatgagtttggttgtgttgtctatgttgtgtagttttgggttttccgacttttcgaaccaggctggttatggggaccacaccaaattttataattgttgctgactttgcatgttttcacctctcgactcgactcggctcggccttggcttctacttcctcttattactctttctttatttcttttttggttttaagccaatgttcacaagaattatgtaattttggtgagaggaaataatgtgtgaatgactgaatgaataagtgtgatgatacttaacttgaaagtgaaattaggacaaggaaaaaggtgaaaagaggcatgtgagttatgatggaagcaaaagaaagaagctgagagaggaacgcgtggctctgtcggtttgggacgtaaacatccatctgtagagtttgtgaattgagtaaatgaccctcgtcggaaaacttacttccacgcgccatatttgtgcgtaaaggccacgctactaaacaagcatctattctgtcgtctagcatttttactaaaagagcgaatatcttgtttattataaccccacacagacacaagtataaccttttgtgggctcaaattgggcttttggcctgtttgtcttatttagcacatatagtagattgtagtcgtacagttaatgggttttgcaaaataaacattttcttagtgacgcaaattacaattgaatgaaaaaaaagtggcacttcaaaaatatatggatcacgtaaatcctataaatatcttctcgctttccacaacaaaagagatccggaaatattcaaaaatcacaagtccacctttctaattaaaaacaactagttcaatcttcaatatatagaggttttcagtgaacgtccctggaatctctccgtctttaatacttctccatctccatagctcacactattgcagattaggtcatggtctcatggactatcctcaaactgacctagaattcaacatttttatagtttctcctgctttttccatttcacgaccagtaaagtaatccaagccttgccttaatagcacaggttggttgctgctcgctcacgcctccaaacaaaaaaatagtttttcaactttttataattaattaattactagcatagttcattcattgttgaatcaatctccgggaacactttatttattcatgtgatattagtttggcatgaagattttaactctttatatgtcttaaatgaaggatatacagcgaccacatatttcgattgggttaggtttgcttatgtgatatgagggaggagtaaaaaggaatttaaatgtataggagtatttaatttttctttaccttaatgttgtggaaagacattttaagacaaaaaaaaattgcatgggattcaacgcatagcaaaatccatggagaattgtcttatcacagctccatttcatgtgtatgacaattgaaactaaacaaatctgtatttataaaaagagataaaagaggaaataaaagaagagtcaataaatatggagaggaaagtaatggttgtggtaggaactctgtgaaatcaatgtaaagggaaaaacaaatcaaaaggtcccccacataaaatcaaaaggtaaagaaagaaaaggacagtttacacgaagagtcacactgtactctggcctcacatgaaaccctaattacttaactttattcactttttttcactcaatgtcctttattattttaccacctgacctgactctctctctctctctctctctctctctctctctctctcaagccctagactgtcacacctattatagatagcttataccagctatattccatatcccacgcttcttccgaatctatttactggatcctgctctttatatgatcccaactaaagcacgtcttaatcaatacattttcaaatgttatagacttattatagtacaaaactagctaatctcaatacattataatggtatacggtatcaaaccactgtttttcttcacagtgattgatcctacttagactgttcaatatggcatgtatgccacgttcaaactcaaacaaatgtctttttcttttttttcagttcaatattatcatacatgtgatgtgaattcatagattattgtgtaacctagatatgcacataagattacgtacgttaccataagttttgatccaatacagttaacttagtccatgaatctatatgattcatgcacatgatttatatgccttataaatcatattcactttaaatgttaatcatactcactttaaatttgcttttgagtattatttgacttgtaaaatgatttgttttcgtatctccgaaaaagtggtgtacaagtgttgttggagtagagatcttcacctagtggacgtctacttgtacggctaaacataactacctagttcaaggaaacgattcctccaacaaagttggtttctgagcttctcaatctcaatcatcatcccaatagattccaaatgcttgcttagcttattcgactaagagaatacatagtctctagtttttagctatcatcaattctttactgtttatgtcacattgtatagtcacaattcaaaagatttgattgaaagccacagaaaaatcgaaaggtcacacttgaccattgcacaaaacacacattttatcaacattgatctccaattcacattggttttacattacacattgaatcaaatctacacttaaaaaaaaatcatcgcctaattgtttttgggagacgacgccgtttcagcttgagaaaggcttcgccagaaaccaccactgtaaaatctgctccacatctccttctccaacgcaatcacagcctcatcttcttcttcttcttcttcttcctcatctctgctctctaacgggtgaacagcgaattgagaactccctcctctaccaaactctcttccactctctacaaactcctttttcgctaatcgtttccgtcgtatacggcggattgcgcggcggcagagtccacgagggagcttgtatacagcgagtacgacgagattcacgacgctacaaggagcgcatagacataaggctgcacaactcgccgtcgtaccaccgcaacactcagccgtcgtagatcctccgccacatagagacggcgttgatagacttcgacggagactcggttgtttattcatattcagattttttttattaaccgaatctgagaatttcgagtcaaaaaaaacaaatgcagatagatttcacaaatcaatcaatcaaaaccataaaatctatcgatcctcctcgtctttgatcgccaagaaaatctcagaagaatctccgatgaaaaaatgaaagaaattgagaatccgaaaggatttgtttgaaatggagagtgagctattattaatgtttgtggtgtttaggcttttagtcttcttcttcactgtttgaggttaaaaagtcatagaaacgatttttgggtatctgttacggttacgttggctagtgtatagatgccgacgaccaccatggatcatatttatacatacaatttacctatgtggataaataaactattaagcattatttagtttctttgtgttacttctttaaaaaagatgataatattacacgtacaattgttcttgtttattcatttgtgtttgttgatatctagaactcaatcttgaataatattatcttatctttatgttttgactaatcattaactttcgtataaagataatatcaataccactagataattatcacaccagcattcttactagcactttatatctactactacttttggataatgcaaatacattttataaaaaaaataaaggctgtgtgatttggttaaccagttactaatcttataaaattatgtagatcctatggtaaattattggaaattttcataaattagacaaatttattaccaaatctcatacaacactatttaaaacattgataaaatataaaaaaaactttgaatattgactattgaccaataaactttattatttgactattaaatttgtgcaataaattaaatttaactttttacccacatcaaaacataacagtaaaagagaatgtggatttagacctttataagtcccatgaaaaagggcccattttataggtatccaaaacaggcccaattttctggaaaaaaaaaagaagaaacgatgccacgcgtttcacacctgtccctgtctctttctctcgcttttaatttttacttaacgacaaaggaaagaaagcatggagattgaaaacggaagccatttctagcaaaacaattctctcttttgtcttgaagataagtttcacaaaaaggtctgcttcgcctcttctacgacgttgcagaaactaagaagagatgggtcttctctccaacaggtttcgtcttcccctctttgattttctgagaactctttagttattctacttaacgatcatctcaagaaacttttgtatctttttgaacagaatcgatagatcgagtttgaaacctggagatcatatctactcctggaggactgcttacatctatgcccatcacggtatctattccaattcctttatctctctactaatgagtttgacaaaacttaggtattgtgtggatttaatcgatgaattaggatttatctttcgaacgagatcagttatcgaatcatgtaattgaagtgtctctagtatgatataatgcttaatccctatatagattccacatatgattactgtgttgctttattcccaaatgttgtgatcagagaatggtgtggaagctatgtccataatgctgctaatacttttgtgtgtaggcatctatgttggagatgatagagtcatccatttcactagacgaggccaagaagttggaaccgggactgttctagatctcatactagtcagctcaggtccatcccgaaaccacacccactgtccaacctgtgttccacctaacgaaggtcacggtgttgtttcctcatgccttaactgtttcctagccggtggtgtcttgtaccggtttgagtactcagtcaacgctgctcacttcctcgtcaaagccagaggaggaacttgcacactcgctgtcgctgaccctaatgagattgttgttcaccgggccaaacacctccttcaaaacggatttggatgttatgacgttttcaagaacaactgtgaggatttcgctatatattgcaaaaccgcattgctggttcttgagggaaggacaatgggacagagcggtcaggcggtttcgattataggtgggccgattgctgcggttttgtccacgccaatgcggcttctgactacaaacgtgtatgggatggctgctacagcgattggtgtgtattgtgcgagtagatacgctactgatatcggaatgagagctgacgtcgcgaaagttgaagcagaggacctcacaagaaggctgtcttcaggacttttccaagtacttgatcctccattggcagccatagctttaccaagcacgagttgataagcttaagcttcaccagcttatcccactgttgtattttctatttgtcccttagcttctataaatgttctaataagaacactccttgcacaattgatctcggtgtgattcaaacttatataattatgtacaataataggtaaaaaagggtaccagttactaaatcatagaagaaagaaaaatccagaggctacaaaatatatatggtttctgaaaaatcccaaatctttttacaaaactaaaaattgttgttgatacaatacaagagtatccttatttagtcataaaaacgacaacacttttgatcagattcgtaattgttgcaagcgattctctacttcagcttcgactttagccttatctgtctttttctttgctctacatttagctgcaagttcctcaatcttctacgtacttttggattggtctagttcatattctcggtaattgaagtttggtttgacttgccttgtggttcgattttatatgtttaccttcagatttatctcacttttgctcccatgggttcttaaggcatactagctccgatagtaacggtaaagaggctcaaaatgaacattagaagcaacaaatttcataatgtgggatacttataaagctaacatagcagctagttaatgtgaagagaagaccaaccacacattcataaaaaaacttgaaataacacaaaattgtttcaggagaaaacaaaataaaactagccaacatgattctcgccttcctctcgtctctatccatacttctacgacagtgccggacatttggttacacaagtaaaacagcatttatacatccgtcgttctctggattgtttgtcacttgagcgtattttcctgaagtcaaattgaagagagagttaagactctgaaatcaaaattatagtttgcactaaggttgtgtatattgtcacttaccccagacaacctttccagctggtgtaacaagaccaagctcactcacattgacctgaaaaatccattcgcatattgagttatttgcaactttagcataaatgacaacttaatacgtaaagatcttggggactaacctcgatgattgttcccctggtcatcacaccgagtgatgtatacatgggaccgttaggattcttcttaatcccgatgatctcgagacagaaagtgcattttagttcagggtgagtgacgtgggccttggtgaaacgaagaccagatggacggatgaaacgctcgtactttggaggcttccttgtgaaagcaggtccaacaaatgtagcttttgtaaccatccgcttccattgtttagctgtaataagggaaagcattttcagtatttgtaagaacctattcaacactaataaaaccaatccacaaagcaaactcaatctagtctagagtcatttccttaatcaatagctctatatgatgataagtgtttaaacaaagacatagagtgataacaaaacaaacaagtagctatatctggattagaaagtaaatacatacttttcctttttccagatcggatcactctaaacatttcatcttcagcaactggacggacctgtaaaaggacagggcttgaatttaagctttgcccatttgttagagttcaaacactgaaggaatacaaaagcagagagagagatttcacctttggaagagggacctcccatttgccagctttctctttcctcttttgtttaatggtgttgctaagaacctacacccaaaaacacacacttgttaatgtaatgccgtcaccaagttacagaattatagatatctcaacttgaaaagaaaaaacaaacaaaccttggcacgagtggtgtcttcacgatcaagaagataagcaggaacagctccttcctgaacattctcatcagccttacgccttgatgatgactcttcatgcattttcaatctgttatgacaaaaataaaaatcaaaccaatgtaagattctcataaaaccacacctattaacttaggaatatccaatcaattatactacttaacatctttcacttaatgatagattctcagagaatacgacgaaacacttacgttttcttcatgagagctttctcagcatagtttttcttagcaatcatcttacccttgatacctagagactgcaattagagcaaaagcagaagaagaatcagtaaaaggaagctaaaaatggaagaagacgaaggagaagaaagtaagaaccttttgagccatggtggagtgcttgtgaacttcacgcgcctccttcttgcgctttctctcgaagtggtcgaggcgatatccattcctcttcctgtgcaaatctatgtaatctccctgaggctgtttttcatccaccaatagaagaaaccacagaaattgttagagatcaaaacgctcaagctgttatatctgagaaacgaaagctgtaagaagaaaaaaaaggtactccggcggcggagaacgtaccatggttgcttctaagcgatcagacggtgagataaaaagagagagagacggaaattggacggagagagatactcagagcctgcgagctagggttttataaacgggtcgaatatttgggtcttactaatataatgggctttcttgtcaatattaatgggctaaatcattcttaaaagcccatcacttcagatggtagaataaatgatgactttttcgagaactttgactcttggattagtaactatgtagtttactgcaaaatccaataaaccagagttgtttggtggcgaaatgaatcatatgttgaacatttagccaacccatggtggtgcagtggttttaagatttactggttaggaaagtcgtagttcaaatcttctcgttgcagtttaaaagaaggttggcttctggaaccaagcgttatggatgcttggttaatgtagaaaacctttttcatgtgaagaagcgtatcacagttttgaagatatatgtctttttcacttcaattaaactctaaaccaaaattctacaaaattgtcatcaaaattggtgctttctcaaacaaccaagctaagtcgtatcttttgcatcctttataaagagagcacaaatcattttatgttacagttgtagaacttaattacgcgagtaagcttttggacgcaatcctaagtcgctctcccgcaattttcatcatatgctttccttctacagtcaagctcgtgcttcgtgaggactacacatttaagaggtaaaacttatcagcacatgtgttatgcagtttgcaataatgataagagattggagaaaatgatacctgcaacgtgataacgttctgaagaatcaaatcgatctcgggcttgaatgacgatattatcttcctaactttgacgtcgttgtgcatcagcaggatcacagagataatgcattgtatcatattcaatgagtttcgaccgctctccctgtcttgtaccgattctagcgcttttgtgttttcactaatcattgatcgcattcttatcagaacctgttctgtgagtttggagctccgattgaacaagaaatagcaaggtactaaatagtagagacatgtttgtatgtaaaggtaagagttctccttatcctctggtatacactgcaagaagagcgtaagagatgtgtcaatcccaagattataatgaaacatttaggaccctgcaaagtttttaaaggggaaatgcttacattgactatgttgatcatatatcccggtaagaactcacttagagtggttacactcctttcagaaagtgtggtaggggtagagtccaacacgcagatcatcctgagtatggcacacccattatccaacgcaggcttcaaaacctacaccaagaagaacaaaatctccttaagtatatgcagtgctattaaatgagaatgttattatccatttagatataagcattatcaaaagacaaacttactatttgttcgagtaaaactttctctacaatctgaaggacaagagaactatcacccatttctgacaaacatgagcacacaagctttgtaacttctttaaatgtgccacaatatgtctcccgttcattacactctatcgatgactgcagtttctctgcatgcacataaagccacaaggtaagctatcacaaaacataaaaagtatgattatctctcaaataagctcacaccaaaacaaattacaaaaatgtaataaaaagttcaaaagttttttcttaagctcaaaagagaaaaaaaaaatcttgcagatacctgggacaactttgaaacgtgcaattaaggtgataaggaagctaaaatgatctgtaatctggatatatccagctctataggcagtgtgaagaatttccactatccgatacaacacagctggttcaagttgtggatctgcaatttacgttgagtcaggtcaattacccttttcttgcattttattataaacagaagccacttttaatgttgaataaaagcatcaggaaataaaaagtgatactcacataaacagcatgaaactattgctttcatcataggggagctgaatttgtctgtggtgaagtagtaaaggaaacagagagccagttcttgggcttcccgagggagacttgcaaaaggtccaccaggtacatcacctgtacaatttaaacgatgaagaaaccaagaagccctatttcagtgtagtgacactaagaatctaataacacgttttttgttttgcagcaagaattgcaccttctccctgacaaaggctgaagaagtttctgatgtcatcttcacaggtgggggaagcattcagacacccaactcgcccaaggtcgagtaagagttgcaacacaacctgaagttaatttcaaaataagtataaatgagaaacggagaagtgatcttatttgaccaaaaaagggtccatgtactaaagattttttttgccttgaatgatcaaggattactggattgaaaatgaactgtatgtcatgtgttagcacctgagtagatacgggatgctcattacccaactgattaagcagcgatggaagtttgttgacccaagcaacctggtagtaatgtaccgttggatcacttgcattgggataaaggatatctccattctgcagataaagaagtagaatcagagtttaatgtgagtaaaaagttagaatcgggttgaaacagtcagccaatatctggacagtatatatcatgaaaaaattacttacagggataatcatgtctctaacagttgaaatgcaggctaatttgagtttagactctggtttgcaatcgctgaaggtaatagtaaatgcctgaaaatatataaacgtaataccaacagtcatatataaatatagatgatgatactgctagtgctagctatcaaaggaactgagctagtatatattctcctgcctagctgaaattactctaagaatcttagacgaacctccagaagattatctctccaatcacggtctaccctcagaataagttttggaagaaagggcaagagtgcaagtaaagtcttttcgtgaatatctttacgaagcctaatgctcctggtgatctgcaaaataaatgttcgcaaatcccagtgagaatttttttcctcttctagatttgcaaggaaattagcagtttatcagatataatgaagatagagggacggaaaaaacattacaagtaaacaactaatcagcttgcgttgatatattgatgtaaagtatgagaactaaccttgcctagtagtgtattctcaataaattccagatatctattggaaagatcagtaggaaggtggctccattcacttacttccaaaaagatttctgtcaatacactgttgagtttaaagtacttatcatcaccctgtcaacaaacattttaactagtgttaggcagtttgatataaaaataagcaaagcataacatataatcataggaagaatacaaacaacggcggggggaactcttgatagaagagtaatattattttactaggcagggataaccactatcaaaataactactaaacctaggctattattaatcatctactctctagcgttgtgattcatacctttccataaagattgttttctggatcgaggggaaatgaaccaagtaacttttttaacagcatcgatgcaatgtcctgatccaatatcatcagagtaacttcttcagatgcaggtcgccatgcagtctgtctttgcttgtgcctacgaatggaaaacttgattgcataacctatgctgcgaagtatatgttgtatgcaatcaaatgaatgtgcatcgaatcctcgcggagcatgaatcaatggaatgaaatcttggaaacaattgattaagactgcaacaacctccttcaatctctgatagacatgggcataacctgtaagaatccgtagaaacttggtcaggatactgtaaacttgtcaatatatatagtttaatgccacgagaaattaatcaatgtgtacaatcatatcatccagaaaatcaaatctaagtggcgacattgctacatccaaaaccataagattataaattgtggggagagacaacaggagaaaaacttgaagcctatggaattttaaataagcaacagttacttatttcttcaaagctttccatagacaactagagaggaagagtggaaaggaaaacggactagttgtacagttgcaaagtgcataaattcaagaaaacatgatacaagctatataccaataacttattgatgagaaaagaagacagatgacacatacgaacacaatcttttgtagcatcttgctcataggtgagtagtgtttcattctgtgaaggtccctacagaagaaaataagggcatgtacaaagaaacagttagaaaagggaaaacagagcacattcccagagtggttaggcgagtactacaaatcaaagacatcttattacatacacaaggatctcataagacagtgcatttattcaaggaaacttgatgtcagatgttatctatatttaaaaatacaagtctctccgagaggtagatattttattatatggttccctcacatttaaagatatcactaaattatgtatagtagttcttctaacaagctagacaccaaaagaacaacatccccaaaattcgtcgtggcatgtacgaaacaagaattttggagtcattcggagtgaaagtgattatatacctttttttgtgatttggtgtcgctctcatcacatggcaaaaccgagaggcaatgtgacaacccagaaagagccacctttagcttgcttttatcttccacataaaaatgatttttctgtataatatccttgtagttttcgagaatctgcatatagtcgcagatgaaatttcaggggacatcttgcaagactaataggtatagacagaaatactacaggcagaagttggaaatgtaacagtctctgtcattatccaaaaaaacaaagtagacaccttttcagcatccaaggaaaaggtaggcgggtagaactccacaacaaggtggaaaaatttgaaagccatcaaacgaacatcaatagctgaatgagccatagcgctaaatatgtatggcatcaaaagtgacaccataaggccctggttatcctgaatatattcacacatcgaaacggcatgttagatacaacagtaaactagaaaagacatgatcatatcaatatttgcaagtttaaaaagagtatgcataaccagcagactagaaaccataataatttcaaattcacatcttgcagctgataatatgaaaggggactaacacaacaaactaagagaaaccaatgtaagcggaaccagtaagaataacgatgaaataacaagtagaaaaagaaacaatccatacctctttacaaagaggaaagatgtcaatatcaaatagttgataaaaaacatctctcactagcttatcatcatcactaatgcgttccctgagtttctgtatgatagcatatttatgtgactgtagctcttctggatgattcttgaaaaggtctttgataccatacaatgcatctacacagacaaaaacaaaaattgatccacatcatattttcctcaaccgaaaaaaacatgagcaagaataaaaaaaagaagtacctttgcgaactttggcattgtgatgagaagtctgtggcagaagttccttcaaagtcaagcctttcttacttgtagctaagccactcttttcagcagccacactttgctcaggaagtataattgctgcaacataaacaaaagtaaattccaaccataagcagagaggagagaagaagtttgaatagcagaagaaagcagatacctttggatttaatctcagtgttggttgcattctttggtggtggtaattttctcccgagctttctcttaattttctgccaaacaaaacaaaaatccttagaccaatatatcaaacacgtgaagaagaagattcatggaagctcgaagagaggaacgcaccttgaaatcaattcctttcttttgctgcttctttgcaggagccttggagcgaaccatttgttatatatcttatagagagctacgtactaaaaacccagaagcaattcaaattagcttctcctggagcttagagataaacaatctcgctgaagtataaactcaatcaagaagattctcacaaatacctaataacggagacacaggaggtggcggaagaacggaaacaatctcgctgaagtataaactcaatcaatacggagttggattaaaccggtttagatgctttaaatcaaatcggcaaaacgacgccattttgtggtggtgctgaggaaaaaaaggaaccggcaacagattttaatttttaagagaggaaaaagcaaaaccacataggatttaagctaagataccactacgtcttgaatgctcattggtccaaaatgaacaaaaagaagaaaaaaaatactctcttaaaaatgctctttttttttctaagaatcagtggactcttaaccattggaagaattttttgctaaatgtgtaaagccacataggatttaaggtcatttgaataaacagatggtgtgcaaagtttttgatttatccaaaaaattgcatctaaaattttcagattgatgatttagaactaggtgataattaatttttttccgaacgcttatttcaaaggagtcctctcgaactatcagtatcagcataatgttgtaatttatgggtaaattaattatttattaatgtggtaatttagttcgtgaatttaattcgtgaggatttatatatagcatcaaactacaagatcaatgtctgagattcatgaatttttatttttgatgagattcaagagaaaccagtataatgaattgattgatttgcttctaatcagtattcacttggtgaatctttgtgcacattcaatccttagacgagttcatggaatccttttcttcatccacaaaataagggttgaattgctttatgacatgctcataaacaggtctcttgaaatatacagcctgtcagaaaaagaatgaatgaatgagaaggccaacaaatttcaagcacacacaaacacaataataatttaaagccaaaacctatcactcacatgttcaataacttgttccggtagcatccacgaccacaccttaaactctggttttgcagtaccgtctccaaggagatttatctcttcttccttgcccgtgaacttaaagagaaacctgtattagataatcatcatgaagaattatttagatccttaaatttgcagctttaagatacttttcacagatatatgagactgtatgcttagttgttaccacttctgagcttggcctttgtaacttgttcgccatttccggtttagtttgtcctttacttctcggggaaaatcataggtcagccagtttggtatctagagacgtttaaaatagtcaaaagctcagtttggtgatacacagagcaattcaaactctaatccaaaaaccatggaaatgatgaaaggaatcttattgaaatataatttactatgagagagagatgtcaaaagcgtgcctccgcaatgaattctgccgaagtaacccctgtttcttctctcagttctctaaaggcagcgttcctcaaatcttctccctcatcagcaccaccctgtaaaagcagatttaataaaaacctatggccaaaattgataccctaaaggatcataaactggtgaatctacagcctaagctacttctcaggattgtcaatgcatttggtttttactttgtaatttcaaatgaacaattccctaaactatgcaattcaacacctctttagcaacaaaggtaaaaacgatatcactcaatacactacaaaggagctgttgttttggtgagaagtgagaactaagctctccaaagcaatcaaaactacttagacaccgaaagcctatataataaacccattttgtaataaaatagagcttatgagagattcacctgaggcatctgccatgtatccggaatgtgaatctttgacgccgtaaaaatctgcaaaaccaaaaccatttcaaatccaaatcaagtggacaaattcttccaaatcacataaagcgatgagagaggaaggagaagaagaaagaagttacctttctacatgggctaacgagacaaatcccaacattcttccggtaaccaacaggcggagactcaactgttcttgccggcgacgataaggcaacggataaaacgaccagtggctttggtgaagatacagaaaactgtttcaagcatgaaaatttcacaggaaacgaagagaaatctagatgaacagagattgctgatttcccaatgaatccagaagccttcacggccatggcgcacgacggcaacttcttaggcggctgcctctccttcgtccggctcagaacaatcggtgattggtttcaattttctcactagtgataaaatatattattacgacactacccttacccgcttagacattaaacgatatcgtttcagatccctagggtcaaaactacgataaaaaaaagagaagtcaacgtgaatgcttgtattgggcccatttctcccttaactcgtaacccaaaaggccattgagctattgtcccaaataaaagcccaattaattataacaagaaaacgtagaatttaaatgattgacacttgcaaataatatattccaaaagtaacttaaggaaataaaatgaactcatacattactaaaaaatgcttaaatttataaatgttctgatcttcgcaatacttaaaaagtcactttttcatgataatgcaacataaaatttaacggcaaatcaatatatataatatcacaacgagttaatacttaatacagaaacaaatcaaatacaaccattatcacaaattatatcatttttgatcttatgatattagttaccaaaaaaaaaaatagttactccaacattaattactccatattactctaatatctttaccaatcacacccataagtattcgtaataattcattaccaaaacattatacttacagtaccatactttctatactttatcgttattaaaataacttttctacaaagactatatagaaaagatatctttatctttttatatcttttctacaagtacttttatctttatatacacttcttctatataaaggtcacggagagtattttaagattctcactttctctctaccaccaaacctcccacaccaccgtcaccggagctatgacctcaaaagactgtggctctcacgacagccactcatcatgcaaccgtaaaatagtgatctggacgatatcaataatcctcctcttaatccttgtcgtaattctcctagtttgggcaatccttcaaccatcgaaaccacgcttcgtcctccaagacgccaccgtcttcaacttcaacgtctccggcaatccaccgaacctcctcacctcaaatttccaattcactctctcctctcgtaaccctaacgacaagatcggtatctactacgaccgtcttgacgtctacgcttcttaccggagccaacagatcactttgccgagtcccatgcttaccacttatcaaggacacaaagaagtcaacgtttggtctcctttcgtcggtggatactccgttcctgtggctccgtacaacgctttctatctcgatcaggaccattcaagtggcgcgatcatgttgatgcttcatctcgacggtcgagttcgttggaaagtcggatccttcatcaccggaaaatatcatctccacgttagatgtcatgcgcttatcaacttcgggagtagtgctgccggagttatcgtcggaaagtacatgctcaccgaaacttgtagtgttagtgtttgacaaattaagaggtacttaacggtgacggtggtatcggtcacggattttttcattattaataacgtaatatattttatatataatctcgtagtagttaagttttataactttttttttcctacgtcatagagaaataatatcaagaattgcaatcggttgcgttattgttatgacgagctgtaaaagattcaaaggaaacactaaaatatagtaaaagacaaaaaaaaaggtttatttttatttcagttggtaacaatttatgatggatgattcaattaaaaactgttttctatataatgataataatgtatattctcttgtttcattgactatgattttgtgctgatccagagtgacgacaattgaattttagaaatatctgatcggaacggtaaccatttgtacggtgtcattatctatagtatcttgtctttttttctttttctaaaacagaatcaagacccattctcatatagtttttcaatttcccattaaagtttagatcttaaagttggctctttacaacagttcagtacattcaaaggaaaaactcttgatcaaatctatattcctaatatattggttagtttgtctcctaaatattcttggatcttgaaatgataaaaagtagaatcatgttgcttattttacaagaaatagggtatttttctccaacgttcgaatcccacgaatattctatattatgtattttttgggttaataatgaagtcatcttataaccaactgcttcgactaattttgcctcttttgttaagagatttgtaggcgtaattctcaatctggaatccactttctccaagagagaaaacttgcgaaatgattcattacatgtgctattgttattatattcgatatgtatatgtatttcagaaagaagtccaatgtgagaacattcaaaatgtacataagagcgaggtccaatttgagcataacgtacgcaatttgttcgttagattcgtcaccaacaaatatttgatgtgtttgtgaacgattttttatgcaattttttaatcttagtcccatttatctactaactcccacgtgttttgtttcctttgtacatatacacgctgccgaatccagtttgtatataaacataattttaattgaaaatcttcgaaacattgtactgaaaatttgccatacgtaatctaggtaattgatcagcatgatgagaaactttacgcccatcaatccatgaatatacaatcctagtttggaaccgaagttatactgtaaaaaagcagatgataaaaacacacaattgtctacataaccttccctttttgcctttttgaagtcatacattttattaagcgtgtaaatgatcaagacttgaatatatacataaagattcgattttgttcatctagagaaattcataaccaaaacatagaataaacattcataaccaaaggataacgtaagtaaaatgaatcatggagttgtatcattggtccactggttaacacgatacagtttcgactttcgagtcgtattgtattccagattttaacaatgattaacaacacaaaattatggtgacaaccaccaaattagaattagtaatagattacatgaaaagtataccctatatgttacttccttagatatatgtccatttaaactttagtggacatctattcaacgcaatttctcaataatttattcggatgaatatcggaattgagtagatagggatcggtcgtcggttcctccattttcaaaaccctaagaacaaccaaagtcttcatcatttatttgtccaattccaatgatctatttcgtccaaacggctaagattgaaggagtcttcgtgaaatatttgttgtctaatttagtttaatgttttatcaccacacacattgacaccgcattaaactctaacaagtttttcaaacacgtttgttcatcaccaggtttttctttaaaattattgtgtattacttatcatatacaatgaaaattattgttataccgtataacacataaaaatttcttaaactacattgactactttaataaataaataaaacacattacatctcatattataagaatactttttttagttgttacatttgtttttataaatcctccatagttgttttaaagtttaatatgattgagttgcgatctagtattattattctttattaaatatgcttgacctttctcattgaagaaagatgtaaacatttgaaagcatggcttcacctaatcttcctttcaattacaggtcacatcatccaactctaaacaccaacctcccttagttttccttgcttttagcattataacattaacaagtctttgcaatgtttaattttctttgaatttgagaaatctttcacattaaacattttcattaattgataattaattaaataacctttatcagtagaactgttctcatagttataaaataaacatttggaaaaccccacctcagtttcaacttgcaacctatagatcaaagttatttcatttcatcatgttatatatataatgtcgaaattcttgaccgggactggtttgtctttttctaactttgtataggcttattgatattttggccacattttctatttttgttctcaaaagtctttcgtcaagtttaagaaacaatggctatattagagcagtcgcttttggggaagtttctcggaagcttagttacattgtaaaaatgactattcacaattcacaaactaactaccgcactaagtatcatcacattctcacatgtcttatataataaaagaatatataaataaatatctacatatggatattcttgtatgcgatcggcactaacctcattaatcaccaaatcatgtatatatggattcaagaaataatctcattaagcttaaccaaagtatacatagtcaaattgaagaagaaaccatatagtaaaatttaagaaacaatctttaatgtatatcaaactgttaatcctaaatatctaataacaatctcgcaagtaacctctacttaaatcaaattttcatcgaacaatattaaaccgacgcgtcacctttgactttgaaaaaacaaaaccgcgtcaaattaaatcgttttatctaatacacgttatctctacagtgtatatatattacggcctcttcttcttcacttcaaatcatatttactttttcaaaatcttatcacaaaccaaaaaaaactttctttcaaaatcgttctctgaggcattttaacgaacagatggcggacttaaacggtgcgtattacggaccatcgattccaccgccgaagaaagtctctcacagccacggcagacgcggcggtggatgcggttgtttaggtgactgtcttggctgctgcggctgctgtatcttaagcgtcatcttcaacatcctcataaccatagccgtcttattaggcatagctgctctaatcatctggctcattttcagacccaacgctatcaaattccacgtcaccgacgctaaactcaccgaattcacactcgacccaaccaacaacctccgatacaatctcgatctcaatttcacaatccgtaaccctaaccgccggatcggtgtttactatgatgaaatcgaagtcagaggatactacggtgatcagcgattcggtatgagtaacaacatctcgaagttttaccagggacataagaacacgacggtggttggaactaaactcgtgggacagcaattggtgctgcttgacggcggagagaggaaggatttgaacgaggatgtgaattctcagatctataggatcgatgccaagctgagacttaagattaggtttaagtttgggttgatcaagtcgtggaggttcaagcccaagatcaagtgcgatctcaaggttcctcttacctctaattcaaccagcgggtttgtttttcagccgaccaagtgtgacgttgacttttgattgctagtcaagagtcaatgctattatagtcttcttcgagttcatcatattacacttgtttattgattcttattttagattgttttgctttattatcttccatacatatcgttggagagagatatttttcttatgtaatgttttattgtatggttccatgtaaataaataatcacattttgtttaatgctaataactatacaattagcattatgattgtctcatgaagcattgatccaagtatcaaaaatgcggaatcttctgctttcccactgatccattttgtgtttgtagaatgagaacaagcaacattgtacccatggaggatttcttggcactttctccatctcttcacctcccaacaatctattcagcttcttgactagagcctcttcatcagattcgtcacacccgaaaaacttttcctgtaaaaagatatacagatataagtattagacaatccttcaatgaacactaataattaatcgtgttttacttaccccttcatcagcatatagagaagcatggattctggcggttgcatcttctagtatagctaccaatttgatatttccgttgatatcacggagttttctgacgtctcggggatacacttgtatgaaccgaacaacacacctgaatttagcagtcacctgcataataagcatcagtaaaacatcaattcaagaaagttttcactatactcttttcctacaacttatgataaatccaaggtttttggatacattacattgtgataggtcaggatgtccatcagagaaacaaatggagcatcgtcatgggcaacccctagaaaagattaaaccataagtattatattaaacgttatgtcaaatttccacaattccaaacaattagctggttattacctgtgatttcagaatgtgaacgactaatgcaacgcgcgattgggttccatctcggtgaaaacttctccccacacattctgaaatggtaagaaagtgtgttttaaactgaagaacaaacggacgaagcagaacatcaactcacaggataagaaaaggtgtcagcagaaacctttgaggactaaaggcttccatctctctgctcattgtgtactgcatctttgtagagggagtaaaagtggcgttccataatcccatatttacttgaaagaaaaggttcagaagcttcacgtgttgaccaggttgaagacagtgaatggcctgcttctcactaactctatctactatgatcctcaaaacggaaccaaaagtaggaaacttacgtaacatgtatgtaggcaacatctcgggttctacacataaaggaagcctttctgacctattatgattgcaaacaaaaacagagtgagatgagtaacacgtttgggatatatgaccaaaatctagtaaatgaatataagacgcataagagaaacttatttttactcgttgtattttggttgaggaaattcagacttacttaaccaagatgttgcagggtggcatctcagttccatcccaaacaaagaggtaccatctatctttatagaccttggaaatgtgaacaatcttcaaaggaaacaaacaatgagaaacaatgtcaaagacatagcagaccataaaagacacttacagttccataaatacaaatgaacatgaaaagtaaaaccaaaacatattcttttaaggaatgatcaatctacctggcaagataggtttgaacattcgccttctttgatatctttcagggatgtgaaacagcatgaccctatcataaaacaaaacaaaacaaaacctcacaacaatcgcaacttaccaccaagacatagaacacattagagataaagtacgaagcaaacatttgcatatagagatttcagtgaataagtagaattcattagaaatgatattgcatcataattaccatcttcaaacttgtacgtgatcatccattctctcagattcgataagaagttcttatcctgttctctcatcaggaatttaggtgaggactggtaaggtatagaatccacgctatgtttcccattgaataaagcaaaagacgaagaggttgtttcattgcagagagctgtgattttccggttaatcagcacaatctgagtttaaacccagaagaaaactgtttaacaacaaaatcagcaaaagccacgaagaattgatcttctcatatcagaggaatagtgtgtcaacctttacacgtgaaagtaagatgatatctccgatcgattcaacacgaggaaggtctcgaatggtacgagcgacgaacttaacgggaaggccagatcccgaataccatggatcaacgattttgagcgtacatgaacaatctgcgacaaatttcgagcagtcggaagtatgaaaaaacgaagctatgatgaaatgaaatagcaaaaaaggattttgggagaggatcacgataccagagccattggagaatcctagctcaacgatgactccaatgaggttaacatgaagatgcaatgctttgaaagcgtcttgaattctcaggaatttgtagtcatctcttctctcctcctccatgtctctgatcgttggggttttgcaagggtttgaaggaaatcgacaacggcgatggatgcgatgactcggccggtgccactccggtgaatcttgctgagtcgtttaggagctctcgtaactcaaatgggtcttaaaggcccaataataatgattaatgggccgccgctaccaagttgctcattaagaagaaaaaaaaaatctatgatatgagtttcatacaattggatgtttggaggttttcgtaacttaaatgggtcttaaaagctcaataagagtgattactttactaggccctcagctgaaattctggctatgcaaagtaaaatttcttaaacattataataatcttttttcgaaattactaactaattgtatagtttctttgggtatagaaatatatatttttttgtctaaaacaatcctttttagaattactaatctattgaatgatttttttatataatatgtttacatatgagtcgtgacaaaatctttaatcaatattgtatcattttcttgcgatgtttttgcatatgtcaaaatctgtatcaagaaatatgacattgatcattttagttagcaactttaaaactaacttttatataataatatggttcgaaagaaaattagcaagaagatggaagataattagaagcaatgaagtatcttaaacttgttaatgaaattataaaaacaacgaagtatctttcgttttattaaccaataattaaatctaagtgatcaaagatagatggtatgcgttttctttctaattttatatgtatcaccagctcatacaatctctctgatcatcgtgatatcttaacgaaagcgacttcgatatacttattttaaggtctttcgatcttgtttaataattagtaacatataaatattgacattattcgtaacctaaaatccaacataagttcgacagttatgcaaaccataagtttagatacttgatgttggcaaaaaaaaaaaaatggcagcatccaagccttggattccaagtctttcataagaaatctttacgaggatacatacattatcactgtctaattatgaatttatgattttgagttatgacttatgtcttacttggttaaaacaaaatcatccgtggactagcctacttgaaaaactaaggtagaaaggtataggattcaatctgtattgttaacctataattgtactctaatggtttgcgttgctttggtcttcaagtaaaagaagcatcatccaaattaatttgatgcgacgtaaaaaagggtttagtcaaaggatgcgatgtaaggatcatccaaattagttgtatgattacatcagctaacagctgtttatctattcaacaattaataaatatatgtggaaactaaaatatatatccttttactaatgaaaaaaatctatccttgcactacgtaaatacgtaattgtagatgggtttttcgtaaataatggtgatctaatactaatttttcatatccgttatgcattgtcggtttatatacatacatacacataaatatttggtgacaaaaaatataagtgtgacaaaccataaatatattattatttacaatgtaggtgtgaaatgtgatcaagggactattgctttagagggtggaaatttgataaagacgtgaagaactagattagagtgattacgagacacctcaccagactctaaatcaattatagaaataaaattgataatatggtttctattccgagtactctgattagccaaaaaaagaaagaaaacatacagtattagtctaatataatctgtagtcgagatttttcgattatgggtcattgaagcttggagttccggaatgtcttgcgacttttgttagtgatcacgcttctcaatcattccaacttttcctgacattttcttcgtaatcaaattaatagtatatggttccagtgcaaatctaaactttcttcttgactccaagtttcaaaaccgcaaatgaaaagaatcgaaaaatcccaaagtttgttttaacttattatttgactatccattatctatctagaccaaaattgttaaaaaggaaccaaatcgaaaccaaatcagatcactgagacaactagctataacttataaatataaatgtctaaacctcgattagaaaactaaccacctctttcttcttcgtgtggttgtcaaatctacaacgtgtaccgtagattaatatattaaatgagcaaattacattgacttcttttctaagagtttgatgatcactggaaaagtgaatactttctgtcgtagaattatgttactctgctacacacaagaagtttttcttaattattattacggtacaagttttacgctctggatcgcaaaaatagtaagttttaggtcatctaattttttgtcaaaaaaaaaagaaggttatctaatttaatacttcggatggacattattggaaaagtgaaatgttcaaatgaaaacatgatccatgaatctggttgtattgaaccaaaatctgatacatatagttttagtaagatagacactagctaatagtttgagaaaaattgaattgttcaaagaaaaacatgatccatgaatccagttagtcgtgaactaatcagataacacaatctgaacagatcttccaacctgtgttagatctaatctaatctttccacacaaaaataaataagtattagaagatcatattataaatcgcggccgtatacagacataaaatgacttttcaaacaaatctattataatacaatcttaatttgtaataacaccatattataataaaaatgttatatagaaagtttgctgtataaataagatataaatatatgtaagccgtgttttagctagttttagagagtatccatggaatattcaaactacaaattaaataatacaaaaaaagttagtaacttaattcttcgcaagatgagaacacaaaataaaataaaatatagatagaatagtagtaataattaataaaagggggcagggcatgggaatcgcatttgcatttatattctcccacttctcctctatatatatatataaatactaacacaattccaaagtgtggtctcattcatcataataatcatagaattttcaactttttaagctctagatagagagagagagagagagagacaaagtaacaaagagaaagagagagaaatatggaagagacaaaatcgagattcaagaggatctgtgtcttctgtggaagcagttccggcaaaaaaccttcataccaagaagctgccattcaattgggtaacgagttggtaagttctctcttcaactttttctctactcactaacatatatatgtatatttaatagtttatatattacattcattttcactactcaacacaaaagtaacttattaatcatcttgttgtgtcatttgtaaatacttcgcttttttagatttctcgttttggatagtttgtttgatacaaaaggctgattgattcaaaactttatgatggtatataatatgaactcaaaaatgaagatttgatttgagatacgaattcagaatcttctttgaaacattggctattatgtggttttgattgtgtgttgcaacgaacaatgatgaatctaccaaacgtgtggatgctgattttcaattttttactttgtgaaatcgaatttgtgttatggtttaatgttattggcatgagagagagggatgagaaaatagtgatttctactatgcttagctgtaacccgcctgtcactcgagcagcactcttgcatgacctcttttttttagataattttttgtattttcagtgatttacattattacacacatatatcttgttttttccatgagtctgaggtttcatatgatttttcttaaacctaaaacttaagtttccaagtataaaccaatgattttgtttacgggaaagataaataataatgacagtttttgtattgcctcgaggggcaatgaaaaccaacaaaaatgttcgttggaagaataatgactctatgtacaaagcgtgtgttgtggggtgtacttctcttcaaacgacactaaattgtttgaataaataaaataatttgaagaaccctcttctgattgatctgtaggtaataataatagtattaataggatggtgacaattgaaattaggattgatgatgatgatgatgagctatttttttgtttttccttttctcttaattgagatttgatatttgatgtggttgcttctttttggggtcgattgtggatttgggtttgtgacacgtgttcattttcatcatgaaaactctgttatcataaataatgcaatataataataataataatgaaagaaattgatggtggaaatgtggttgaaggtggagagaaggattgatttggtatacggaggtggtagcgtggggcttatgggtctcgtctctcaagctgttcatcatggtggtcgccatgttctagggtttgttctctctctctttctatgtatctatttatatgatgatgtatttgctagggaagtaagctataaatcatcattgtgtttcaaacatttgaccgttgattatgactatctacatgatggctattaacctattgtttttgtcgcatagaatttgataagttgattaatcttctttggttatatgaagagatacttgagtttcattagagaggtaacataacaacgacaaaaaaggatctgtgcatgtttcctttgtccaaaactgtctctttgctttttaaattattttactaaactcaagctacaactagttttattatctgtgtttgtttgttctatcagagaatctcgtttcaatgacctatctataccaaaatagccaattttcatatttctttctagttaattgtagattgaaatccataccagttttgttttatatacatcattcttaaccggtatattcacttatctcttgtagggtcattccaaaaaccttgatgccaagagaggtatgcaccaaataaagctctattgaatgaaatatcaattttgttggacttggtattatatatatagtattattgagatagaaattgccttgtaatgatctacataaaatagtggtaggaccaaaaaaggaatgattgagacttggagcgttttttggtttccttcacgatacatctccttgaccaactaatatttttatatgttaaacccacaataaaaagaccatgcaatataatatgtaagatgttttgcggtgttcacattttagaggcaataataaataaagatacctaaaagttatgttaataataatttgtagataactggtgagaccatcggagaagttaaagccgtggccgatatgcatcaaaggaaagctgaaatggctcgccaagccgacgcattcattgcccttcctggtttgtaatccaattctttatatgtaataaaagtataaaactcatttcctttagaaaaatggataagatctaaatatgtcgaatgaatctattggtaaattgttaggtgggtatggtacgttagaagaattgctggaagtcattacatgggctcaactcggtatccaccgtaagccggtacgtaatcagggaaattaaaaaatttcgtttaacttttacggattatataattcattttaaagtatgatatatgagcttacattattgttatgagttacgaccggaatatgcgtgttggatatatttttctcatatttaaaaccttaaaaagaatttatattcatataatgtgtggtttaatttgactgaatgaagaagatacaaatggttgcatatgttacgtcggaataatcacatggaacaagattccttttgggattctttatacctcttaaacttttttggtactattctcattttaaattaaaatgtacatattctaagagcatgtaatattatgatatatgcattgaatataaaaaacgatgtgttgtcacgacgtacgactacataacccctgattgtgagaccggaagcttcccatgtcgtaatctttcttttatactatttaaagatatttggtttctaacattatttttggtcaataatttttgacaggtgggtcttcttaacgtggatggttactacaactcgctgttaacgtttattgataaggctgtggacgaaggatttatatccccaatggctcgtcgaatcatcgtctcagctccaaacgctaaagagttggttcgacaactcgaggtatatttcgagcctcatattcgtgccaatataagacattcgatacatggttcatttgttgatggtacgtactctaaaaatgatgttataggaatatgaaccggagtttgatgagataacatcaaaattggtttgggatgaagtggaccggataagttatgtaccgggttcggaggtagctaccgctacgtaaggatgtattatggggagtttattttttggtaaaagcagtgtacagcggaaattaagttgtttaacatcagaaggtaagggcggaaagaagacaaaagaaagtattggggtcgttttgataaacattattttgtaggggtggtttaaatgtgtgaagtggataaaccatgtgggtaactgctaaccgcgtatataccaaaccctatcactccccacttgtctttgtacattttggtttaatggaaaaaaaggatagggctattttcaagaaatgacaaaacgatccttttcttttggttattttctgattttatccataacttctagtttttaacttttttctcgtgtcaaaggtatcagatttttatttaaccagaaaattatcatgtacgatattttttaattaatccgagtggagaatattccgagtaataccacaacataattttgttgtcggctacagatggagattagcttaatgagcactcaagtttattaaacaaatcaatcagatagttatctaattccagggagctgtgacctcacatgatatttttctaatttattttttgcaatggtcaaaatactctgcctctttgcattattataaactatttacacaagtgaaagacataaatattggcaaaagaaaagaaggatttctttatttttgattcaatttaaggagaatcacatagcagaaacaggagaaagatgagatagatacaaaggttctttggctaaaaataacaactctgctccaactttgaaaagacgaataaaacaactctgattgctaattttcaccaaacatgtgttcaatcttagcctctagatagctgaaaagtattctttgctgagcttggggtcaggtttcattgatttctcccctggcttccatcccgcagggcacacttcatccgggttttcttgaacatactgtaatgcctgcaagacaacatcacaagaagcaacaaataacgcatctaaaccctaaacctcaaaaacaaatctctctttatctatctatctcaatgatgtgatttttctctttattacctggagggttctcattgtctcatcaacacttcggccaataccgaggttgttgatggtggaatgctgaatgactccttccttgtctatgatgaaaagccctctcagtgcaatgccctgtacttatatattagcaaaatgctttgattcaaagtggctatacgttacttgaaagaacacaagtggattggactcaatgcaagtatgatgcaactatgtcagaagaaatcgtttacctgatcagggatgagcactccaaacgattttgaaatggatttagtgatatccgaaacaagaggataattcagatcaccgagccctcccgactttctgtctgtttggacccacgcaagatgcgagaactacatgaacatggaatcaaacgttccattatccaaaagaaaacgttccattcgattatcagactgccacttgccaaggttctgagtacatcaaatacttgaaaccatttttcaaaatgctgagaccagaatgttctttcttggttcaggtggagaaataaaaatttgacttaccacactgtcgacagagacccctaatacttcggtgtttagcttctcaaattcttcataacggtcactgaaggcagtaatctctagaataagcaaagaaaaattggaaatttcagtgactatgagggcgagagtttcagttttgaagctatttccttagcagaatactaaccagtggggcagacaaaagtgaagtccaaagggtagaagaatagaataacatactttttgccaatgtactcagagagcttcacctgaaaccatgattcataggtcgattactatcagaacattgctctactgcattgaccttagcttatgacacttaactaactaacatgttaaataaggtttgaatggaatgaaagtacctttatgaactcttgatcaaaaactgcctcagcttcaaaatcaggcgccttattaccgaccagtggtaaatcatcctgcattcataaaacatataaacactagtcagtcatcgatcatcgaattgtttaaccacacaaaatgttctttaactggtgttcactatctatgcagggctcaaaagatttctgtgtatgagccaaatgtgaatcatattaattaatttcagatcatttcctcccatccctaattaaacccgaaagaagggtaacaaaaatgtcgctcaattcaaatcgcagaactctaaaaagtttaaagtttagtcttttatccaatgatctcaaaacccttaagagataagaagcaggaaaatagtacggatcccattataacaagctaacgaattcatacaacaatcatagtgaatgagaagatggagcaaatacaagaaatttatggcattgcgagtcaacttacagcctgagccttgacggcgaagttccggcgtgaggcggagcggttggtggtgagggaaccgagactggagaacccggaacagagagaagaggatgatgccgaggaagagggtatgattctggggaaagagacggtaggagataaaagagaagacttggagggaagaagaaccctagaggaagagagtagggtggtggaagaagaagaagctatagacgccattgacattgactctgttctctctctctatctctctgtgattggttacttaaaaaagaggtcttgtggtttggtttgaggatgaggtggataaacgtgagggcgtgagagagacgaatcggatagagaaaccaaatagctgctcttctagatttttcagacaagaagaaagaagtggaatgttcgatgaaccggaacgacaccgtgttgatgatcatactttgataattaaatcaaaatctatttttaggctggttggatttccgaatatatttccatctaatcttcacatcaaaaatagtaatcaatccttaaattttgtaatttgcctactatcttccattccaatcataataattaagaaaatacaaataaagtaaacgtatctctttactaattaatacaacacaagatagtgacaaatgtacatatcatagagatcaataattggacctccttccttactttaaacactcgcaaaacccaatcagccacaaactcacaaacaaaccaaacaaaaaaaaagaagaagaaagactatggagattccgccgtcacaatctccggcgactcaactccgccgtacaaaatccatatccaacatgacgactctaactcctccagaagttcctttcgacatagcttcaacgccgccgtcttcgttcgattacgagctcatctccgtaaaaccatcctctttcgtagcttacacttctctcagagatatcatctcttctccgattaactcttcactcaatttaccgtcgatcaacggtagctgctctcctgttatatccaccgccgccggagatatctcgattcgtaaccgtctcgttaagcaagctgctttgtcttatcttcaaccaacggtgcttacttcgtcagatgattctgctggttctcaattcttccgccgcgtttggcttcacttatccgccgggtttcagttcttgcgacgtgtgtttgattggatttttcaatcgtttcgtgttcctttgattgtcaaataaactttgatttggtgagaaaattggatttttcatgaattgaattgtatacaataaagtgttacaatattcaaaacatatcaaaggaaaaatctttttttttttgttcgtctgtggtcaatttgaagtcatgtgaaactccggttaaccggcggtttaaaaacccggttattgagattgtggcttagagtagtatagcaggcaccttctaacggagaaacattaaagaagttcttgtttgttgttgatcttttgactttgattggtttttattctgtagacaaaggaagtgatggatttggtgagagtgctctgatgcagtaaagcttgaggatgtatatgtttgttttgaataccttatagatggtgaattgttgttgcaattgcttgaagatttggaggctccagtggaagatacattgcagtagttgagcaattactaaatgtcctcttatctttaagacagagattccttgatcgatgtcagattcatgttttgacatgtatggacatagtagcttctcgtagacatagctaagtccctgttagaaaccaagagaagaagattggtcgttttgtgaatctaagaatgagaatgaattctcattagatttttattgcattgtactgtagttagtacctgtgatttcgggtaacataagtagatgagaagagcgattttgatctctccgtagagtggtaacctgcggatagatgagatgaatcagaaggtttcatacaataaagaagcatatgatggagatttgaagtttgacatataagtactaaccatgatacaatgatgtctcctatcctttcgaaaacagtaagaagagccaccaagatcctacaaatcaaattcggatttttgataagatggttatgagaataagatacccttatccaaaaaaggaatcttctttattaacaattagtaagctttaccaatattggcaccagtatctaagttcgtgaatctcaagctttttcttttccacgcttttgtagcatccatatgcagggtacgcgtaacccacaagcaatctgcaaattttccagaaaatctaagagaaagaagaacgaaaatgcctaaatataaaaccagatgaaggaaagacgagagagaaagagggtctaacattatgattcttgtgatgaaatctccgagcatctttgcatcaactaacagactttagggttagagtcttgaatcaaacccgaaatccggataaactggttcattaagagcatatataagagaaaccaaattaggtttctgaaaagtttcaggaaaactgcaaatgagagaaagagagatagttaaatcggagaaatgattacaggaaatgggagagaagagaagcaaaaggtttagtttgagattgcttcaaaaagacgcttcttttataatttagtactatcttttagagaaagcctcagtgaacgttgcattccttgggatgccgaatttgttttttgtttattatgccaaaccgttgtaaccgtttcgggtcaaactctacctgaattattgtatatgcatatactttttttcttcaattatatataggtgagaaaaatggatcaccaaactaaaaatttatcatcattgtaagctacagtttccctgtatttaaaatttagacgtgaagatataggcccgatgttttcagacgaaaaaataaagacaagataaaggcccaattaaaagcccaaaacgaatgttctgcttatcattgcttagaaactaaaataaactgaatcctgatttgattaaagcagtcaaacaaactacatttaacagattacaagaactaaatatgtgcactgaatactgatgttagttgaaaatatattgaacattagttggagaactgttgtcgcttattgtgagactgattatctcatcaattccaggttagaactcatatctgtaacaatgtaatattaattctaacaatgtctacttctttatgcgaacaataagtttaagactgtactttcgttcagattattgccaacgaatcttaaaatcctttaaataaagtttgacgattaatgacaatactataaattaataacaacaattttcatgtgtttaattttctgacagtattgctccctatataaattgatatgaaagatgtcagcgagacttagaaaaaaataggagatacaaagaaaaaatatcgaagcttaaatgtgtactgcactcacaataaagaataggcatcatcataagatttcaactactcaagtttaaatgcatttatagaagcaataactagttaattaactagaaaaaacaaatatagaaattaaaactatgacatacctctttaaagcttggccaaatctctttcgttttttttttctatgtgtgttatgttagttggaaagacgttaaggatcatcttaattcttaaacaataatttttgaaagctaaataaagcttatataggcctcgggcaacatccggcaaattcaaaatagtataaaatgcataccttcgacatgtataagatgatcataacttgtagttgtagtctagttgtttgtattaatgtcatgcatggttgagttgcgattcatgttcacatccgtttgttgtatatgttatgttatcgagaaagaaaagtgtttaaaatgttgataactggatctggaaacctaattttcttagatatacgattgtgactaatcctgatatgtaatgctcatggacaccgaattgtgtgggctaagactttcgtacgtggactgatggtcgaatacgtatctcactaattattaattaattaataacatttgtaactctcatagattagatatgcatgtatctaacatatctaagagtcagagaacccgtcataaattaagctagcaatggacatcacaagacatggtggtcaaattcaaagtagggatgggttttgcatgcttttttcgtattttgtgaacgtgcaattgcatgcgaaaatagttttgccttgtgtatttgttgatctaattcctcttggtcctcaaatatctttggtgggcctcttccttacaaatgggcccacaccaaatctactactcctcttgtctctctccctcgaaacgccaatttatctactctctttccatcactcatggctactcgtcgtcaatgatgaaatacatacatatacttctctaatatccaacatgaatatgattgagagacttactcagtagatggaactatagtagttttaacatgcaagaactgatcacacaacaattctctaactcaaaatttaactgtaagtctcgtagatatcaatatatatatcgaggaattataaaccgaaattctctaggaactcttttcacaaacgttatatcacatcaagaaactaataaaaaaaaagtgtaatagactttggttgatgtcaattccaataacctaaaagatgttaaatactatctagctggtttggttcaatgtggggttataaattattaactctgtgaaggtagaacgttaatcaaagagaaccggcgataattgagagaaaaggagaggtaggaagcaggaattgaataagggaacatggagctttgaaagatgagattgctaaaattggaaagcggcaacagaaaggtggcatttagtgaatgataagaagagaaatggagttcttttaaagacatgccaagtagtgtaataactaaaaaaaaaaagagaaagaaaataaattcgtagcatcatcatgatcatgattcatgataataataattatttctttctttctttctttgaagaggtgagcgagaaagagcaatgaaggtggaattaaattcgtatttataatctgacgtaacgctcattacaattctcaactgtctcaattactattgcatttatattttggttttaatgatctctaaatcttaacattttgaacagctgttatcaaaacatatttttataaaattttcaagcaccttcctctgtttttattcatttttaattttaatgctctgaactactttcctctttgatttttaaccagctttcattattatttttcacttcattgtgtacttcttcgtcggcaaattttttttttaacagatcgttataattttcttttatataatctatgttttcatgtttagaaaaaagcacatagattagatttttatcactttttttgctctgaattgttttgccatttgcaaacccattttctaaatttgtctgctactgtcttttaaccaaccatgcaattgctgaggacaaaatcttgttatggattcttttgcagggaaaggaaaaaaatcagtttttaggcctgtgattagctacaaactctgaagactttttgaatgagcagagatctatctcgagttaacataaaacaaaattatatatatataaataaaaacaggagaatttcgagtttgtgtgtatgagtttgtggggtcaaatgttactatgtgggaccaataagtagttcttgtctgatctctaaccatttttgattttaccattctttctatcttctgaactgctttatcaacaagtacaaggaatctatatagttttctctccagctttttctggggatcaggatcaagctatatctttcacaagtcaattttttagatcttccttttcgtgatgtgtaagcaatctctctgctacgctaagaatgtctacttttgttatagtcgtacacacaaaacctctattttctttttacaaacacatccaaaaaacagagatgccctagaaacagagcatccgaaacagagtatgagaaattagatagagtagaggaatacgaagacaatgacacatgttttcacatatatttaaaaattcttcttccattagagaactcaaatggtagaaaaatgttgagagaaaagaaaaagaaaagttagtgctattcgcgctccactctttttgaaaattttcttgaatagggaaaccctaatttccttctcctaccttcttctccgggttttagagtggagcgtgattagcactactctcataaaaacaacagctacattcgcaaaaaaacgaaagaaaaataaataacataaagaaggaacaggattttgattttactggtccttcatcagttccttcgagtcttgcgaccagaggaagcagcggctgcgtttgcgttggcgtttgtggcgttttcatggaggaaatcaagaagaacggtgcttttgcatttagggcatttagggtcgtcttctgagagcataacgtacatgagacaacgaggacatccgacaagaaccatcgaggtagtctctggacttgtcgagtatctcacagatggctcgtcctggttcatctccgacgagacgcatgagcttggaggtgaggtcggtgaagtcgtcgctgagcggcttggagatcgaaccatcctcctctggcttgacgtaggcggcgagagattcaacttcagttccagctttggacttcttcgactcatctaaattggattaagtttggttcagaccaagaagagagattgttataagtgaaagtgagtttggtcggagaaaataccttgaaacctacggtttgagaaggaggttttctgtgatctcaaagactggttacttgtatcacaaagaagagtcttcttctaccaaaaaaaaagaagagtcttctctcttattaccactggtggttggattgcttgagcttaggcctttatatacaagaaagaacacagagagaaaattaaaggaggagatagatagatttttcattaaggcttaatttaattatgagtgagaaaggactgtgtgagagagagagaatcataaagattgaattgaagtatactactactagacgatacatactatcagattgcgttaattgatttaatttttgcctcaagagtatcgaattctaattacttttttcaacttcaaaccagtaatttaaatttcttaaatgtattttaataaatacacaagaaaatctgtagatatttgcaggaatccaattcattgcttattaaataggaggaggaaaagaacaagagaggtgtttaatggctaatacacagaaatcaaattaaatactcaacagaacaaccattatttatttttattttcttcataggagttaatatatggaaccaagaaattaaatgggcaaccaacttgaattagatgtttataataaaagttgaaattggaagaagaagaagaaaaatcataatttcgaaagtaaaaaatgtacagtcaaagaaattaaattgaaattaaagaaacacaaacaaaattaaatggcaacacaccagaattggtacagagaacccaaatacaatgcaaatatataaagtgaaccacctcctggccttagttttattatgagagggggacaaaagaataaattttcagtttccaaaactacccatgactcttttcttaaatctctaaattgcatttctattactatatttttggcttgttgaaattttggggacaaggaagaagttgaggatgatacgagacttggaactaagtaataaaccccatgaagtattccaagtgggtccaaggtttggtggtcaaattttgtagttgtttatgaataaccagtcatatgggtggatctaattaagctctcaattatgtctatcagttagatatcaaatcatttgattgattataggagtttcactatacaactacaacctaaaccaatagtttggagaaatctaaaagatttgattgtgtttctaaagtttgttgtgctactgttctcagtctctagatggtagattgtgactggcttgggttgtttataaactttgacatttgagttaaagcaagaaaaaaacaaaatacaaaggaagttatggttgattttttttttttttttgaaagaatgtggttgactgtttttttcccgtttaaattgatcatttctgtttcacaaatgaaaattcatcatttctggaactcgagtgtagttgataaaaatattataagttttaacggttaaaggagaaagaacactagactcatgctatcatcagcctactaacatttcattttcttataaccagaaagcgttgttgcagtacatacccatgtctttgagcctctatacacattattattagtgctggattccatcttctttcgatgataggtgacttaatttgaaaaaatcataaaacttgttaattgatctaagggagatctaacaaatcatgtttttcttctagttttttattctatagataaagatactaaaaatcattttctaatagatagacatttttaaaataccatagtttttgtttgataaataaaattaccataggttaagcacgaaccattttcaaatatgtgttagtttatttgttgtacgggtttataatggagtatgtttttcacctagtgatttatatttgagttttgaaacttcgacaggacgtaaagtgactacataatatagcagttactcaaaggtcaaaatcaaaagattgtatactactacttatatatactatttcgtagacgaatgtacatgcatagcgtataggtgtcttaattggaggagaaagaggatttgattaattgggtattaatgttaatcacattcagatgattataaataaaaaacacaaaataattatagatataacgatgccaaggttagtaatggctatacactacaaaattacttagcctcacaccgaaagcaatttactaatatttgcagcgtcacttaatttcccatgtgaagttatttaatgaaatttggaagaacgtttattatttcacttgtttaataaatagtagtataaattaggatctactactattttttctttcttcacaactttatgataacatttttataatcgtaagaatacggatatatatatccaactgctagtattatgaaagttgacaacattacaattaattccatttaaataaatttaataccatgtttggctggatttatacaattaatgttaggcccgtatgtatgaaatcttaagagtattaaatgaaaaatcagaaggtgatcgacttttaaatcaactagtttagcatgattaaactaactacatacacatcttttcgctatacatgtaaagtaacttaattatgctaatactattgttgtattgttatctaattcagtttcgtataatacatgtcattattgaatatgtggggaaagcgggagaaggaatttgtgtttacggttccgatgggaccaatttttattttgtttttgttttgtttatgtcttagcttacccttcttcctcgtaaatctacttctttgttctttggtcccatcctgttatctttctgttttggcccaaaataatctgacttttaagttaaataaaaagaagcttcgaattctttataatccaagtggctaagtcaaactattgtacattaataaaaagttaatagattacaaatataatcataaatgtgtaaactggttagtgaatggtactgtatacttatttttctaccgaggtttttgttttaagaaatttttatagtttgacattaccatcaaataaaaatcatggttcgacacgacaataacattagtacaaactattaaataacaaacccaaatcatgttcagattttgtttccgtacgttaattagaaatgagtttgtaaaatactatatataattctaagaaaataagcaaagcgagcattaacaattcggctcctttcaataaattgggtacccttaattgcaccaactaatgtgcaacttgatatcacatgcatcaaagatcatactatcattgtgaagatcgtatgtatctttcaacacaaggacataaaaacaaattttctcaacagtttttttttctttctatggcatgttaattagatatcaaaccgctaagcataggtattctctctcttttttttttcattaacaatattaggtataccagttaagcaacttaattgactttcatcgcccatcatctcacattggctataaaaaaatcatttagttgacttgtcgaattaataacattcgtgtaaacgacgtgggcacacttacaaacactaatgcttacttgtttttttttggatggttagttggttactaatgctgactttagggtttagttatatacttattccccttgaaaaaaggttacttgttaaaacctcactcctcgcgtcaaccaaagaaaaataaaaaaaccaaacgtaatttcaccaaaaaaatacaaatgtaaatgttataattcgagtcgaactttgatttggttctagtaaatcattaacatagtactgaatttttaagtttacgtacgttcatgcatttcatcttttttgccataagcccaacacaaaacatatacaggactattggttgtaactttacttaccaccagtgaagatatggctctctcgcacatcagccactacttaaagcattagcttaaggtcaaattatccaatatattttaacctaaatataaaatcaagatatcttccatattcaacgaaacgcgagatgttaataatttatatagaaccatatgttgacaattatgcatatggaagtacttaaattacgatgcgtggaaattggatcagtgaggatcataaagatagaaacgataacaacggatctatttcatgtggtgtagtaaaacaccaaaactcttaaataatcaaaagtcaaaacatgtaatgaagattgagaaagtaatttacatagaattaacattttgagtttcctaataaataaataaaaacatttttgagttttgagtttgtttcacttcagttcgatttgaatagttaaatccatcttcttttttttgtttgggcatagaaaagttaaatccatctaagaattataattccttggatttttgtatgatgccaaacctcatagacttcaagtaaaaaataaaattaacaataaccttttgctagatttgaccatacgtatattggaatgctatttgaaataactagtgcttgattatttgaagtttgtttttccaagtttattgatcaatgtcaaatggatctacatacactgagttgagttttcatgagtttttctacatatactgaaattagaacaatttggatttggcacaaaatactcattaagtaaaattttcatgagtttttggcttcttctattttttttgtctgtcctattttttgcagactctggtcttcccataaatgtccaagttattgagtccagcaattagtgccacacttaagtataatgataaaaatacaagaaaataaatataaaccaaatgtcatgacttggctatacatacttgatgtacttcaaaaaggaccactcttctttgatttctccatcaaagtacagaatcaagtgtagtgcttagaaagaggggctacggtattagattgatcaagaatctggatttacagttgaagcctatggaggattagtgagtagaagcatcaacctgcacacacataccaagatgtgattcagaatacagtactgatgatcaagtagagtgaaaccttttaacttcaagcaaatatgtacttcccttcattatatctctggccagcttataaaagttctcaactacctcttaaatctcttctaatatattgaaatctctaaagtaaaaggtcgagagtcgagacagcaagcaaaacactcgtgaaacatgatgaatgtagtagctgataaactaacaatgaaattcatatggaaaattcattttaataagcctggcccatataataatttagaaaccatgcgcgtattgtgtcttaatcatatccagtatctcctagtgcatcatattagttggaaacttaattctagccatccaccatatctaaagcctaaatgaataggtaattccaagattcatcaatcgaaactgttaagtcgatgaatgcttctaatcatgcatctttactaggggaaaaacaatgtacctgtaaaaatggactaaacacctgttaccagcagctgatcaagctcggtttctagctccgttaactcaacctgattttcatttctgcattgtagcaactgcctccttagatctcggaccagctcgtttaacttctgaattttcttttcttgaaatagaattttctgccacaaatagacattcatatcatcattagatcatacaatgaagcgtatccttaggcaatcaaattgcttagtaaagttaactaatagggcaagatttcagattaggtatgctttttgtttctgcgaatgcatcacttggaagaatcaaagtgatgggatgaaattagaaactagcttcttttgctttcctaagactatactcaacaatacacaaaactgaacacgttttcagcaacaatcatttcacaaaggttttgacaagaaacatgaagaagcaatcagatttagagtgctaagtgagggactttgttttaacatctaaagaaactaagcaagtcactaaaaacggaatgcgtcacagaaaaagcattggacaagtaagtgtcagtttaagaacccaactccttccttaggttcatatacacaacaattttaattccaccaaaatcaataaaaaacaaacctttacttgtacagattctttgccttgagggatatgttgttgctctttatctgaaagaatcagaggacgactactagtctcactttcattctcaacttgttcattccactcaaactgagaagtcaacacaatgaacataagaacaaacaaaagcacccacgatctcgtcattttgcaggtaaagtggtcttttatttgatctgctacataacaaaacaccaaataccacaactcaaaatcacaaactaacaagtgtagaaaaggatccaaatcacaaagtaatctttgaacattctatttacaagaagtgtaggaaaggattaaactttcacattccaaaaccttattttttatttatgagtcaagccaagaagattcctgaagatttctgcttccatggttccaaattaataacaaatccagaagaacaattcagtgctccaaattaaacatgacaaacgagcttagcaacaaagtcataaaacagagcaggacaaataaaaatcaccaaaaaaattcagaccagaactatagattcgataagaacaaagacgattagcaaaaattaaggtttatacatattttagcactcaccagtcgaaatctgaaagcatgaatctagtttttgcctagaaggagacgaaaagtaaataataacatagctagcaacatgtatactatttcacatttttttgagtttctaagccaatcagaaggctctatttcgtacccactcgcacaaagagcgctttgagcgagtgagagcgattctgtgggtaaacccctttccaattcatgcctttttttatcaacgcacttctctccaaaatctccatcgcgtgacttttttttttccacaaaacaaatgaaaccgaaccgaaaccagtttttatttcaaaaccaatgcaaaccgaaccgaatcagcaaatagggtgaagcaacaattctgggcagtaattttctgcactttccatgacttttcaacatcctaccaacgagaaaaagagaaaacaccacaactcaaaatcacaaactatggagtatagaaaaatatccaaaaatcatagtaatctttgaccattacaagaagtataggaaaggattaaacttttaaattccaaaaatctcagaatcaaagctaagaagaatcctgaagatttctacttccatggcatccaatagaggaagaaggacaatttactgcttcaattaaacatgaaaaacgactgaaagagcttaagctttactagttttagtaaaatttctcggcaacaaagtcaaaacagacatagacacataaaaaatgataccaaaaaagaactgtatattcgacaagaacaaggacgatttgcaataagtaaggtttatacagattagactcactagttgaaatctgaaagcatgaatcttgaatcttgaatcttgttgtgagctcttcgtgtttgcctccttttattatctttcttattttctgttctttgtgtggattcaactcgcaacttttatatttcactctgctgcttcgagatccacccattaaaaagtatttaaaccgaaatgaagattagtgagccttcatgggccttcgtgggctttgacctgggtttagtgtttaaagcccatttcctctttatggtcgtgtacttgagaagaaatcttttcttcttctctgtaaacaatccatcgaaagatcatcaaaaaaatcatcttcttcctcaatttcttctgattcctcctctctttcttctacttctcaccaaatttctgttagttctctgataagtacatttcgtgcttatcaaatacttatattttaaggggttgaagttgtaattttgaagaagttgaagatcaatcaaaaataatagaagaacagagacgacgaaacgaaaccagccggagaactgagcagagaaaaacccccggcgagaatgggaaattcgaattcgtcttctgttgatcatcgcttcatttctgcttccaggtattcatcggaaccaatctccctttcactccctaagttctaaattggaaatcgatcttatcaattgtgtgtttgtgttttgttgcagagcttttactcagaagaagctcgatgatctcaaatctctcttcgtctccctcgcttccaattctcagagcaatgaccaatacgtctcgtaccctgttttccaggttttgacgatttctgtgttctgttcttatctggtttctattgtctgataatttaaattcagcctgtcggatttcgattgtcacaggagtattttggtctgagtggttctttaggagaaaggatgtttgatatggtcactcaacgcaggaaagatgataaaatgacttatgaagatcttgttattgctaaggtacactcaagtctttttatcctcttaatcatttggtttcttcttctgcgtttttgaagatcttataatgcagatttcaataggactataatttctaggactcgatttagaatttgagagattcttgtgttgaactcaattcttattgctttttaggcaacatacgagaaaggaactgacgatgagattgctgagtttatttaccagactttggatgttaatggcaatggggtcttgtcaaggtatccatcttgtgggttcaagttgcttctgtgatccaagtttcattacctgttttgttgtatgtccattactcggtctcttgatccacttaagaacatatttggatagaaactcaattgagattcttagattagatggggtcattctatgaatgtgacacattctagtatgtcttcaggtctgatttagagtcgttcctggtggtgattttgaagagtgtgttctccactgagagttctgatgcggaatcaagtgattacaagaagatggtggatgcgctactcaatgccgctactttctcaaaatctgatgatggttctgaaaaaggaatgtcttttgaagacttcagaagctggtgctcattcgttccaactatcagaaagttcctcggaagcttgcttatgcccccgagtacaggtttattctttgtcttctctcatcttaactcttttcttgttaacaaaattggtaaacattttccttttttcacttttttatatcctctgaaccttgttatatagtgagacctggatatcaagtcccgcatctgctatatgaagatagtgtgagttcagataggctactattaaagaaggaatacgcttggcatattggaggagctcttcctcaccatgagcttgtagagtggaagctgttgtatcacagttccgtacacggtcaaagcttcaacacattcctcggacacacatcgtgagtgtttctcaacagtaacataacatcatttaaacttgactgagtagaatcaagacagaatttgtgtgtataggcttgtaagctaacgtaagatatcttgcagaaacactggtatgtcggcatctgtgctaatcatcaaagacacagaaggatatgtgtatggagggtacgcctctcaaccttgggagaggtacagcgatttctatggagacatgaagtcttttcttttccagcttaaccctaaagcagccatttaccgaccaactggagcaaacaccaacattcaatgggtatggcctctacagacactctgttacttctacatatgagaatgtgattataagcatattctaatataagttcactcggtcgggcagtgtgctactaatttcacatcggagaacattccgaatgggataggatttggaggtaagataaatcactttggcctgtttatatcagcaagcttcgatcaaggccagacattcgaatgcacaacgtttggtagcccgagcctttccaagacgagcagaattcagccagaagtgatagaatgctggggaatcgttcaggcctcaaatgaacaagacaccaaacataacgccatgaaaggtactgttctggagaggtttaaggaagatcgcaacatgctcaaactagtcggcatggcaggcaattcaaatgattgaatagagaatttaggttctgagattcaatcttagatatacactcaacgttcgtatacattgtgagagtgagtgtgcaaaaacattatgtacaataaagagtgttgtatgattcataccatttccatttcacttgaatcacatcaaaattcgagaaagtgtttaaatatggtgaaatggaagggcaaaatcgtattattgctgtggctttagaattagaaaattgtacaaagcccaatcctaaatatttttgaaatgcccaattaagtgtttgaagattctatgaatgacccattaagtgtttgacgattctgggaatggcccaatcaagtgtttgaacatccaagagcaaacatttttgtaaaaaaaacaacaatattaccagttctatcaagtttaaatttaacaaatttgttggattgataaaaaaaaatgtaccaaaatgttattcaagtcagaaactcaaggatttgattttttttctaagaaagatcttttaaaaactagactctgcaatttagtaagttgaaagacatcggtgtctatatcaattcaaggatatgatacacaaaccattaaagtcatcttaatatttgttaagacaatattcaatataatattttgtaatgttctttacttcttttttattctggtaaaatttgttttcactactaattaggtgtgtaacatgaactgtctctagatattggaatttgtttccatcttaagtgcactaaattaaaaatataaatttggaaattattgttgttggggctacactctctaagtctaagatatcggctgcatacaactttagtctgtggaacagtgcagatcaaaaattattatatatttgattataagaagaagaagaaaattataaaagaaaaagaaaaaaactgtggtcctctcactcattcaggccagttttgtttagaaataaaaagaaaatacagcaagggctttggtcccctgcttaggagctatcaatatcttagtcaataagttttttcacacatatctatgattctatatctacatatgcaaatgcagcaaattatattgttctcagatactcaatgctcttttaagtatatctatagactcttttgttttaagttcacttttgatgcaattcattttaatacctttacaacctaagaacatgagttgaaacttatattaagtgctagtgatacatcaaaaaccgaatattttttagtaaaccatatttgtgattcaaattttgaaatcatgatagtgaaatgatttgaatcaccgtgaacagttcaaccgctaaagaactatgatatagagttacatgttctagattcaaaatttctgacccaatatattcaaaaacataactaactatcacccaaaatagatagtttaatactttataaaggacctattatctatatttatacaaaagaatacacacttggaaagtacaagtacttcatctaaaccaaaggatatagaatcttaaaatattatactatacctatagtacatcaattacctcgattgcagtcgacgtacctataacctatttgtataacgcaagatatatgccattggtttcaacttgaatgataagccaattacaagtgaatcctctatttatattattgtatttcgaaagtactcactcataacgaaatcacgaacaactaaaagggaacaatttgtggacaaagaacaggagggaacacaatttgaagaagaaaataaagagatgatgctattttactagggaaccgagaaaatatcatgaatgtataggaataataagaatataaaaattgcaacttacccgaagctcagtgaagcttctcgcaccactttccaaaaataacaaagaaaggttgtcgttttgagacatttaaataaagaaacttgcagattatagaaaccctctacgatttacaacgcagataccgctcctgcccccttttttatttttcttcgagggagcattttatatgtactacgtttatatgtgtgtaacaatttggttgtattcaatatagtttgtgtgtaacagtttgctcatataataatatatacggtttcattagtacatttcacgtaccaccaagaaaatttattgcttgaaaaacttagaatcatatcgccgattatatgtagccgtaattatgtattttatgcatatttataggattcattgcaagagcgctaaagttattcaaaatgtggaatcatgaaacaacgcccctaatcgcagcagtcatgttgacaaaagaaaaataacatgttactaatatgttaagacttttgagcactcgtttttgtatagtcaatataaacgaatataaaacatgttgaaattcgacaaaacaaaaacagattgtaaaacacatatctttgaatttgttcacttaatcatgcagccttccttagcaaaaaaaaaatcatgcagcctttgaattggatatatatcctcgtataaaataggatttagatacaaaagttgatcttgaatacatcaacttaattagctaggttattggagagcatataacatgattaagccttcattatttattgccaaaaataatatataacctcccattttttcccttcgtttcaaattcataaccaaaacaatcatttgtgacaaaagaatcatatttttttttccatcaaattgtataggattagaaagaccaggaaaaaaaaatgagaagaagaaatcatgttctatcatctatgagactatttatgaccaatatagcgaaagaaaaaaaaagacagtatatacaagaacccaagaacctcttctgtcattggagaggaaatgaccctaacatgtgcgatattactatattgaaaatttaaaagagaacttcttatacataaaagtttaaaattacttgtagaaaaggacataaataaaataacaaagtgtgtttaattgatgcagacgtacatgcgaaaaaggtgtctcgaaatcgacctggaaatgatgtggcctttgtccattactcaatctttttgcaacactaattcaatcattatttgctgaagaagacatgtcttagctatggaacaaattccgaaactatgtcacaagcataattacaatcccggacccggtgaagaaaaacaccaaaatgagcatccgtacctgatttttaagattggattagagcaggacatccaaactaatgtcacaagacacaagcataatatcatcacattttgtgctttcgtggagtggcgatcgatatatgtactacttccttttgcgtttaagtgattttaagtgctcttgatttgataagttgaagtgggaagtcatactccacaaatctctcataaatttatgatacatgacatattaattaattttatcaaattttgcatgctaaccaaatattaaagtaaatctcagtgattatatattttttatattagatatgacacattataaaaggaaaaagtaggaatctaggcattattctaaaactccaacaaaaaaacccatggtatttctgttgaaaacttggaatacttaagaaatttaattagaataacgacagagatctgtgaggagaggattgaaacacgaaaacaagaggaaataatatctttgttgttttctctgtgtttacacatatccaatggtacactccaaatcttatcccataattgtatttgaaaaaacccaaactttctatttatactttatcatttgctattttatgagtttatatatatatatatatatatatatatatatatttataatctctttagatggtcctctttacttgaagcgaagttggcccacagtcagcaatgaattttcattttattctttcacgaaagcttcataagaaaaagaatatatacatagacacatgaataattatagattatttaaagttctgcctttttttggttaagtttttttgtttttgttagacggataaaaaatcaaagaatgtctatgtaaattgtggaattcatatcttaataatattttattgaaattaagaaaaatataaacgtctaaacaccaataatggtgtccagcaatcacgtgacaaatttatcataatttgttttacaaatgaaagataatcctactatattatttggaaagtacattttaaatataaccttaatttttgtaaataattacataaatatgctattagaaataaaattttaaagaataaattaatttatctctttaaagattaaaaagtcaaatactaatttaattaattaaatttaattaaaaacgaaatctattattaatttctaaaaataataaccaatcaaaatcaacatataagatttgatatctaaattttaattaatttaatttaattagaaaaacaaaatacattattaatttccaaaaaagtaatcagttaaaatcaacaaattatgtttgatatcttaattaacatattaattttttattaattattatagttcacttctcatctttatatgattctatttttgcggaaaaataatatcatcattataaaaaaaaattagagttttttggcatatgccataatttgaatttttaaaaacaaatataaactattcaatacataaaaaaatattataacggtgaaaaatagatttaagaaaactttctactgagtaacgggtcataatttgaaatatttatattcaatttcatacatattatattgaaaatttataatttatatatattagaataattaataacatattagatgtgattcaatttttaatacaagctggaaaatcctagaattgacgggtttaactcgatattaatacaagatggtatactacaggtgaaactcttaaattaacaatcaaactacaaatgtataatcttaaacacttaacaatataaataatatcaacaaaacatatacaactcacagtttactatacatttaaatcaaataaaacaatatcgtatattttttaatcatctttacaataaaagttttcagtttaactaaaatataagcatacttgcggtatactgcaggttaatatctagattatagagcttattggatctaaagacgggtcatcaaagatttcctaaacttaagcaaaatatactaaatattcaaatatctatatgttaccaaattattaacaaataagtcaatttaatattttatatacgaaatcaattaaatcttaatcacataaaaattagcacaaaaaaaaatattcaacaattaaatttttatcaaatctctgtgttatataagttttgatactatattctaataaagtgtaatataccttttcaatttgtattctttaactaatttaagctaactaatatatttgataatcttatatctatcaaaaccgactatcgtttcttatctctatattatttttgcaagatttttttggtggatttggataaaagtgcattcgggtcatatggtacattcctctattaaataaatatggtgcactcctatgttattagctaaaatgtttagattataattcagagtcatatcattaataaaattaatattaataaaataaatacctttttggcaagacggatttggagggacgggtttttgaatcaacattaataaaaaagtaaaatataattaatctaccgtttcaatacgggttaaatctttaatttattatattttaagaccactaatattaaacatatcaaatcatcctaatttagaaaagattatataaaaccaaaaatgttatgtggtatgtataatgttactatatataaaattaaactataaaatataaatgtattagagaatgatacaatttgcaaaacttttatatatgaaaaataattcttaaattttaaaaattactactttaaaaaaaaatcacgggacggataaagaaattacaaaacgtgttttatttggaattgggttatatggtggatgtatttgaatcaatatttataaaattgtaaactattattaatatgctgttttaataagggttaaaaacttcagttttttaacaattgtctcatgaattcgtggtatagtgttacttagtaacaattataaactgtaaaatataaatattttataaaaataagatttgcaagttttaatatatattacttttgaaaaataaatcgtcccgcggtattccgtggattaaaatctagtcatagtaagaaaaacatttggtaaaaaaagtcgtcaaataaaacagaagcggaccacgtaggtgtccaattgcatgtcttttggatttttcaggtagttaaaaaaatttccatagaaaacgattaaaatcaagaaaaatagcaatgccgatcagtaataataatatttataaagttaagatgcaatagagtattatatactttgatgtagtttacaaagtatatggtgaaaattttaaattttgttgagtgattttgttatgagaatatataaatcattttttaaatgattaattagttaattggtaatagtattaattttagcatagcaactccatattcgacgtataccgaaataaaaatgatgttgaagatatataatctaaggaagtctaatctccggggggaataaatgagagtagaattgaagatgcatggaatggtgtgtgggaaaggcaaagcaccatgacttcacaagttgcgtgagggcaaagtatctattttgggtgaaaccattttgccctctcagccgttggatctctttcttccttcatcatcattccgtcatcctctttgttcctacgccatcttctgtattaatttttactaattttcttacgaactaactttcagttttaaaaaaccaaattgtttcctaattaactttcaatcgtttctcaacaaagaaaaagttaagtcattcagagttatagaatttgaagagcttaactggtacactagagtggatatatatgttttctcaatctattagattataagaataaatagagattggtatagtttccttcccaaacaatgtcaggcataagtatttttattaataaatattggagcttatatttatttaatactgtatgttggagtttatctttactattcaacatgttggtctggacagggttaggttagatggatggtatatatataaaataaaataaatatgtatttaaagtgtcgttttttttcttttccagaggagctcaagatcaaacatgctcggccttattcagtagtttttataatcttttctgcagctatactgctattgtttaccctcctacctattagacctcccaattgtttgtcatcttttattcccctaaaacagacccaataaacaaatgtagaatatatacccttaagctgaagacaaacaattttgagtatattatcttcacaaaatattttgtaaaacttaaagttaggaaaatatcttgtaacttgaatccatgacgtaacaatatttttaccttagacggtaaaggtaatgcaacaaaaatgtcgatagtgtttatgaaagtaaagaaaacgtctacatcttcttaaactacgtcttcattaaaaaataaataactacgtattaattcacaattattatattctgatttcaaagaataatcaaaatttgttaatttatgacaatattcgttaatactatatatgcagcagttgaatatcagtgaaatgctaatgccaaacttaaatttgtgttcgtcaaacccccaaaatagcttaccaatgaaaaggctttttaagaacctgagactaacacactgatgacgaatgataacgttagtgcatcgaagatcgaacacggcctaactatacgtatcatttatatcacacagttgactgtgaattacgtctaactttttcagataaaatgtgtattatatgctctattaattgcgtcgaaataacaaggaccatatcttttgtttttcttcttttggtaacatttcgagaagcacgcaaagaactttatttttttcaggatgttactaagaaatgacatcaaaaaacaaattgaccattatatttgttttctcccaataattgcatttatcttttcaaatggtcagatccttctaactctaaataggttgattctttgggttttcgtgtagcctaattttttatttttaaaaaaatttatttaaaccttttagttcttctttcttgtctatatattcctcctaaacaccaacctcacctgagtataacttttcatatcccctacaaaattataccataatacataattaacatataaatgtttcaaagtatatatcgtacgtcatgcttcaaatcgtggaatccaatgtgtgttaagaaaaaaatcaccgatcgtacatacatgaatatgatataggcaaatagaataagaaaaaggaaatagtgtaaatcaataaagaatacggactgcaagaagtagaaaaaaagtaataatgatggaaaaagataaaacatcacgcaaaaccttaaaaagaaagaaagtcttctggttgtcgtgtgttgctctctcctcaaatagtttgccaaagttttcacgtcaaattttttaaccctcaaaaaccccaattttttcatctctctctctctccttcgtatcatactatattagtactacgagtacccacctctctctttcacctaaccctctctccctatactctccattcgctctctctctttcgctttctatctcctagaaaaaatgtcagtcaaccattactccacagaccaccaccacactctcttgtggcagcaacagcaacaccgccacaccaccgacacatcggagacaaccaccaccgccacatggctccacgacgacctaaaagagtcactcttcgagaagtctctcacaccaagcgacgtcgggaaactcaaccgcctcgtcataccaaaacaacacgcagagaaatacttccctctcaatgccgtcctagtctcctctgctgctgctgacacgtcatcttcggagaaagggatgcttctaagctttgaagacgagtcaggcaagtcatggaggttcagatactcttactggaacagcagtcaaagctatgtcttgactaaaggatggagcagatttgtcaaagacaaacagctcgatccaggcgacgttgttttcttccaacgacaccgttctgattctaggagactcttcattggctggcgcagacgtggacaaggctcctcatcctccgtcgcggccactaactccgccgtgaatacgagttctatgggagctctttcttatcatcaaatccacgccactagtaattactctaatcctccctctcactcagagtattcccactatggtatatatttctctttttaaccaaattattcgtctcttttctttttttacatcaaatagcttttatcttttttttgggtagacatttttattttttcctacgaatgaattgttcgtgtcctagagtgtatatcgactatctaatgttgtcgggaggattaaaacattacacccaaatatagatatcctttagctaatagtgtactataattatttctctacaagatttatgcttgcgtattaacaacctgagataagtaacattgtattatacagctattaattaatgtttgcttttctctaacctcgattgcttaatactcccagttgtagttaacatacttaatagagtagctatacacgcgcattaaagagcgcgtgaagaagaccgtccaatcccctgggacaaacgtgctttttgttcacttgtgtactattatgtttttgttttggtttctttcaattaattaatgacacgcacgtgtcggtgattacaggagccgccgtagcaacagcggctgagactcacagcacaccgtcgtcttccgtcgtcgggagctcaaggacggtgaggcttttcggtgtgaatctggagtgtcaaatggatgaaaacgacggagatgattctgttgcagttgccaccaccgttgaatctcccgacggttactacggccaaaacatgtactattattactctcatcctcataacatggtaattttaactcttttataaagatatctgattcagtttaggtagaggtacattacatcatccatcatataatattatttatagatacatgatttaaaaacagatggatgacgctgtttctcgagacgagacagttgaaattataattaaataaacgagattgattaggagcaaatagttaaatgatataatgaagactatagaggaaggaatcaggaatctgttaagagacactagacttttgagcagtcgcacatggccactttgttagtgactttgatttgttttttgtctgagcccactttcatttattttagtattactacattgtttagttaaagtatatatgttggcctcagtaatcactgttgctttttttttttttactggcgccgcaatgtacaatgattcagagaagaaaatgactattagcatgaataaggaaatgtgtacaaatttgatgtttgatacttcagatttggtataattatggatgttagtatgttacaatacagagagattcttaatattatgtgtttatattttgaaatgaaaaaaaaaacagaatatagctttcacgggagaacgatgaaggagcagagagataagacgaggatgagagatccaaagaagtgacaacattttcggaattgacttaaagctttatgggaccagactttgtagccacataggccaattttctggaaaattgtatgctatttttaataatatctcattagcttccgtactgtatgtaactaatttggaaaagaaaaaaaaaatcgctgaatttgagggaaatagtcttttcctattacttccaaagtcagagacgaagagcaaatttgttttaatcatacataactaaaaaaagataggttttcttctccaattcatatgatgatgatgatgatgtattcacatacatgcatgatgtatagttgtacttgtcaaatgatgattttttttttgggtgaaaaagatgaaattggaaattgttgagataattatagaaacaaaagtgggccaaccaaatgatgtttattattgtggagtttactatattcatgttttcacttttttactagcctctattgatagtttcacttttcttgtttggtgaacaatggcaattgtaaaacaagttcaattttgggagagaaaccaaaaatgtaagggaatggtgcacttcatatcagatc

SEQ ID NO: 701 - DNA, 86380 bp, Arabidopsis thaliana
gatccccatgtttttaataagagagctttaatttatgtgtgcaggaacaaagatgggtatgatattggagagatagacccatcactcttcctctatcttgatggacaaggacatcatgatcctccatcaactgctccttctcctttacatcatcatcacacaactcgtatgcactctctctctctctcttttctttcttttttgggaattggggtttgtttttttggtttcagcagataaggaagattccctttaggtgtgtgagagagagagagagtcacagcaaaagcatgccaaacagatttcaatctttcttctgccatcagtactctattctttcagctttgaccagatcctctctcttttcagacaccaaatctttcaaatccatatatcttacacttctttaaacccttttctctctctgtcctttttcttctaattagaagaactagtccgctcacatatttatatacatgacttgttataactagaccatttctcatacatatggtcacatgactcatcttatggcagagaatttggcgatgagacctccaacatcgacgctcaacatctttccatctcagcctatgcacatagagccacctccttcttctacacacaatgtaataattattactattactttataaatttctatatatatatgccaattttagttggtttctgtttctaatttaatataatgtcagcgcaactactagccatttcatataatatcaagtcagaccaattattatacgtttcttatttttctattgagtagtgatttgattgttttttggttgttttatataatgtgtttggtaagaccgataatacaagattagttccggctgctcaacctagtggttccactcgaccagcttctgacccgtccatggacttgaccaatcattctcagtttcatcaacctcctcaaggttctaaatccatcaaggtctctatccatttatgtttttttaatcatttaattgctttgtcgaactataactcgagtatagatatagacttgttgtggttgtttttagaagttaatgggtcatatctaaatgttatggcagaaggaagggaaccgcaagggtcttgcctcatcggaccatgacatacctaaatcgtcagaccctaaagtgagtgtatattcatacaactgcagaaaattaataagattcttttttttttttttttttttacttttcggtttttgatagtttctttattaatttaattctcaacagacattgagaagactagcacaaaacagagaagcagcaagaaaaagcagattacgtaaaaaggtcagcattcaatatttgtaagttgcaaatatagtttttatatccaaatttatttataacgttatttgctttggtaaattacgacaggcttatgttcagcaactcgagtcatgtaggatcaaactgacccaactagaacaagagattcaacgggccagatcccaagtaaatatttgaacctgtcttttcatatatattgtatttaacctaaagtctaaaatgtaccaatttaatttgatttcctatatatgtttagggcgtattctttggagggtctcttataggaggagatcaacagcaaggtggactacccattggccctggcaacatcagctctggtacgttaatagtttcataaatgtgatgactcaaaaaccgtaaaatttgaaaaccgagagaatgagatattgagtaaatgcaatgtgaagcagaagcagcggtgttcgatatggaatatgcgaggtggctggaggagcagcagaggctattaaacgaactaagggtggcaacacaagaacacttgtccgagaacgagcttaggatgtttgtggacacatgtttagctcattatgaccatttgattaacctcaaggctatggtcgctaagaccgatgtcttccacctcatttctggagcatggaaaactccagctgaacgttgcttcttgtggatgggtggtttccgtccatcggagatcattaaggtacatctcgtcttttcttatagccatatacatatatttaggtttttcgagagatatttacttattctattcgagccacatcccacacaataattagtcatgatgatattgtaaactaatcaaatatggattaataaatctaaattttggaattttacttgaagactaatcattttaaattttatcttagaacctaaaatattccaggatacaatcattaataccatcaattttgtggattacttgcagaacatatactaataatgactgaaattgtgacattgttattatttatatcgtacatatatgtccacagaatatagtacttccaactttattttattatttagatttttttttttaatttagtctttgattctcgtaaaagaggtacgatatagtaataatagataagacagacaagagatagactatatagtgatattgttggacgaggtatatatatacataacattgcatggggtgactctagatgtataaaaccaacatatatacgtgaatgtctttatattacgacaataataaaggtacacgtaaaattattttgaaaacaaattaagaatgcatgcaattgtgtgtgatggtgaagtatctctagaaataggtaggttttggcataatgcaaaagaaagtgcctgtctgttttttcgatttatgggatccataggagagagagatagacataaaccaccatggaattcaacagagacgaccataataaacaaaccaaaaataaataattgtttaacatttttagcacgctcgtcaattggatgattatcattttttttcttttctaaaatggttacgtaaagccattttaattaaacctactttttattctaaacaatatgagtacctacgatagccgattaataatacaaattaatatatggatggtgtgcatatctgacaagacctttggcaatgtctcaatcttatatcctttttagtgaaaataaaaaggaaagaagagattttgggtgtagctagtaactcgtgcagagtacatacactacacactttaatgcattcaacgttctttatgcatccattaagaccattgttaattaatcctcgatatctcaacttgtgtgtattaattagaaacgcatgcatgcaggtgattgtgaaccagatagaaccattgacggagcaacagatagttgggatatgtgggctgcaacagtccacacaagaggccgaggaggctctctcgcaaggcctcgaggcgttgaatcaatcactttccgatagcattgtctctgactccctcccgcctgcctccgcaccacttcctcctcatctatccaatttcatgtcacacatgtccttagctctcaacaagctctctgctctcgagggcttcgttctccaggtacccttataactctttctttttaagtttatgtgcaattatatatcaatataccaatcttttatctttatataaaaatatacctatagagttgatatacaagtggacccctagaggatatatgtggtcctaatcagactaggaatacatattctgtttctttgaactactccttattaaactcaactatcatatacttatatatttctatatttggctgttataacacgctatctaaatttatatagatgtttgtatatatgtgtgtgtctgttttgtgtacaactcatatataggtataacgtcggccataatttgttagaggacatttgtaatatattaagtgtatatagaataaaagtggttgattttaaagaagatgtcaaaactaattcgcaaacttaataattatgcattaacatgtatatgtatatgaaatggaaagtatttgcctcttgattcggacattatgcaagtaggtatctaacaaacacttctcttgtcttatatcaacttggtcgggttgcttttcttagacgaccaagtttattaatttaatatttatttcttaatcatttactagtttaggacaggcaagtttttgaaacaaagaaatatatatatctgcttgtgtatattaatgtataagtctatactctatatgcaaatggacatttcggctaattaattctatacaagatacatgcatatacaagttggcatctttcaatgatttcttaatataattagttctaaattgttcctgttccgcctataaaaaaagtttttgtgtttcgctacacggttagtcgctcacaatttggagaaagatccaactttaaaataggtggtaaatgtggggttagttactaaaaaggggtaatgaattcaattttctctaaacgcacgtgacaattggcaccatgaaagtatgtattaagtatacatattccaatatatgtagtccaaaagaaaaatacatatattatgtatctataatatatcacatcaaataaaaacatggaatgcttggagcccatatcgttgcatgatgtcatggacgtaactgcccaagtatcccatcctccgaaaacacttccttgagaataattcctttacttacatttgattctgcatttttttgtctacttttatatcattgataataggttgattatatatgtatgattctaattaatgatcaaaagtatcatgaagcatggcgtgggaccgagggtatggaattcacggtttcacctttttgacatgttggtgtcgtgttcttattagtgaattactaacaagctttgattttttgatcgatcaacatgttgaataatcggcattagtcgtcaatcaaccacataatttcgggtcatgcacaatcattataatgcttaattagtcctttatctgtttttttcctctctagttagtctttaatacttatatttatgagattaatgatggtccaattcgattatttgtccttaattggtcttagtcaataacatgtgcactactttgtccatcttttgttttgcttttactatttctccattttccctataactcttatttagttttgaactagctaatacattagaaacttacaggcggataatttgaggcaccaaacgatccataggctgaaccaattgttgacgacccgtcaagaagcacggtgtcttctagccgttgcggagtacttccaccgtcttcaagctctaagttctctctggctagcccgtcctcggcaagatggataatactaaaacaactgatgaaggaaaccaaaaacaaaaacaagagaataggttgattagttagccgccagcttgacctctttatcatatatatcgtctctctactcaaatacagtgcaattagggaaaattgtttggcttctttttgttatatgattcttactattatgtttttaatcaagatgcagattatatatatagacaagtattccataccttttaatgaattcttccttatgcaaattcaagtgaaaaattatacttgatcttcaattccaaacacaagaacatgagagagtattgaaaggaaacaaaaatagaaggctggcaacaattgcagttgcatgcaagacttatcacttgttaggtcaaattaaagcattgaccagtgaggaaggtgacaaatggtgagttctgtaggataccgtcagggacttgggatcagtaccgttttgctttgggttcaacgcccttctctctctcctttacttttcatttctttgctgtcaccagttaatttttttcaactcttctatttttatttcttgactgataaaagtgaacattacagtagtacacatgcatggtcaaatcaaaacaacaaaaatctttttacatcacaaaaaacgagattgatttagccgcaaatatttgaaaaaaaatagtttctaagtacatacactagcaatcagattatacatgtgtttattcttggactacaaattcgtttgggccgtaaatttttgggccctaaagttttctattgaattttatttctttttaagagaaggaaaaaacgtacaaacaaaacattataactaaagcccactacttttgggttttagagtaaacccaacaacacagtacatgataagaatagaagcaaacagaacaaaataataaaacagagcagataaacacacgaacacaagaaacacaagttacgagcagagaagacctaaaagccacaaagaagttttacaattcaaagcatacaatctgcttttgaaggtaatttcctgaagaagttacttggagcagaaggcatcttgcttctgaacttaggatgcctcatccagaacatcccacccgcaagagctatgatcttgaaaggcgtcacgtacaaaatcatcgcagcaacaagacaaaaaatcacaaacaagcaagtcgcacgcggatctctccaactcaacaaagcctgaaacctctctccttgcgttgcaatgtctccaacaaccatctggatccgacccgcaacgcttcttaacctatcatacctcatcttcacaacatcttgtccctttgaagttgggaaagtatcaaattcctcatctagctcatcagggctagccgcttcagcccaagatacctttgtgtccatatgagcaggatgacgcggcctgaaccggaaattccaaagccctatcaagaacatgtagaggaatgtggttgggagtatcagctccggataacaaatcaatataaagaagagaacgtggaataatatcgtcgtcaacggattcttccagtagcagacgtctccgagccatttactcatagcaatcaagcctgcaaacacagacactatcctgaagaagttagctttgctccttctcatgctccacatgtgtgaatcaacatcaagcatgtactctacgttctctttccttaaaggaggctctgctcgagataaccgtgctgcgacaatgctcattgcttggtatcttagactgtctaattggttcacagtgaatggatggagataatgcatctttggaagcagaggatggccataaagatagatcatgtgagccaaggatagacaagtgaatctcacagctaattggacttctcccattttctttaacccttttgtttgcagaacaagaagagggtaggagtgagtgtagattctatcagcctctagagtcgacaaccggatccttaccttcccgattctcgaatccactttggctccactgttcgatttctcacttccgccaaggtgacagttatcgaaaactcccagtgtgataactgtacaaggatcatacacttcccatgtgtattgctcattccatttagggctagagctgtcaatgatggttcttgttctcacccatttttgaccgtacttggcaacacaatacggatctgttgtcgctttaccgtcttttgttttcataggcgatagcccttgagcactcaagattcctacttcaaggatgccaataggagacttccatagttgccttgccgtaggtttcacgtcactgatgtacagagttgactcgtccattacatggtaacctccttcaaggcaaactcgtaggtggattcggctggagaacttgagctcgtgtctcttgtctccttccagagccccaaacccaaacttttcgaggttgtaccatttggaatgaacagctctgtgatctaaccttttctcaaatacgctcaaaggtgagatcagcctccccatgacttcatctttagctggtgtcaccttgttttcgaccgtcaagaagaactgttcttcaaatggctctgcagctacaaaaacaagatcttcgttccacatcggattcgtcgtcttgttaggacataactttgttttcagaatctgattcccaacttgtactttaacgaaagcttgaggtggttggctcctgtcactaggctcaacatcttgcgcctcgatgacattaacccgcagataccacaatttgggagatacatagactttagacctcacgctttggacaccttctccttgaacagaggaagcatccgaatgccaagcatcaggaaatgcttcatcggcttgcgtcccaagccaaaccgctaccataacctctcctcttttcttactctcacctcgccgatcttctaatctgtaccactgaggtgcaagtggactatcaggaggaactcttgtaggaacctcacgcatatcaaacacaaccttcccgatgtattcatctcttgtaaccatctccttatcgcgcacaaagacttcaacagtagaggattggaccttgtcttttgaaaatgcgaaaacttgattccactccgggttggttcttttctcgaagtgtttagtctttcctttgtagtttcctattttcacttccacataaggatcacagttgctggtgacagggtttggaggaagatccttggctttgacgacccgaacatagagataaaacatttgctcaacaaggtcatatgtgcttgcagctcgttcactgccaatccatccggttcctccacgctgtcctccatgtggccatctctctccaagctctggtttcatgtctttaagcttatagtcttcttggctcttagctccatctttggctgccatggttttagattacttgaaccaaaagattctcctgtttctttcaaaacgtttcaattctgttcctgacatacaaaaaaacagaatctgagaattgcaggaaaaaatgattagacaaaacctgtttcttggatgtaaagaaactaatgtatctcatcagaactgatttaaaacctttataattagtatttagtaatttactttcaatctcaaccaagataattgaaaggattcttacctgatttaaacaatatatactaagtggtcgacgcaaatataagctttgtctcttggttctgttccatgaactcattcaagtgtttgcaggaaaacacagaatgtcttgaattatcttttgcaaatgaaaagtaagagaaggattaatatgaaaacgataaatagagagtaaatgaagagaaaaagaagatagcaaacaaaatcaatgaaagagataaatctatagtattcgaacttacaaaaaaagagagctatttttatatggaccaacaatatttcaagaacatgtatatatgtaaagaaggatgcgtttaacttagtaagcagtaccttgagaaagatgttgaagaagctgccataaaattctctgtttgctgctgtaccatagaaatgaaaaaaagaaagaaagaagaatttaagaaaccaagaagttaagagttattccataatcaaatttttgtttgatacacagagagagaacgaaagagaaacaattctatctcaaagaaaaagaagaatcaaaatgaaaaaggaagaaccctaaaaaattacttcttattctctctgtttttctccttctttaagagggaagctgattctttttttttgttatcttcgttttattaaataggaaagcagattcttcgtttgtcttaagacttttaggtacattaagaaatttttcagcagtgacaaaggtagaaatagtagattctctcacacttgtaaaaaattacaccacatatttgccaaattgcatgactgatttcaaggatgaataaacccggataaaacactcaaacccaacatcaagtgaaactttctcatgctttaatcaaaacttttcacaaaaatagtttcgcatcaatatataaaataaaacatgtaaacataaatttacaagaactcacagataatatacttagtgccaaagtgataattagaaacatttccaacaccaactttcccctgtgagtatatatatctttagtgtttctttctttctgcctcattggaataagcatctaaaaaatagctttttggagtttgaaactttttcataaaaagcaaaagggcaggctaggctaaggagtgattattattatttgattgagtaacatcattaccttattatctcgccatttttatttctaatgcccgcactggagcttattaaactatttggtaaaaagaatcagtgaaccgagactaaatcgaccctaacagcagagatgaaactaacttcagttagatcgacatttccctttgtatagtatcaaacaagaaccggttcttcactccacttgcatttgttaaaatgtgtccaggtttcaaccatagcaaatgagctctcatgaggatgtagtcaatcttcttcaaaatcatgtgtttaatattttagacaagttatagatgagttctacacaatttccaataaacatttctgaggataaagaattgtttttaccaacgtagatgaatttaagttgcctgaaattcaaaacctcccaaaagaaagaataaaaaggtgtggaataagttcttgtattgtttctttatcaaaaaagttataagatggttctaacattttttacatctatgttatatgtaaactatgaataaactggaatgctttttctttttaaaacttttatgaaggctaatttgaatttttatgaaccaacttatcaagttgtaaaggatccaactttagtggtccgcttttgctgcctcagtgatgcttagtaatgatgactatattattatgttcttttatgcatcatcttgatagacttgtcacataatatccatttttctcggtttagtttggttcacaattacgatttattaatgtctaacgaaaccaaagcatttagacttggcgtgaacattagacattttacattgtggatcagatacagttgatcatcatttgtgaacataagacttgtctagtggctttcatagtgcccattataaactaattgggcctcattcacgttcattgagatctgaaagatgaattaagcccacactttggctcttcttcggtaacttattttatttatttgttcatagaaaaacagaaatcacttatctcaatagagccgtttgtgataaatctcttccaacggtcggatcgatttgaagatgaccataaactttgttcgatattttcttataaatatgaaccaaaatctaaactttctctcaaatcttatgtttgttggatagatcaattgggttacttaaatttggatgaacttttgagaagttgtattagatggtgaagacattgcctcagtatacatttccaaatgcttcaaggagatataacttgcaccggttatagcctaattatatacaacgcgtaattgcattacccaaacatattcaacgccgacatcttgactatatgatatgtattgactattattacggtccatgtggaaacagagatcaaatcgaatccgtctctctaagtctatatcactcactatatagtatgtatatgtatcactaacactttccatcaaaattcaaaaccaacaccatggataagacagcgacattgtgtctcttgttcttgttcacattcctcacgacctgtttgtctaaagatctctgtaaccaaaatgacaaaaacaccctcctcaagatcaagaaatctctaaacaacccttatcacctcgcttcatgggaccctcaaaccgactgttgctcctggtactgccttgagtgcggcgacgccaccgttaaccaccgtgttaccgccttaaccatattctccggccagatctccggtcagatcccggctgaagtcggtgacttgccgtatcttgagacccttgtcttccgcaaactctctaacctcaccggtacaatccaacccaccatcgccaaactcaagaacctccgaatgctcaggctcagctggacgaatctgacaggtccaattcctgactttataagtcagctcaagaatctcgagttcttagaactttccttcaatgatctctctggttccattccaagttctctctctacgttacctaaaatcttggctcttgaacttagcaggaacaaacttacaggtaaagaacgatcttttcctttattacatcattcagtgtcttgtctaaacaacgatctttatgttgtaggttccataccagagtcatttgggtcgtttccaggaacagtccctgaccttcgcctatcacataaccagctctccggtccaatacccaaatcattaggcaacatcgactttaaccggatcgatttatcccgcaacaagctccaaggtgatgcttcgatgttgtttggttccaacaaaacaacctggtctattgacttatcaagaaacatgttccagttcgatatctcaaaggttgatatccctaaaacacttggtatcttggacttgaaccacaatgggatcactgggaatattccggtgcagtggactgaagctcctcttcagttcttcaatgttagctacaacaaactgtgtggacacatcccaactggagggaaacttcagacatttgattcttattcctattttcacaacaagtgtttgtgtggtgctcctcttgaaatttgcaagtaaaccaagcttatctctaggattacgaaaaaatatatttgagtcaataatatagacaaatatgtaatgttattcggattgattaataaaacatgaaccaaacctctcatttgatgtattcatagcacattttcaaaatgttttatttgatggattaatcctaccttaatggaaaaacaggggaaatatggataacggaatctctgagtggtttggtatggtttctcgattcgatttgggtttatatccaaacttgaaaagtaaaaccagattggtttaaacaaaaaaaaaaagaagagaaaaaccctgatttccttattcttccaaattcccaaatttctcaaatcgtcacaaatataaattccaaaatttctgcaccgaaacttgtttaaaacgtggtctagtcagcaaaatcattactacatctgtatcgcaccatgcattcatagcctatatgtatatcaatcatagtttccataaaaactcaaaacacaaacaccaaaaacactatggataagacaatgacactgttcttgctcttgtccactctcctcctcacgacttctttagctaaagatctctgtcataaagatgacaaaactaccctcctcaagatcaagaaatccctaaacaacccttaccacctcgcctcatgggatcccaaaaccgactgttgctcttggtactgcctcgagtgcggcgacgctactgtcaaccaccgtgtcacttccctaatcatacaagacggcgagatctccggtcagatcccccctgaagtcggtgacttaccgtatcttacatcccttatcttccgcaaactcactaacctcactggtcacatccaacccactatcgccaagctcaagaacctcacttttctcagactaagctggaccaatctcaccggtccggttcctgagtttctgagtcagctcaagaatcttgagtacattgacctttccttcaatgacctctctggttccatacctagttccctctcttcattacgtaaactcgagtatcttgaacttagtaggaacaagcttacaggtgaataactctgtttttttttgtctctattagtcatatccattaatctcatggactaaactaaagtttaaacttccatataggtccgataccagagtcatttgggacgttttcaggaaaggtccctagtcttttcctatcacacaaccagctctctggtactataccaaagtcactaggcaatcccgacttttaccgcatcgatttatctcggaacaagcttcaaggcgatgcttcaatcttgtttggagctaaaaaaacaacatggatcgttgatatatcaagaaacatgttccagttcgatctctccaaggttaagctcgctaagacacttaataacttggacatgaatcacaatggcatcacagggagtattccggctgagtggagcaaagcttattttcagttactgaatgttagctataacagactgtgtggacgcatccccaaaggagagtatattcaaagatttgattcttattcctttttccacaacaagtgtttatgtggtgcacctcttcctagttgcaagtgaagattccagcaaaaccaagcattatctctgatataccaaataattaatcaagtctagtgacaattgtgtttttattttgaatgattaataaaagcatgaaccaatgttttagcttgatttcattgattaacggaaaaagttgaacaaaaaaagtctacagaaaactcattccaatcaaattaagtgggtctaaaaaattagtatgaatcgaaattataagcccaactaataaggcccattggaaaaccgtttccttgatttccaagctttagatctaagaagccgtttcttctcaacgtcagggcggttctcgcggcgggactgaagtacgattgttcttatctctctccgggatcttcagtagtcatttgctttgccgattcctttttccatgggaatattcattcgaatctaatttgaatgtttttcgttttgtaaggaaaaaaaatgatgcagaatgatttgaaatcggggcagaacaattcagaaagcgctcaggatatcaccaatatttcatggatacctttcaattcttaagaatccaccaccacacatggagcatctaactgaggaaacagagccaacaaaacaaaagttaggtcttgttccagaagaccagtttcttgctcaaaatccggtaatgttttctcctgactcttaccttctgtttttttttttggttgtatctaattagcggtcatacatttgcacggttcctctacgatcatggtttctgttccagacgtcaatgatgggcaagtcattgagatcacagtgcagtccttatccgaaaacgtggcaagtttgaaagagaaagtagcaaacaaactgaagttaaggggaaaagccgggattttaaaggacgatgacaagtcacttgcacattacaatgttcgagcaggtgacatcctaacactgtcttggtaaaaacggatgcaggtaaatgctattcaatctctcaactcatgttaaatagagagatgttttaaaactatatacatatatgtaactgacttaagtttgtttcaactacttagtttattttatgtataaaacagaattgccgtaaacgaagtataagtaaaagtacacaagtgtaaagttttcttgctctttgttcattttcttcttcgaaatcattagctagaagttgacatttggttctagtagagaaaatgattgtgtagcctctttagcaacaggaacacacactaaaggtgtagctctaggcaaagatgatccagtcccttcatccatatccacacttcccttcactttcagctcaaaacactgtattattgcagctaaaattattggaacgaatctaaacaccattttctctccaggacaacttcttctcccagctccaaaagacatcatcttctcactcatgaccttccattcactcccttcaaatctctcaggcctaaactccaatggatcttcccattgatttgagtctctcccaatcgcccacacgttaactatcactcttgttttagccgggattctgaatccagccaccgcgcattcttcatcagattctctcacgaatattggtcctccagggtgtaacctcattgtctccttcaccactgcttgggtgtaactaagattacacaaatccgattcttcaactactctcttgtttcccaccacttgctctatctcttgttgtgctttcttcatgatctctggatggtttatcagctctgctagtgcccattctactgttatggcagatgtatctgttccacccccataaatattctgtataacaatgaattaggcttgtgaaaatgttatatcacaacatgaatgttgcagtgctgtaaatgcttggttttgaaaagaagaaaaagaaaagtaggttttaggatatcgaagctctgataccatgtaaatgctgaatgtattgaatattattagagtaggattaacatatatatactaagacacagcccttcatgtgtaatatactctataagtgcagacataaccaagacacttaccatgatgaaggccttaatgttttctcttgtcagcttcatctctgcgtttttgtcttcatatatgtcgagcaaaacgtctagcatgtttctttctcctgtagcattcttcttactagactcatgctcttccattattctttctatgatcacatcatatttgtctcgagcattcttgagccttttcttcagtccttgcaagtcaagccttttcaagaaccaaaacgtttcagaaacgttgaaaaatccggctagttcatttaactccaccaccattttgataacctcctctgatttttcgccaccgtcactatccgattgcattttcctgaacatcattctcgttatgatgttgcttgtcaattcctttagctgttcaccaagattaacactctcttctgcttctgctttcttcagaactcgtattagaagcttctttaactcctcgcttcttacggaaacaaagctatctaaagctctgctgctgaagagctccaccatacaaattctcttcatgaacttccagtgaagcccgtaaggcgctgagaaaaaatcggctgagccataagtaaggtagtcaacgttttgcattgtgggacggttcaggaagttgagttcattggatttgagaatctcattcgccatctcggctgatgagacaataagattaggaatagagccaatgaagagatacatcaaaggtccgtagcggattgagagcttgtgaagtgcttggtgagctatgggaccaaggaggtgaatgtgaccgatgatcggtaaagctgttgggcttggtgggagtggaagtctgtcacgtaatctgttagtaatagcttggatcaagactgtgattccaagacatacaaggatgattacggagaagtattgtaaatccaccattttcgtttgtgttttgtttttaggagagatattatcatgttttgattttataggataggtttatagtcatgactcctaatggtatcaaatgtcaatcccaacttcaagattctttcttttctcatgttgtctttgttctgtttttgtctcttttgtgaaggtataatctctgtttctgatcctgtttcatgtttatttatggcttgtctgtttataaacaaataaaaatttaagaatttacttgactgttgttaagctttcattatcagttgacaaaagaaaaatgttttcattgtctaggcttacacgtcattttcaggtgtagttagattagtaatcaaggttggtaacaacagactgtaagatttagagcttatggaaataactgaaacattttttttccatcaatagtggtaactggtaagcttatgaaaacagaacataaaacagagcataaaacagagcacagtacatatgattccaaattcctaatgatgtttatctgcagaaattcacttagtttggtatccaaatggatcaaaacataattcaggagaacacataagtgagcttcctccagcagtccctgaagccgaaaagccggtaggtaacttgatcttgattttgtcttcatctcccttcaccgtccaattaaaacactgcacgagtgacccaattgtgagactcaacaccagagaagcgtgagaagctccaagacatcctcgtcttccgctcccaaacgcaagataattcacatcttggccttttaattccaacatatattgctggtagtaacccatctttctctctgtatcttgttccaccacaagaaacctctctggcataaacttgtcagggtctttgtatgtggtcggatcacgcattatcccgtaagcattgatgaagatctttgtcccggattttacatcgtacccgttgatcttcatgtctgtgttgctttctctgcgtagtaatggtcctactggatgaagtctcaatgtctccttgatagctgcttgtaggtaaggaagcttctgcaaatctgattctttgattaaccggttcgttgttcctacaaccgatttgatctcgtctctgatcttcgcgaagatatccggatggttgattagctcagtcattgtccattgtaaagctgcagaagtcgtgtctaagctcgccatgaacaactcctgcaaacgagagaccaaatattcttattaaggctaatttaacgaagctaaagaaaagtaatgcaaatagcttacaagaatgaagaacttgatctgattcatagtcaatctgagttcggcttttgggtcattatacgtgtccaacaagatatcgacgatatctttatctttctcttcttcctcattgctcttatcgttttcatattccttcagtatcttctcaaccaactcatcataccgccaaatagaggatctaagcttcttaccattcccaaacaaatccagatcccgcaatggtccaaatagctccatgaatccaaaccttgtggcgcaagccataatatcactcactatcttcctgatctctttgggaatattcgagttttggcggcaccttttccccataaccatctttgataagatctttgtggtcaaagcagtgaactccaaaccgagatcgcaagcctctccgtttcgcgacctctcaaccagcgtgctcagtaaagctaacgtttcctcttctcttatgtcgacaaatcgatcaagctgataacccgcgaatagcttagtcatgcatagcttcttcatgaacctccagtaagatccataaggtgcattaaagaactctgatcctttataaacattgaactgtctcggaccaaacacaaacttggaagcgaaatcagggtcgtgagtcttgaggattagcttagctgtgtcggaatctgagacaacgaggactcgtaatgatccgatgcgtatggtcatgagaggaccgtaagtatgagccaaggcttgaagagatcgtggtaggctagaccggaggagatgcatatgaccaagaacgggaagtcctcgaggacctggaggaagacctctgcggctagaggagctgaagagtctatggagaaggaagatggttacaagtgtgaagaagagatatgaacaagaagtataattcatatccaaattcaatgtaaacatatttgtttgtgctgattattgtgactgggatcaaacaagtataagacgatgttagtatataacaaaagctttatgtttgtttgaaaatactataaaaacttgtcttgttgccatgaaggatctaaaaatacatgattctttgatgatagtgaccttgacttaaaattgttaaattatgcattatgttcaattatgtgttagaatttattgaaaatcatataataaaacattacatttttcatcaaaaagataataactaggcctcataataatatgttattaatataatattattttattttttataaatgtaaaaatcgaataaataaggattacaagcaaaaaagtctctgaaaggaatccataaacctacaatggcggggaacacggaaatattggcgcccagataatcttcttctgtgaagcattttaagtcgccgactccaatcaacagagcccagttattccatattatcgaattaattagggttcagagagatgggtaggaaaaagaaatctagggcttcgacaaccgaagaagatgagattgagatggataatgctggcccatcctctgagacaagtctttacgaggtattttcggatttctctttccgatcgctgctctttctctcgcgtacttagggttttattagggatttcaatttaagcttgttttctgggtttggtttatcatgattctagaaaatagtttggaatttgtctactttcataaaatttggtgttttgatatataaatttttatgtagattaaacactaatcataggttttgatcagtgatcttatatttgattaggattttggtatcaggatgattcgattagctaaaaagacagaaatcaatagaaactaactaatatctctctgtcactttactcaaaggttcttggagttgaaagaagagccacttcacaggaaataagaaaagcataccataagttggcattgaagcttcaccctgataaaaatcaggatgataaggttaaatacacactcttttacttgagatattttttggattcatttacatgaagattctactattgttttgttacaggaagctaaagacaagttccagcagctgcaaaaagtgatatcaattcttggtgatgaagagaaaagggcagtctatgatcaaactggctcaattgatgatgctgtgagtctctgtttttgttgtgtttgttcagtttgatcgagtgaagaaagcacttaacttcctcattagtattatgagattttcttaaacctgaggtgtttttccatgctcgttaggatattcctggagatgcgtttgagaatttgcgggatttcttccgggacatgtataagaaggtagcagaaactttcactagtgataccttttacacatctgcttctgctgcttacactaactttttttttttgtgttgctgcttatatataggtcaacgaagctgatattgaagagtttgaggcaaactacaggggatctgagtcagagaagaaagacttgcttgagcttttcaacaagtttaagggtaaaatgaacaggtaattcatcatcctttcttttcgatattgttgaggttgtgagttgatttatatatatattttcttcccaggctattctgctcaatgctttgctcggaccccaagcttgattcacaccgtttcaaagacatgcttgatgaggccattgcagcaggtaatttatctttctgtatttagtatatacgtcttacaagattatcttctcatctatggaatccttgacgttataagatgagcttgccttctatttgtacatctatgaattttgataacgcaatagaatttgatattgtgccttctccagttagaggatgagtgtaaaatgtaccatatccctttagctgtgtgtttgatggttcatattccacctaaatatgcattctaatttttttattccagtttggtgatcctgatctgaaatctatgtaaacttgggagagttgctgattatcaagtgtgatttccttttcaggagaagtgaagtcaagcaaggcatatgagaaatgggcaaataaaatttcagaaacgaaaccgcccaccagtccattgaggaagaggaagaagaagaagtaaaatctctgccttcgtttcttaattatttccaccaatcaaacttaaccttgttgtgaccaccttgcttcaatttgtatatacttgtaggtcagcagcaaaggattcagagacagatctttgcttgatgattgcgaaacgacaagaggagaggaaagggaaggtggactcgatgttttcatcacttatctctaggtatggtggtgatgcggaagcagagcccactgaagaagaatttgaagctgcccagagaaggattgaaagcaaaagaaaaccatccaagaagtctagaggaaagtagaggtcttaaagcagagttgtcttctagtagtatttgtgatggaacaagaatgtttattttctttcaaaattgcatcaatttcaaaattgcatcaatttcaaaaatcagtaaatatttcgattattgctttataaattgaggaattatcttctcaaaattttgatgctctccataaaaaaaatgaagttgacctattatttacaggacgagactgaacccaaacggtgaaatagaaaaactctatttgctaatccaaattttctccaagaaaacatatctttgacgacctatcttcttctccaagaaacagttagggtttatcttttgaagcgatgggttgttgttcatcagattgcttcgtctacttcatcctctccattgctttagctttcatggccatctccaccactctacgttcacctccggattccgaacccacaatacccattgctttttcttcctcttcgccttctctctctttaaacgcctcaaacactctacggcaatctaatttcaaagcaatagccactcttctccacatctcccctgagatcttcctctcttcttctcccaacacaaccctctttgccatcgaagatgcttccttcttcaacacgtcatcgcttcatcctttgtttctcaagcagcttcttcactatcacacactccctcttatgctttcgatggatgaccttctcaagaagcctcaaggaacctgtctcccaacgcttctccaccacaagagtgtccaaatatccactgttaatcaagaatcaagaacagctgaagtcaatcatgtccgtatcacacaccccgacatgtttcttggagattcattggtcattcacggagttattggaccattctctcctctgcaacctcacagtgatcatcttatccacacacctttatgtcaatctgatacaacaaacaaaaccagtaacaacgaagaagttccagttagcatagactggactcggattgttcagcttctaagttcaaatgggtttgtgccatttgcaattggattgcactctgttctcaacaggattgtgaacgatcataatcatcacaagaacttgaccggtgtaacgattctagctacaccgaatctggtctcattgtcatctgcttctccgtttttgtatgaagttgtgagacatcacattcttgttcaacggcttacatacaaagattttgcttcaatgtctgataaagccacagtgaagacattggatccttaccaagatcttacaatcacgagaagaaatgttaattcgtctggaggagatttcatgatttctggagttgagattgtagatccagatatgttctcttcttccaactttgtaattcatggaatatcacacactctagagatcccacatgtataaccattttcttctttcctttgtagatagctacacacattcatgtgatttttttttttttatgcatataacacattcattcttttttttgtttgttaataaggaaatattgtttttagtaatatgtaaatgttattatctctataatttatttttcacttttaaagtttaaaccaagactaccattcagtaaaataatataaaatctagttgtatcatttatacaaggtaatcattcaacttcacatatttctctgtatttatagtttttgttctaccattgactattcttcatcttttattcgtgtcattttttgtttgtcttgtggataatacacaaccaaaaatattaatttggaaatatataaattaacggatataaaataaggaaacgaggccaaaaaatgtggtaaaacgtcttattgggaagatcacgacctgtaggtgtaaccgaatcatcctaattttgattaaactaatcaccgaccgatccagagagatcgaaaaagacgtaatcctcttttaaacctgatcgagtcacactcacaaaaccataactgttattccctcaaaatcctctcattttttctcttaattctctgctcaccaaacttggatctcgcaccagtttctttgtttcaggtaacattcattgtaatattgcatcatcactcacatattcctccgattttcatttatacatcctcgttgttagcttcatcaatctcatcatttcattagaaaccgatcaacagagtcgtttttgtgtgtattataattaagtaatagtaagacacaaagacgtgctcatatgctgttaatgcccccatgtgtcgtggtaagcggccaaaaaaaaaatattgtttgcaagttgatttaattatattttaataagtagtatatgaatgaatagtgggatctgatgaatgaatgaaatgtttgtttgtctgtgaggaaacatccgttgctgtcacgagttatgaccaagctaataatgtccgtaaagtgtgagcaaacttgtgctcatgttctcttgcttgcttctcaagattataatcatcatgaatctctcagccttacttatcttatctgacttttttttcttctctttgattgactaagacaataaagcttcttgcattcttctgcagaatgtgattttgaggatcttgagaatttcaacttcattgtctgttagtctctcttgtgaatttctttggagatgaaaagattcgagaggccaagaacttcgattcactcgcagccaaggaccagtaccagttcaggtaagaaagatcagaagccgcgtagtagtagtagtaaaggatctggtgtgaaaccgttgaatgcggctcagctggtttctagagttttagatgcaacaacagcttctgagccttcttcagtcgctgtaactgattcaactactggatcagagtcttctgaagtctatgagaatgtgaatgtgcattacatggatgatgctaatgagaaatcaagaactgatggcaatctagtgggttgtgaagaagaagaaggtaatggtgatgaatcagacactgagacaaacaatgggtctgtttcttggtctcaatgtgaactgttttcccctgaagagaagaaatcagaaagaccatcaatggtttccaaaagtaaaagctctcaggatagacctttaacatctaaaggacgtactaatattgctgattcggttagatctcgatccaataccttccacagtactgctagaaagacagtaagatcgagtaagagtcaggcaaaagctttgtctgatttctcctcttatagaagctctgaaaacaacaaggctttctcttctgcttcaccagttgattcaacgccttttgaggaggggaaagaagatgatgagtttgaagatgctttgaatagcgttcataacaatgagagtgataatgaaacacttgtgtacaaggagaagaaaaggagtgatgtggagaaagtcttagctcaaaagattgagaccatggaagctcgaatcgagaaacttgaagaagagttgagagaagtggctgctcttgagatgtcactatactctgtatttccagaacatgggagctcatcacacaagttgcataaacctgcaagaaatctttctagactctatgcacttgctagaaaaaatcagagtgaaaacaagataatctcagtaaccaaaaacattgtgtctggtctgtccttgttgctgaaatcctgtggaagtgatgtatcgaggtaatcaaaagaaatgtttcttcttcttgtacatatgttgttcctataggttctggtgaatcttattatttgcttgtcttatctttggctcaggttaacttactggttgtccaacactgtcatgttgcgagagatcatttcactggattttggtagctcaaagctaaatggattaaattctcttaaagaagattggggtgatgtgagaactctgatagcggcattaagaagagttgaatcatgttttttcacccaagcagttgaatctatctggtcacaggtaactatgttcaatgcaagctgaaataacatgttctgcagatgttaaatggctttagatttccactccttctgttaggtaatgatggttcatatgatacctcaaggagtagactcgacgatgggtgaaatgatcggtaatttttcagaaccagcaacatgtgaccggttacaagagagcttttctgttaacctatggaaagaagcttttgaggaggctcttcaacggctatgtcctgttcaggcaacaaggcgtcaatgtggttgtttgcatgtgttgaccagaatggtacactttttttcctttccttcttctggtggaatgttggtttctcttctggactgaaaatgacatgttctgtctaattaggttatggagcaatgcattgtaagacttgatgtggctatgttcaatgctattctccgtgagtcggctcatcacataccgactgactctgcctctgatcccattgctgactcaagagttctgccaattccagcaggggttttgagctttgaatctggagtaaaactgaaaaacacggtattcacgttaaccatttgatgtccttttttctagctagatatgagtcacaagtcataaagctaatataaacgttcatacaggttagttactggtcgagattgcttacagacatctttgggattgatgttgagcaaaaaatgcagagaggagatgagacatttaaacctttccacttgctcaatgaactgagtgatctccttatgcttccaaaagaaatgtttgtggacagttccaccagagatgaggtatgtatgcttcatgatttagaactgcttatcaaccctacaaagctgtgatctcttatattgcttggtttcttcatctagcttcttgtttacttttttgggtttccacaggtctgcccatcaattggcctgagtttgataaaaaggatagtatgcaatttcacccccgatgaattctgcccgtatcctgttccaggaactgtgcttgaggaactcaacgctcaggttgatctacttatgttctgtgctttattgactgggtacaaagaaaagttgtcttgctaaaagcctaaacctatgttgtttttgtgtttccagagcatacttgagaatagaagcttatctagagatacagctagaggctttcctcggcaagtcaatccggtttcatattctcctccttcttgtagccacttgacagacattgttgcagagttcagtgtcaaacttaagctttctatgacacacaaaaatggatacagcagcaacgagaaggtagaaacaccaagatctcctccatactacaacgtcatcaaaggggctgtagcgaaggataacctcaatctttctgagactaatgaaagatacagactccttggagaagcctaaacctggcttaaattaccagaaagtgcctgcggaaattccaaacttatcgggaagtacattaaaagtccaattcttattatccttgaagatcaaatgaccaatgtacattactacatactctaatgttacacaaacaaaacataccatcttgctcttggaccatttccataaaagcttgatttttgagttcaaaccagtgctaagaaacggtctctcttggtttattgtttatgcggaaactggtgagacagaagaactaataccctcaagcagtttaataactttaaccagtgaaggtcgtttctctgcagcaacggcggtgcaatctagagcaatgtctaaggtctttcgcatgtctgattggcaagaatcggacaagatcttttggtcaagaacttgtgcagctccatctgtcaggtttatcttcctcctgacctgcttcactatgtcaagggactccccagaagagccttcttctgctttctctgcgctttgtcccgttacaagttctagtaatacaacaccaaaactgtaaacatccatatcttctgttgctttcttgctgtaatggttttctgaatcacatcaaggaaaaaaatttcactaaaggtttgcatgtacagaaaaactcagtcgtcctagatatttacctggtgcagtatagcaggagttggtgtttgcatgtaccagagactgaaaagcagtttctccaacgatatggtcaagagcaaaatcagagagcttgggttcgaaatctttgtccaagaaaatgtttgctgattttaggttcctatggagtaagtgtggcacatagtctttgctaatgtaagccaatgcttgagcaacacctagtgctatcttcaacctaatactccacggcagttggtcgccagctctcgatagcatatcatgtaagctaccattttgtgtgaattcatagatcaagaagatcatctcgtctttgaagcaaaacccaagaattcgagtaatgttcttatgccgtatctttgctatggttctcacttgagctttcagagatttcgaggatatattcttagaattcacaagcttcttcacagctaataactccccactagataaactgagaacgtatacttcacttccggaaggacaactttcattcaccactttcatcaactcatgctcagttaacttgaagggataataaaactccgagcgccaagtactcttgaattgcactttctttcgagaataacgatataacaccgcaaggaaagtggcaatagcaagtgctaaacatatcaaagataacaccaacgctttaccaccttttttatggaagttagaccgatcagaggagcaagaattgggtaaaccgggtccacaaagctcaggatttccttgcagaaaggaagctggtaacccggagaccagagagtgaggtacctcacctgataatccattgaatgacacgttaaaaagagcaagctttaggttctgtaagccttgagggatcaaaccagtaagactattatcagatagatcaagataggtcagaacatgtaaatcagcaagtgatggcgggatttctccggtgaatgcattgcctgctagagacaaagagacaagcttcttgcagtttttcagttctgggatctttcctaagagcctattgtgagagatgtttacaatactaaggacaggtgagtcgcaaaaattcggcggtaactctccactaaaccggttttgtgaagcagaaaacttatacaagctcttaaccaatccaagaccatgtgggatttcaccagaaaaggaattgttgactatctcaacttgctccaatgcagaagccaaagacacagactctggcacttgacctgtgaaccgattattatccgctctaataatcttaatcctgggtaatttccacaacacaactggaaactcaccagaaaatccattgttctgcacttgaagcctctccagactaaggcattcaccaatggagttaggcaatgacccttcaaagaaattcgagtggagagaaaggttaataagccttttaccactgcaaatgccactagggaaagagccagataacttattctgtgagacatcaagagacactaagttcttgagagaagggcctaatgatcgaggaatctcaccactcaggttgttcaaactcagatccaaggttctcaaacttgtcaaaccaacaaacgaagtaggaatctctccatggaaccctgacctatgcaacagaagctgttcaagcttgtctagcttcccaagaaaagaaggaatctcactaaccaaatagctgttttcagacaaatcaagaacaacaagctcacttagcttcccaatagcaggagggacgataccagtgagcaaattacttcccaagttgagaacttggagattaaacaataaccctaaatcttctggaatcataccttcgacatggttactgctaaagtcaataactttcaaggaactaaactcagaaatctgatcagggattgtgccccagatgagattagagctgagattaagagtctctaaagtaacacaacgagacaactgaagtgggataggctgattgaagaagttcaaggagaggtcaaggtgagtgaggtaagggaggtcacaaatggagtcagagatttcaccagaaagattcaaactttgaaggttaatggaagagacgtaaagagtaggagctctagtacatgtgataccagtccagttacaatggtgcgaagaagaagtgttaaaccaacctgaaagagagccttttggatcatcaaaggaggctttgaatctgagaaggttaccaagttcctcgttctctgtgaaagagaaggtcttggtgaagaagaagaagaatgtcaaggctagtgagattgaaaactggtgcttgaatctggtagccattaatgagttaagaatagagaatgaagaggatctgctgaatgagtgaagtagtgagagagtgagagtgagagtgagagtgagagtgagagtgaattgaatttcaggtgttgaaaatacggggtgggttttgcaattataagatagtagggttggttaatggtaaaaataaagagtatagggtttagtttgaaatttcccgttaaattttggtcgagggtctatggggaactggtagatttgtagacaaaacgacgtctcggagattggaatttcggatcgtgtctctctctgtttctttgtttcaatccgatttcgaatcaagccctttacttgtgcaccttcaagatttcgtttttccaggtcagtttcttcatcaagccaacctttttttctagggtttttcttcctttgttttttttctgggagttttctccttcacagtcctaagaagctacttgttaactctgtctttttgcttttgaagttaaacctagttgactttctcaagcttaaagagttcagcttttttttttttttaattggtgattttgttcttaattttgagctaccaaaatcatcgaattaaatgttaatctcttgaattctgtttcggtggtagtttcttggtttgaaatcatagctgcagcttcatgccgaattctcactggttctagatttagagtttagctttttttttttactttactcggatatgaatactgagtaaggaattgagtcaactcggatgtgaatactgaatagtttttgttctagctagagttgcaaaactaagagattcagctactgaagctactttagtgtcattcaaactgaattgaaatgatgtgtgtgagtgtgactgtacctaatttttcaaactcaggcattttcgactgtgccaacaccttaagtctcactgattttgactttgatccgcgagctaagcttaaggtctgaatgagtttctcagactttgtagattgtgcaagctacatgtctgattgggtttgatgaattgctttaaaggttgtgtttttgatgggctatttttgtcagtctgttagctacaaacagattgttcttatatatttgactttgtgacttatggtagtcagcagaatttcccttaggacactttgaataagtaaaggactctttagcattctttagctggcttgtttaactgaaacaaactagagaacctttttcttgactttataggacataattgaaaactatgttagcaaaagagatggtatgtaatgctgtttttttttgtgctcattcagcgcagccaatgctccgggtgaccaacatttgttcctgattcatttcctattgattcgtattggtaggtgttgatctttcttttatattctatcacctaattttgttctttctgtctttttttctttttcttaatttccttccgaatcctggcagtctgtgcacacaagagaaatttcaagaagttgttactaaaagagaggccacaagtggatattgtctttgttatcaagtgttagtacagaaaagtggtgagaaagtaatatggctgataccagtccgagaactgatgtctcaacagatgacgacacagatcatcctgatcttggggttagctcataatctggctagattttatcacttatattcttcaaaatagtgtgattttttatggaccaaacaaaaattctggtgttaattttaatgcagtcggagggagcactagtgaatactgctgcttctgattcgagtgaccgatcgaagggaaagatggatcaaaaggtgacatgtccatctctgtagataagatcactgtttttattcagccaatttataatctctttttgtttccttatattttgatccatagactcttcgtaggcttgctcaaaaccgtgaggcagcaaggaaaagcagattgaggaagaaggtatattaccttccattggttttatctttttttactttttcttttctttttaaattggtgcatcgctagaagcatagctatttggtactacgttaattccttttaattgctccctccataggcttatgttcagcagctagagaacagccgcttgaaactaacccagcttgagcaggagctgcaaagagcaagacagcaggttcaaatttgtttcttatttctattgatttttattttgttattctgtatacctaacggtaaatttcttgtttctagggcgtcttcatttcaggcacaggagaccaggcccattctactggtggaaatggttggttgcttattctccattagttttaattatgtttattttttggcttctaatttgtgtataagttaagttcatatatcaacttcctgttgacttggtgtagactgatcaattagtacatcatatctcatcccattacaatacactgggttatcagagtcagtggcagactgacatggttctgatagcaaaaactgttattctaattagcactggtgtagatttagatttacaagatgacgaatctcatgggtttgttttgatcatgtataaattttttaattcaggtgctttggcgtttgatgctgaacattcacggtggttggaagaaaagaacaagcaaatgaacgagctgaggtctgctctgaatgcgcatgcaggtgattctgagcttcgaataatagtcgatggtgtgatggctcactatgaggagcttttcaggataaagagcaatgcagctaagaatgatgtctttcacttgctatctggcatgtggaaaacaccagctgagagatgtttcttgtggctcggtggatttcgttcatccgaacttctaaaggtgaggtcaaatttcactttgtcttcaccgattgcatctgtttctacatagaacataaaaagaatggtcatagggaaaaatgtgttgaaacagcttctggcgaatcagttggagccaatgacagagagacagttgatgggcataaataacctgcaacagacatcgcagcaggctgaagatgctttgtctcaagggatggagagcttacaacagtcactagctgatactttatcgagcgggactcttggttcaagttcatcagggaatgtcgcaagctacatgggtcagatggccatggcaatgggaaagttaggtacactcgaaggatttatccgccaggtacaacacttgtgatgttttgagatgatatcttagttaagagtatatatatatatcaataggttaataatcgtctcttggttggtggtggcaggctgataatttgagactacaaacattgcaacagatgataagagtattaacaacgagacagtcagcacgtgctctacttgcaatacacgattacttctcacggctacgagctctaagctccttatggcttgctcgacccagagagtgaaactgtattttggtcacatgtcagctgtacaaaatccatatggacacaaaaccaggagagactattaatcaacacttgtcagattcttcttaccaaatccatcaacaaataagcaaatttctgggaaacaaaagactctttgtatgtaggtttcttctacatggttgtggtaattcatgttgttttagttgtagtcatcagtttttaatttagcatttgaaaagttcaatgttgtttatatagcatcttcgattatcttagaaaggttattgaattttgtttttttttgttacttttgtgtgtggtaaaggtgttttaaccttgcaacttctgtactgtaatcatttaacaatattaagatgttctatttgagttttgtagtttcatcgcttgtgtcttaaatcttatttagtgaggattctaatgtaaacttccaagagatgatgaaaatgaatttacattcaaagtaagtgtgatagatttttttgtaataaaaaaagggacatgtcattgtcaaaaccaagaattattttgtttttagaaaaaagagagtgttgcaattttcagaggactttttaaccctcagcatctagaggtccaccatcacttgagtttcgtcttccattcctgttttttttcagagaccggcaaaataaaaaaaaagaagatcgtacaactaaaaatacctcaaagaaggaagatacaaaagtagtaacctttgttggtgattgatactatatctgttgtgggttttagacaaagaccacgtctttgcagttgtagattggaattttccggatctttctctaaatcgctttttctccgagcaacttttgtttggggttaagctcaaagaatccgttcttttcaggtgagtctcttcttcaatagtcttaggggttttagttcttcagttttcttattctgcctctgctttcatgattgtttttttccattgaagattttgacctttgagggaattttttcctttttgctttatgtacgtgttaaggatccaaaatcattatttcggacactatttaaacgaattggttgagatttgatgttatgaagcttgaattttgtgtcttttactctgtttccggggctagtttgctaaattctgaatcttttagctctacttcagtctaatgttcagattagttactgtttcacctcacggagagctttacgctatagaagtccgttggttctcatttcaaatcatataggcgtgcttattgtttactttgattctctggctttgaatactcaaagttcttgaggtcattggttgcttcacagctatgtgttaagtttagtggtttggatctttatgttagtgtgacataaatagggtgatgtatcgtatcattgtttccactttcttgattctacttaatgcgttggtttttggcttaaaaatatgttttctttctctataactctaatcttttgtttatgtttaccatcttacttttgacagtctttactccatctagggtaccacgattggatcggtttttatctgatgatttagtaacagagattttgaagaaaaagaaaaatgggagatactagtccaagaacatcagtctcaacagatggagacactgatcataataacctaatggttagcttgtaaaatttctaggtcttgcttctttatgttcattaaatggccaaagttttgaaataaaacagtatttatgcagttcgatgaagggcatttgggtatcggtgcttctgattctagtgaccgttcaaagagtaaaatggatcaaaaggtgaatataaacatctctattttgcaagagtttggtttttgtcattgagcctttcagttatgtttttcttgtttgttgttgtaatcaacagacgcttcgtaggctcgctcaaaaccgtgaggctgcaaggaaaagcagattgaggaagaaagtatgcttagatttatgttcatagtttcaattcttttatgttttttacaagcatagctatttgcaaactctaagatgtttgttggttactgcacttttaggcatatgttcagcagctagagaacagtcgattgaagctaacacaacttgagcaggagctacaaagagcacggcaacaggttttaactttgttcagctatatttgtgtagatatttgctctgttgcatacataacatttttctcttaatcttagggtgtctttatctcaagctctggagaccaagcccattctaccgctggagatggtgagttagctgaatcataattcataaccatttattgatgatgtggttgaaaattttagttttgttggttataaagtagagcaagcactagtttggttgatggtgttgatcactttcttgtgagataattttttatgaatgcttctcttttacaggggcaatggcatttgatgtagaatacagacgatggcaggaagataaaaacagacagatgaaggagctgagttctgctatagattctcacgcgactgattctgagcttcggataattgtagatggagtaatagctcactatgaggagctttacaggataaaaggcaacgcagctaagagtgatgtcttccatttattatcagggatgtggaaaaccccagctgagagatgtttcttgtggctcggcggtttccgttcatcagaacttctcaaggtaaaaaacacacgaccaggttcggtttatttggtctcttcactagcaagtttccaaactttttacttctctactacagcttatagcgagtcagttggagcccttgacagaacaacaatcgctagacataaataacttgcaacagtcttctcagcaagcagaagatgctttgtctcaagggatggacaacttacagcaatcactcgctgatactttatcgagtgggactctcggttcaagttcatcagggaatgtagctagctacatgggtcagatggccatggcgatggggaagttaggtacccttgaaggatttatccgccaggtacgttacaattttgttgtttaacatcaaatgaaaaaagtattttgcagtcagttgatagaaccatcttattgtttgtggcaggctgataacttaaggctacaaacatatcaacagatggtgagactattaacaacccgacaatcggctcgtgctctccttgcagtacacaattatacattgcggttacgtgctcttagctctctatggcttgccagaccaagagagtgaaccatgactctattatacttcaacgaaggtccagaaaatttgagattcttagcataagatttgacgactttagacacgtagctcgtatacaagattatgattatactgttttgtgttgtaatgtttgtgtgtaatgaatgtatcttgaaatcataaaagtcccgtaacatttgaaaagcattaggatactaaagagaagcagtgactttggttttgtacaatatcattacaaattataaacacagtcattcagtttctaagcgaatgtaaatgagacataacaaagaaacaatagtggatgagttgaaaggagttgtcgctcatgattacgagaagagaaacaacgaaagcaatcaagcatagtctacgcatgcatttatagcaacttgtattatatccaaatccttggatttctttgcacaatagtttgaacttggttcacgtcacggtatgagtttctcatagacgctattaacatcaatcctcaaaatacataaaagaaacattggtcaaatattaaacataaatgggatttcaaccgtcaattaatcattaatcttatttgaatgcttaagaattattaagagttgtaaaatataagccgactagattatgatcagagaggttgatttattattataattactaattaaatcatggggtcagcaggaggcaggagccgcacaccaaaaaccttaagagtctatttttcttcattcaagagttttactgaatttacgaacacgctggtctggtccggtcacaacatactacttttaccgcagaacccagaccagagccccatctggtcccagtttgatgaaattgatcgtaaactacaaacatttgtataaaaagcaaagataagtcaaaagaatgacacctaaaacccctcaggtagtatttctctgcaacctgtacttgtgagaatcaattatacaaatgattttgttactaaagaaaagaccgaaagaaagaaagaaagaaagagacgcaaatatgatctgatctgattagatcggcgcatagattacccgtgggatcttgggattttgtactgttttttcagaaactgagatgcctctgaatcgtttctgtggcaaagcactcgtaccaatgtttgggtgtccgctccaagtttgccttttcctccttgctgcatctctagactgcttctagacctcaagtcatcaataagctcccgtgtctgttgcgtagttaatatgcgagtcaaaataccgaacatttggtggtaaagaaaaggttaatgatgatatgaaagaggctggagcagttttatactaacctcatatccgtgcaactttacaacaagacgaactctggctacttggttttcaaccactcctctcggaagtccatccccaccagaaataaagaattcctagtaacacccatactcatatgagctttaacgacacaggcatttcaggcgggcataaagataagatgacagttaagaaagagttacctttaagacctctacatcttcttctaacagctttgactcgcttggatgaaatacacgagacgcgcctccatctaatagtacacgaagcaacccatcctggtaaatttgaaatattatcaatcaaaaggcaaacacttgagagctttctataatgtaaataaacccgactgagattaaactacatacaagtgatgcttggagcaggctggtgactatccgatccctcaatggctccattatgacactacatagctgtccaagttcctggtcaaagtaattggacatttaatttatcaatgtagagaaaaatgccttttctaatattcattggtgccaaaacgccatataaatctaaaaatagtcaaggaatttcatgctccagtgacttctaggttccatagtttttagacaccctgaatcatgttaccagcaccttgactgtggcggttcagacttcatgtaaactgtaatgtctggctcagctaaaaattgccttgtctaaggggagacttcttaccgtgtctagggcttcgattaatccttccaatcttgattgagaaacatttggcttatacaaattttcaataaatggctcccttaaatcgcagaagataatcttggttcctgcagtgtgaaagaatcatgattaatttaaccctttgataatgaatttttcaagaatataaacatacgacatctcaccagtaaactcgcaaatacgatccagagctgcattgatatcttttctactcccctcaaaagattccttctggttaaaactcttggatttctcaaccatagattttcctatcaatgtagccaaaatgggaatgtatcattcatgtggctaagacaaaatacaataaatgagaatttttgtattgggaaataaacttcagcattgaataagcacatagatgttccatactgatgacaatcttttcacgaggtttttttgctatccagcgtagccacatgctgtcttctaacttgctcagttgactaacagcatactgtgaaaagcgtaagaaaacgttatcaatagcagcaacacttaaaaatgatgcttgaactgaggaagcgagtcttgaattacatgtaaagtattgagctgaacgcaaagcatagcggttgcaggaacatcaatgttaatcgaccttctctcatcaaggtgttttgagtcgaatagttccttcttaacaaaaaccttgattgctgtttccttcttgtaacgagtaagaacaggtacaggtggaaccaaatcatccttgctagctgaaatggataaaatccgataccagaattttccagtagacaaaaaacaatgtccaggttacggaagataaaagctcataaaaatataagttggagtttagaacttcaaagctcggaagcagagttcagtcagattgtacatacctagcttctccatgacatggttagtatatacttgaaatgcattgtcaatgccacgaaataaagcacttagttcaatggatctcattggaactttcagcgcaaaaaattgatcaacagtctgcatcaaagtgtattcaaaacactaattagacaagctcttataagtggagactgtggacttaattagacaagctcttataagtggagactgtggagtcatattgcttactgagatcaaaatatgcttctacaagaaacaaagatatcacagctccgttcaatacagttttgacacagacacagcttcattcaagtctaataatctttctcatgtagaataactgggaactaagtaaactttattttcaacaagggtcacagcaaattgaacaacctatctaaggaagctcaacaaagataaacctatgccttaagcaactgatgagactcagaggatctagtaaaacatgtgctccaaaccaataaaatatacatatgctactacgaaaaagatacagaaaaagtggatcataggacccctacctcttctacaatcctgaaaacttcgacaattgagctcccataccgctgttgaggtgatattgggtcccaatgctatacagaaaagttaagaagcgttatggtttgaaaaaaaaaagttgtatcaaaagacagataaagcaattcttcgaaagatcagtaaaggaacaccaaatctcacctcttgtttataagctcgctccacccagcttaaaattctccccagttgtgaattgatccatctcaaaaccaatgtgccagagagggattcgacctaaattattgagaaatattatagccaacgtgattgtcgctgaatttgaacctgtttataaggtggcttaacccatgcgtcttagatttcaaagtaaaacatctgacctcatatggaattaattttttgaagtaaggtccacttgtatcctctccgcagacagaagtcattaactccagtaaatattgctcaaggctatcagccgcaggaaaaacagagacagcgtcctcagtcaagtgttcagcaccatcaagaaaaggtttctgaaataaaatacaaattcaagatgtcattaatgactgagatgtagtaaccaaaaagtaataagatgggacgctagcatcaagcttaccaacttgttcccataaagcttgtgaataagggatgcagaaaacgcaattgcctgtgggtgcctctgagataaaattggcataaagatggtagagtcctttttcataagtttcttagtctcctcagcaagcaatgccaaatggtgctcattatttctgtctgatctatcaatggcaagtgacatctgtaaatttgcaaaaatcagccccattataccctccataatattatgcgtcaaattgttcacaatggaatcagaatttgctcaattcttagaatgggcataaataagaactgatatgttatcgttggtcgaacatctagaagattggtataacacttacccttgtgaacgtattcttgatggaagataaaacgtaggattcaatttgctctcgatctgaagagttagaatgcatcgcctgtagagaaaaatgacaatcattctcagttacaagtacaaaagtcatgttggggaaactatgtcaccatcgctccattaaaaagcaggtaacatactcgatcagattcctccaacaagagcctccaagttatcattgcaactgtgactgtatcctccatgacaagtgaaccctgaaatgtagataaaaataacaaaatatctaacttcaatggtataaatagagaaaaagaaattgcttgcaatagaaatgtatttagaagtaagatagatatagggagcctgaggtggacatactcttatttggatttatgtatgatatataaatttaagtgtgatatattcatgtgtgacatacatatggaatagttggacatattaaacaatgcgtcaattttctggacactactgagactaatgtgtccatttgatgtaaaaaacacaatatcacataaagcaagagtacagctcactagacaaagtaaaagaagatggctaatcctatatacgaattactgtaattgaattgaaagcaactaatgtgtctgaacgcatttgttttagataaaacctcggcaaaatgcagatggtagtcgcccagctgcttatcggcccaactccgtataggtgacaagaaggactccaggaaggatatctcttcattatcaaccctacacttcaaggttttcaagtgtaaacgctcttgaggccctcgttgttcttttagtgggatcttcttcagctgctgaatagcatgtcgcagaagtcctcgttcactagtaatgacatactgcaaccacacaacacactcataagctaccgtaaaacttcccagctgaagcatcaatatcgttacaataaagaaaatatctaatccatcattacctgtcgaaacaaaacccaagcatagcatgtgtaatggatggtctctgtaattccgagaacacgccatgttgacttcaaaagctcaagaatttcttcaacttcctaaaataaaataacaaaggttactttatgaacatttcatagtaacagaaacaataaactgtaaggcaacttgtcaagaatttctttctggtaatgtatatgggaattataatatgatggaaaaacaaaacagaggaatctaagcagctcaaagagtgtcagctgataaaaagaacaaaaacctttcaaatcaatatgatttttaaatgaccaagaatattgcttctggaaaatgtattcaataaaattttgacagaattcacagacctctgtgagcttcccatcattcaatatgtcaaagacacagagaagcaatttttcatatagtctgacattcaaatgatagccatcagcccaatggcagacttcacccgtcaaatcaccacgagccggtctctcagcaagtgagatagcaacttctctaagagattttaaacattctgctctttgcacttctccagctgaggatggaagagactataaatagaaaggaaagtaaaagagaagtcaaaaaacatatcatgaaatcactaaatgtaagaaaattcagttattatgggataaaagccaatagagacaactgccagaaaaaaaagacgctaagccatttttttccacaaagaataacccatcttaacctttggatgatattatgccacacccttaaagaaaagacctaaaaatacccacttccgatatctgatgtctacacaatataatagatcacataaacataataaggtggaaaaaatacctctgattcttcaatccttagcagaagactcttcaggtcagttgccttacgacctgattctccaaatccaacaactggattgttaatgagcccctctgctaacatgtttaactgaaataccaaaacattaatagatgataggaccaaatactaaaagaaagtactcaatattacactcagatgtgaaaaggtggtctttacctgccttttctgccagcgtaagtatgctttcttgtcagagaactcggtacgagacacgcaacatagcaattctaaaggcaccaggaggctgtccattcttttgccaacttttcccgctagggcattaagcaacccttgtcttgttctgatgtccatggcctcagaaatctgtatgagccgaaaatattaattgtcgtatacagaacaaacacataaagtaggctaactgagaatcatatggtagtgcaggcaacagcgccaaaaacataatacaatacattgacatatggaaagagtaaactgacaaacgaagcgaaaaatgtccaagcgcatactaaaaaatcaatgaagcagagacatttggcatacaaaaatgagggcatcttaacatggtaattacataagaacaactttacaagaaaagatagagtagtaaatatgtaattccatgctctgacaaaccatatatgcctcaacaacagagataaaaaagtaacagtaagagagaaagagagagggagtgacctccatttggccccgcatcatttctaaaagagaaaccaatcctgatgagctctgagattgagaaacactctcacttttgcgaccaagcttcttaatcagcctagacctgcttttctccttctttttctcttttgatggtactatgagacctctacatgatgaaaaaatacatgttgaaaacatatgaaagagaaattatatcagtaaggatgtgactaatattataagcacacctcaactgaacaaagaaagtaaaaagtaagcaagacaatattctgtataccctgaagctccagcgcaagccaaaagtatttcaaatgcagtttcacggagatcatcatcggtaatacctgaaacagaaatacattgcaactttcttaataaatcagcagggccttgacttttcataggtgtgggtgtactacttatggtccagtcgtagttagctctggctactggatggtataagcaatgataattttacaagtactcctttagtttctcgaactaaaatgccctgtccataaataataaattaccaagtctacaaatgcacgtatgatctgaataattttatgaggttattcaatggaatgacagtaacaatagtattcctttatcaaatttacttcttaaagatatgcattttccaaaaatattaccagtcgcaaaggagggcagtcttggcacaagatcagcagcatcatttgcagtccgcctagagatcctgaaattaccaacttcatcaagatcatcatcgtcttcaaaatcatcaatgtcatcaacagtcagctcttgagcttttggtgaatcaaaagattctgatcgcatcaatggtggcgcagatggtgactcacaccactcgggatttgtaaccatgggagaagatgaggaaattaatacaggaataggcggtggggccctttttggaggtgagccagaagattcaggaattgtagccaaaaagaattcatcagcagtacccacgctgttctgaaatatacataagactcaagcatttagaaaatgacttatataagtcgatggagaaggagtccgttatatgttaatagcaaaaggttttccagaaatgaacaggcattatcctagaaactgttgcaagcaactcctagtaatgcttaacaaaagttagaagtatcaattaagaaagcaatatgttacatgtacacaccatataaggcaatccaatgtgatcatgatagtcccgaatcgcttcagcgagttcgagcattccacctaaattgaaacaatacacactattaatctgaaagaaaaaaaacagaacgatcacgaaaacaaaagaagaaagaagctagtagtacctttcttagcacagttaatgacataatcaacactaacttgatctaaatcaacatcgtcaagagtcacagcaccaggaggcattataactttcttgattaagctaccagccaacataaaatccaatagcttccgcctatcccggcgatatctctgaagaatctcgacagcattttctctatacacgcaagaaaatacaacagcacatcgatcaaaatgcaatagcaataaaacgaagaagattgtacagtagcccaaaaacaaaatcaaaagaagaagaagaaagaaacatactcttccatctcgatccagctgcaataatagtcacacggattctcagatttccaattgacctgtgaaatcaaaagccacgaatcagtaaatcaaatcgaatcaagtctacttcaagtacgagaactagagactacatttgaatgcagatttagttttagaagtagagtttaactgaactaaccaatcattttatcagattcctcgcaaacaccggaattatccaaaggaaggattgatttagtgagaatttagagacgactgaatacgaatatgatctggtaaatgtagatgaatgaactgttttggagaacttcgagcagaaatttcgaggtggtgatgagcaaatctagagaatgcgccggggccgaaagatctatctgtatattattatttgggaaaaacaaaatgaagctgatttgtctcaactttaatttactctatctccctaattttctttctttgacttcttttgttattccagaacaccgaatttgtcaaaattgaagtctcaacttcattcatagtgaagaaaatatactatgggagtataatattaattttcattactgattttaagtaattagataattatttagctttttagtattcctaaatcttatttcttaatgaagatttgaattaatttggaaatcttaaaaagattaatgttattcaattatcactgattttaatattacaagttgaaattcctatgcttttcactaatgatatgaatattgggccctcatgggccaccttcttcctaaacttatcttctttacttctttcacaagccttgtatacaagggcaattgcctccacatgaataaacaagaaacctcacaagaacttctatgtttttttgacatggtatcagattagccaacacatctttccacattgtttatgttttcgaattttggaccgaactggatataaacatagattttgtcaagcccatatgattttttgtcaggcccactatatcatatattaaccttacgaagtaacaagcaaaactggattaaccactttacctataagatcgtcggcagctgggtggattttcaaaatacctcctataaaggacctaaaccaatttccagttttaaaagttttgcttaagagagtgagagcctgagaggaacattatccactgcatccccatgagaccatgggtcccactccaccgcaaaacagtctgtcacgtgtcatcacctccctatacctacaggacacgtgtctacaccaaatcgagtgaacatgtgacgtgtcgtcaccaaacctgagccgctaaccactgcctgatctggagggtatatccgtaacttaaaatccttttgtcgtctacccgtaaacagacaacttttaagaactacaaaaacgtacaagttggccagttgtgtcttgcaagatttaattaattttaattcaagtgccgacctcacacagaaaaagatatgtttaacacgtggaccaatgaaagagttgctttagatggaggagtaatctaagccacaaatctcgtttgtgaattctaagccactaactaaagttcaaactcacgcgctctccacttcctctcttcaacttgcttctttgtcttctctctctttcctccttcgcactcacaaatctacagaagatagaagaagatagactcataatcttttggatttggatttagatctgatcataaaggtgacttcttttgattattttattcttaagaattcaaatgtttttctcctgttggttgctgaatatagtgagtgacttgttagcaggttaaagtatcattcatggatcgttattcgaggaggaatttagaggatcttgttgtgcctaactatcaagagacatcagattcgtacccttctcctgatatgtggggtactggatggagcatgaactcttcagaagctgctgagaaatgttttgattatgatgtgattcacaatggtttcagtggaggattatacagtcagatggagatggatatgggaactagtgaacaagtagaagaagaaactaagaagttaaaggctagtggttgttttgaccgttcgcttcatgattttgatgaaatccaacacatggatgacatgttcttgtaagaaattgtttatatatcacataaaaaaaaaaaaaaatctatatagtttttcgatgtttatatttttgtgtctctctctttttgtttccggttttgactgaagaagttccattttggaggatgttccagggaatgagaattttctttctttcaaggagtcggataataacaacagctccagttcctcctatctcgacacaactgatggcagggaagtccctttgttccattacaactgggaaacttgtcaagatatgccacttatggtaagaatcgactcttttgatatactagcaatgttaaatagtagaaaagagaaactaagtgattgacaaatcttgttgaattcagtagactcttgggattagtctggttttggattttggtctgagatctctcggttatgtgtttgactattgttgttccaagtgagataatagtaaagatgttaatgatcttggaacattcttttggttaaggaggaggatgcacctatgaatctgtgtgaggagaacaaggaggaggcatctgctgaagaagttgtgttgcaggatctacaaagggctacagaaatggtgagtgtggtgatttgatctagcctatataatcttctttgagatttgatctgtcttgtaacagacttttacattcttcttcttatagttgactgatgatacccgcaagtgcttccgcgataccttttaccggcttgcaaagaactcacaacagaagtcagactccaactcggatgagttccttgaggatagaaccaggtaaagagagcttttttcattaatcatactttgcttaaaaatggactcatcaccttcaatagttctaatgactcatcaccatctatgacgtttttgtcagtagggaaactgaatttgaaaccaaactcaatcgacagagccgtggccaatctcacattcaacaagatggaatccaacatgagaaatatgcctccaccgaagagactttcttctgttcaaggataagagagtttcatcatatttggtaataccatatgtgtatataatatatatgtgtgtgtgtatgtgtgcttggcttgactttttccaagcttcagttttgatctgtttcattagactctgactctgcttctggatttccaatttcttatgctatatgttatttaccgagtgaacctgtgaatgtacattaccccatgtagaatctgttgtttcaatgtatcaaaaaagatattcttcagaccttttgttaatttgttgataagaggagacacagaaacatatctaagtgggaaacgaccttgggaaacagcaaagcagaggaattagtcttataccagcaaacataaacatcaaataccaaaacaaacacaagtcaatttcaatatcacccgaccataaactagaaccggcgaactcaaatataaattatctaagaagaaagtctctgactcacgtttgcatattaaatagggatataatatgaactcaaacgtgcgttccattagtttctaaagattgtataaagatttggtctttactcttaacaaacaaaacatttcagtctgagaaaactcttaacgtttttttgtaatggcaacaccaccgttaacgccaagaatgatgactccaacaacaatgtcgcctctcgggagtccaaagtcgaagaagtcaacggcgacggtacgaccggagatcacgttggagcaaccatctggaagaaacaaaacaaccggctccaaatcgacgaaactcttccgacgtgttaggtctgtgttcagatcacttccgatcatgtctccgatgtgtaaatttcccgtaggaggaggaggaagactccacgagaatcacgttcatggaggaacacgtgtcacgggaacgttgtttggttaccgcaaaacgcgtgtgaatctagcggttcaagagaatccgcgttctttaccgattcttttattggagttagcgattccaacggggaaacttcttcaagatcttggagtcggtttagtgagaatcgcgttggaatgcgagaagaaaccgagcgagaaaaccaaaatcattgacgaaccgatttgggcgttgtattgtaacggtaagaaatctggttatggtgtgaagagacaaccaacggaagaggatcttgtggtgatgcagatgcttcatgctgtgtcgatgggagctggtgttttaccggtgagcagtggcgcgatcacggagcaaagcggcggaggaggaggaggacaacaagaaggagatttgacgtatatgagagcacatttcgagagagtgattgggtcaagagactccgagacgtattacatgatgaatcctgatgggaacagtggacctgagcttagtatctttttcgtgagggtttaataaaacgacgtcactttaggggaaacataaaaacttcatttttctctatttatttttcctgttgattttgtttcttttggtattcttcttttctaatttggtaaattattcgaaatgatttgttggtgatgtgtatacatgaaatatatatatactacatcttctgtggctattagggaaatctctttggatatgcaaatatgtgtagatgataattaatgcaagtttggttagcaaatttctaattgtattctaggtgtcgatgtgtctaatctgagttttcggttataaaaatcgaatgaaaatggaataacattcaactcattttatttgatgctttggttcgttagtttctaaaatatttacatttgaactagtttatcctatttttgtgtggatttggtattggttagacactttaatttgtaaaataattatcgtgaaaccttgtaatggtctgaaagaaagttataatatatatgtgtttaaattcttaaatggtacttaactatttattttgatccgaatcatttgtaatttacttcaacacaaatctcgtgtttattgattgctcaacaaccccctccgtttagctatagctaaattcttcaattctctcggtgacatgatgttgacattgatcattgtggttcagtgttgtatttactactagtgcacaattattttgtacttactcattaatcgatttcatgccataaatattagttaacaacgaaaaataagattggaaaacaaagaaaatcatgctatgtttttatgatcaaagaaaagaaaaaataaataaaaaagtaaaaacatgtgattagatccaattatacataatccattagtaagaaaatatccatgaaaaaaaaaaaagtccatgaaatacataaacatatgaagtataaaatttattcatatttgtcaatacatttagctacatacatgcatgaacaataataatacgctagaacaaataaaacataatggcaaacacaaacgacatatagtaaaatagaaataaaaacgacaaattaactaaagtgtggacgttacgttgcatcattgtccatctgtaacaataatacaactgccttcacttaacttaaaacttttataggccctcaaaacaggagtataaatgtgggcaggtggcctcatatttaactcaatctgaaagtgagaccagatccagctaacttgtcatccactaaggctgacaatctttccacttgtgatggcgacaaatagttaaccaaatcactcacttctcctttcctaaacaagaaccggttctcatagttctggatcaatttgcttgacttgttcacctccaacttcttcagattctcaaagctacacagatcagcgatagctttcacaactcccttttgttcctcttcttcggtgaaaggaagtcctaagaaacttgctagcttcttcaagttggtctcgatgtcttctttgagatcctcgtactttaaaaataagactttctctggcctcttcaagctctctctccagtatcccaacatgtgttcccaaaacgggccaaatccgatcagtaatccccggcaatatagatcaaaagcttcgtctagcaagactgcgctcactgactcggaagtgatgttgttgatgtaatgccacatggagatgaatgtgtcaaacgggttccggcacaggtacacaaccttcacactgggattctcgaccgaatccttaagggcaccgaacggtacgtgggttgcgaatgttcttggactggctagacccgagagatcgggaacatttccgttggcgtaaagcttgtactcgaagaaaggtacgaggtcgtgagggttggatgtgagaagagggtggtcggaacttgatgaggaaaccggatcaaaccgatgacgggtaaggatggtgaaagttaaagcttttaaccaggttgtgccagatttaggtatggtggcgaggacaacgtcgtctggaagggactgaaaatgtttttggaaagacgtgatagcttgaatctccttagcttggcaccgaaacccttggaataagtaaaggtaacgatttctccgtcctctctccttaggaagagagtccaacatctcttggaactcgtagcttagcccttcttcttcttggccttcgcttttgccttccttaaggagctcgggcttgtgacacatggagaaacttgggatcgccattggaatgctctttatgcttgactatagaaaatgtttcttttaatggaatatttgtgtttggtgtaagatttcgtgaggaagttgggtgtttatataatagcccaaaatgcatgagatgatgcgttgtgaagagaagagagcagcctcacttaatcgaaatcttgttttccttccttttaatagtaacgacgagtcattatctattctctctacctagaacctactagtctccacagagttaaaaggtctgattggctctccactatcacccgcaaacactacttattagtatctttttttcgaggatttcataaaacgacgtcactttagggtaaacaaattgagaaactacattacgtcatttttcgatttgttttactttttctgttgaatttatttttggtattctttttttaaaaaaaatttggtagattattcgaaatgatttgttggtgatgcttatacatgaatatataattcatcttatgtggctgtaagtaagagaaatctctttggaaatgcaaatatgtgtagaagataacgtaagttggttggcattgtatccaggggtcggtgtgtccaatctaatttttccatttatttttagtttagtttatgaaatataaaaattgaatgaaacggaataacattcgacacattttgattcggtatttgattggttacattttctaaaatactagtacttaagaaattttagagttgaactagtttatcttaattatttgtgtgggtttggtattggttacactttattgctataagaaagaaaattgtgaaaccgtgtaatgttttgaaataacatttctatatgtgtttgaattctaaaatgggttttaattagagcatctccattggtttaggtacccatttggatatctcaacacaaaatattactatattttaatattgtataattatacattaaatttttaactttaaactaagaaatgaaccaattaaagaagacatgtgtaaagaagggttcttattagtatatcaaatgttttttttttttcaaacgatcaaaggttcttttatctctttatctttcatagtttttttcattttttttattattttagtggaaggtacctcattgatatatacccccaatagaaatgtcctaattgtttttttaattaatcatttttctgttcgtgaatttttgcctagagattttacattgaaaatttgaaaagatctttaaacgtacatatataatggtcacaaactaatctattcacgatcaattgattttcgaattgaaaatctacaaaatcaaacataatcttttcaaagtctatagtttttgacctacataaaatttattacaagttttagagtgaaatttggttcgagataaattgatgaaaacaatcatctcaaaaaatgtttggatatagcattgaaaatttgaaaaaatctaaaattaatttattcattaccaattagttttaagtgaacaatttgtgatttctcatgccaatacttcaagtttcattaaaaatttgtctgatatttgtaatttacttgtttgtcttttatttgcatagtttaaatctcgtgtttattgattgctcaacaacccactccgtttcgtcatagctaaattcttctctcattgacattaatcattgtggttcagtctcgtatttactactatagcacaattatcgtgtacttgctcatatacagatttcataccataaatattggttaaaatagaaaaataagactggaaacaaaaaaaaatcgtgctaatatataggttttattgtcgacatgctatattgttctcaagcttcaaaagaaaacaaaagaagtatatatatatatatatatatatatataagtaaaaacatgtggttagatccaatgatccatgatccatcgtcttagtaattaatataaaaatatctatgaaattatatatatatatatatatatatatatatatatatatactcaattttaacatactttacaatacatttagcttcacacatgaacaataatactctagtaaaaataaaaacataactgcaaaaacaagcgatatttaataaaataaaaattcgacaaacttcggtgttgacaaaaataaaaacgacaaattaacttaattatggacgttacgttgcttcgatgtctatctgtaacaacaatacaactgccttaacttagcttaacgtatatagtaggccctcagaacaagagtagaaatgggggcacgtggccttatatttagctcaacctgaaagtgagaccagatccacctaacttgtcatccactaaggctgacaatctttccacttgtgaaggtgacaaatagttaacccaatcactcacttctcctttccgaaacaagaatcgattctcaaagttcttgatcgacttgtttgacttgttcacctccaacttcttcagattctcgaagctacacagctcggcgatagccttcacaactccctttcgttcctcttcttcggtgaaaggaagctctaagaaagttgcaagcctcttcaagttggtctcgatgtcgtctttgagatcctcgtaccttaaaaagaagactttctctggtctcttcaagctctctctccagtatcccaacatgtgttcccaaaacgggccaaacccgatcactccccggcaatacagatcaaaagcttggtctagcaagactgggctcactgactcggatttgatgttgttggtgtaatgccacgaagagatgaatgtgtcaaacgggttccggcacaagtacacgaccttcacaccgggtttctcgatcgtttcctttagggaaccgaacggtaagtgggttgcgaacgttcttggactggctagacccgagagatcgggaacatctccgttggcgtaaagcttgtactcgaagaaaggtacaaggtcatgagggttggaagtgaaaagagggtggttggtactcgaggcaaccggatcaaaccggtgacggttaaggatggtgaaagttaaagcttttagccaggttgtaccggatttaggtatggtggcgagaacgacgtcgttttcgagggattggaaatgtttttggaaagacatgatggcttgaatctctttggcttggcaccaaaacccttggaataggtaaaggtaacgagttctccatcctctctccttaggaagagaatccaacatctcttggaactcgcagcttagcccttcatcttcttcggctttcgggacgtcgcgagttttgccttctttaaggagctcgagcttgtgacacatggagaaacttgggatcgccattggaatgctcttcatgcttgaggtagccattgtttttttttgttatagatatatatgaaaattgtttatttgtaatggaatctttgtgtgttggtgtaagatttcgagatgaagttgggtgtttatataatagcgcaaaatgcatgagatgcgttgtgaagagaagagagcagcctcagttgttatcgcccacgtgggaaataaacggcgtgtgcgaatattagttggcccactccatattttcactgatactcgaattcttttttattatttctcgaattattttttccttcctattagtaataatgccgtgtcatgatctctacgtactattccccttggagttagtgtaagtttgatttgctgctttttcatttgtctttggtccataaattgtcggcagaactcaatcttggaatctttaaactaggaaagtcatttgtctttttatggaaaataggcaagtcgtttctttttcatatcaatacgcctcattttactcaaaggtaaaagattaaaaaaacatcctatcttctagctttatcgtaatattttttttttttctatacatatttttaatacattcaggcacacccatcaagtatagttttcttctgtataaataaaaatgtaatggcaaacacgatgatatttattggaaaaaaaaagttcgacaaactgaaatgtggacattgcttcattgtctatatgtaacaacaaaaaaacttggattttcaactttaatgaaattgaataaaatatctatcgatgaagaccctagtaaaataaatagaaaattgactgattttgttttctttatcaattttttttaatgcaatctcaactagtagtgattcaggttaggtttttgcttaggtttgacgcaatttcagtttggttctgtgtaaaaagaactttgaaaaattatatatttgattatattatattataactattttaataaatatttgcatatgattaataatataagttttctctttccggcttggttttacaaactaacggttttggttttagatttttagttttaaattaatgaaaccaaacagcttataaataaatttcgatttgattatttcaggttagttgttgtccaccctaatacaacgtcatgtgcatgttcccaatacaagttcttgaaggtaatttgttgcacttttttcattttctcgggtctcaattttctttttttttcttttttttttttgtttgctttcgggttttctcactttctatatattttgtaccgtggacattcttctatctttctgtagggctccgacaagatagtaattaaacttcaacccaagcgataacattatgttgttcgtatgtgtccatttcttgcttttagcgaagacgatgtacctagacctaaaagataaatccgtttatcgaataaatcgtcatgcagaaccatgatacgtgttataacgaggacctacaattaagttcatttgtattattctagttatcaacatattcatcaagcttaagttgtcgactgaattatccatatttggacagataccctgaaacggacggaccaattatagctacaatacaaataaaatatctaaactttttgtttttgttaacagagggaagcactagttaacattgtagctattataaatttatatgcttttcaagatttgtctacaacgatgaatattttaatgacttgattccattttgtgtttatcctttcaatttgagatttgtatgtttgtgaattattaacaatggaaagttcttttcgaaaataaagaagaggaagaaagtttttctcattatgaagctattcattttccattgttttggtttaaatttagcgattggggagtaaaagcactagggacgaataccaaaatagattattatgtacatatacgagtgattggtctgaaaatagttctaacttctatggcttgatatttgtagatggtatattttaccagataaaaatggaaagcttagaagagactagtcactcgtgggatattgttcgtgtcctgtttttaatcagcgtatgtattgacagttttcagaattttgactagaatgatatagtgatataggtctttgatggctctgatttcacttatgaagaagtttgtttggatacgagcactgacctgtctttgtttatcctttttcttaatctttatctttggagttgaagattcttcaagaagaatatatcatctcttgtaggcttcaaagcacactcacatagtcccatattaacgcaagaaccactccatacccacgtggtaccacgttcacttccacacatcgcgcatggacttccttatattatttactagctaacttaggtgagaccccacatctagcttaggacactatttataaataggtatacatattgaactatatataattgattaaaacttatcaaattattgttactttggattaattccaaaacaatttaaacttaacaagttattattacttatgaaattaatcttctcaagtactttacttttggacaaccaaaaaaatacgagactttcaccggaaactattcaatttagggaccatttatgtgctattgcatcctcgaaacgaatcttgcaattcccttcgaaaaatgatttattattgcctcttacttttttttggccatctattgtctcttactaattaaaaatacttttacaactgatacttaatagtatccaaatattaataatcttattcggactatgattgcctaatttatatccttgttaagtctcctaccacaataaattgtacagtgtaaactttaaacatttatcagttaattcatcttctataatttttaatttcgttcatccaaaatatatagatgtttgaatgtttcagtgtaggactaaattattagtttgccagaaaactttgatagaatctgtcaatggtaaaataatatgtattgtaaacttttcttacaatatataaggtaaattctgattgtggttttgttataacctgttaatttatatcgctagatgatgtcatggttttagactttgcttacgtaataaataataataatagatttcttttcaatatatatgaagtctgatgtttgacatatatatcgacatgacgttaaatgtttgttcataacaaaaaaaataacgaaaaaggaaaaacaggtaatcaactatttggaacagataatttatcgacatgccgttaaaggcacactcttggtatcggatgctttgatgcattaggcaagtagagcctacgttacgttgctaatttctttatctttgtctcttctccttattataataactcgacaaagcagcaaaaaagtaaaatgtcgacaaatatagaaaaacaattgagtgacttgaggcctacttttaatggccaatgaatgctacatgtccttgattacgactctaaatcctaatctcttctatttcacagttccgtgccgtatttttttccctcgtttttatcgagtaaggatagatgattgatattcgtattttgaacacatatttttctctcttaccaaaaaagtttcggacctatactaaatggataatttagttttatatctcataaccagttctgccaacttatatgtgattgtatattgcataaatacgttacatcaagaatatgtatcaaagtcatcctgtgggataaatatgaatctaaacaaaaaaaagaagttatttttgttttgaaaattggcaccaaccattttgaacttttcttttcttcgcaattttttgtatgaaaatttcatttttcccctgccaaaacgcttttgtattaggaagatatatgttcatatcctcaggatgaatattaactggctgaagcagacctaagactctaaaagaggaagaggtttctataacaaaaacgagtaaatgctgatataccttcaaaatcttaaagattcgagcttaatccacagcgaatgaagtctactttctcagtttctctagtactcctcaagttgtggtctgtaacatgaagctaagtcaactgaaaccgccaaagctacatgagagctaatgaagaagtgttggaataagagagagatagataaactatttgtcttaattgttcttatttaagcttaataggaaacagagcgtgttctgttttttgtatgtctacattttctgcaaaaaaaatccttgtttctcattcaaacaagtgattaagcaacgtagttaaatggaaagcttccatttaaagattgaacttttcgtggtccaaaacctaatgaattggtatcaagctcctacattacagaagggagctagatccagtcagaacttagaacagagtctcaacatgtcttcaagaaagaaaaataatatcttggctcgccgaacacatagaggagacagagcgagccctatataccatttaatccctttgtaaatgcaggcatctttttgacacagaccaattctccagacgcggtaaaagcaaaaataataggatttgagatttgatataatcattcactcaaagagaagagtgacagagtgtatacatacatataggtatatccgaatattaacagaatgcataatcttggtatatgcttcatctcatttttacacaaagatataatcctaggctaagcccctaagaggtactacttgttgttggaacagaagacgcctctggctgagcctcactagccatagtttccggcagtgaggtttcttgctgagccaccgatggagtttctggcagtgaagtttctagctcggccaccggtggggcttctgtgacggagggggtagaaggttgaacaatttcagaaggcttgaacttgttgatgtagtagctaagagacggtccactgtaatccactgctttgggtcgagttggggcatctttcccgacttggaggagtatagaggaagctgcagcgactgcgataagagcaatgcctgctacgattgctgctgtgttctcagccccatcagccgatgatcctgcagtacctgagctaatcgcgctctctgcaacatatactgcaggctgaaaaagttacaagaaacgctattctttagaaaaaaagccaatggaattgagtcgataagaaaaagccaatcgaattagatcaagaaccccatctcaagaagatgcggggtttacatgacatgttgttgcaagctaatgcatatttcttggagatggaggtcgagatcgatgacagaattatggaacaaacacacacacacacaagaaaagccaaaaaaaagttaatttcaaacgagacaaaatataacagtaaaactgatcagatcgaaagcctagttttctttgttatccttgaagcaacgatcaaactcaaagaaagagccaaatgtatattgaaaattggttaaagagatctcctaactccctgaaagccaaaaggctcacaaacaagccactggtcaaatacccctaatctcatcttgttgttatgcatccactacattctaatgcctatcacagaatcataagaacctgttccctcggcaaagtttgaagctttttctctcaactaaaaaccagtatccctccaaacactatgagcctaaaaggagtgcctgtgcttccctaaagatactaaaacttacttaggtataacctaaactaataaaagtagagatgagtggagtggatagatagatggagaaataaagaggaacgaacctcaatggagtaaacattagtctgaccagcagtatctttctcaacatagccagtccaaccacgcggcttccgaggaggaaatgttcccaccactttcgtcttctctccagctaaccattccatactcactgttcctacctgttgcgtttcacccaccaaacctcatcaatgacatcatttcaattgtaaaaatccccactttataatccagtttcactaattagctaattttggagattccgaaactaaatcttctaagtaaccaactcatatttcccagcaatgttgaacaacccaattgcaaaaaaattatcatcatgggttttgttaaagaaacaaaattgagcggagaatgaaacaaatacagaggtgggattgagtacctccttctcgggagcacattcttcggcattacaatcagcatcatcggaagaagctctaacgacggagaagaaaagtttccgtccgccggactttgaattgatgaatctgccaagaggtttaggcgatgcaaatacgtagccgtttggggatagcaagacattcgacatggttgatcaaataagaggagaatcttgggattgttctatcttcttagagaaacagagaagaagaagataaagagaggaagaagatgtgtgtgtgttatgtgtggtgggcttttccactagcctacgcgtgtaactgccaaacccacaaattcctaactccaaattataccaaaccaaattgaaacaatttcaaatcaaaccggaataaaattcggttttctttctgatctgttttctcaatgacgaatttaaaattcggttattcaatccaattattggaaaattttgtatggattagtgcaccttgatttttttctgctttattctgtttctagagatattccgcatatcgcttttttttttcccgcttcgtccactttatattccattattcaattcattttcccgtaaaaagacattaacgaattatatcagttttgccatagtttaatcataacgaccccaaaataccttgtgtgctagtgcttagccactatccattgtattgtaccttaagcatgtgtggggttcaaatcacactttcccggtatggaataaaagaattgtatacaagtaccatcataatggagtgaaccagagtggaacttgtttaggtggttacatgatcgatgtgattgttgtctctctgttctctttcgcattatcaattttattttatgaaatttgatttgattttaagcaattggcgtagcattctcttttggttttcactttctacattactcgtttgaaactcaaaactatattttttcttttaatcatacttttttttaatcaattttctttctctactagttgataaaattatgaaaattattgtcttatacatattaccatgccagacaaaccctatacaagctttaaagtggattctttttgaaaactatgaactgaaatatccactagtcgcgctatttctgatgggccaattgatgaacatcgattgtcgataaacaatttaagacaacgactaaaatttgattagatcattgtgctaatattatattcaattttatgtatttctaattacctaatatgttcaattgtatatttgtataccgtaaggaaatataatatagtttcattatttgattagcttagatccaacactctagataattgaagaacaattaaaaacataaattactagatagcacaaatgctacacacctccgccctctaagactggtgaagcaaacgacgcaagacaagacaaaaatgaaacacacaaataacacaaacaaacaagtctctgcataaatatgagtaggctcttattgtctcattcatctttctaagagcatcgttcacgtgccaaaccgagccgtccattggggacgtcgatgaggacacggtggttctgctgctgcatgcttgcgatcacattgacgacagagtttacgttttccggcgctgcagccatggcgaggcacgacgtgcttccggcggtactgtgtaacatcaggttatcagccggcatcgtcatgttcactcccttgaacatgaatgttatcgtcggcaccttgacttgccctgagtagcacgtgtcgaaacccccgagtgacgtcaccacggctgtggttggcttcacgcgcttcctgaactcgttcctcactgcctcgtaaaccggtttagccagccgcgtgtacacagttcctacacagcaaatggtttagttaatataaccaaaccaatctaaaattatattataactgaaaataaccgaatcgaataaaatacactaaattattctattttgttacgtatatattttagtgtaaaacaatacgaaatacactaattaactaaagatttatgtttttagtctaaaccaatacgaaattaataccaattgaaacagaaaactaaaacctaaccggaaccaaaccggacaagagtaattaccggagtcgaagatggttccagcgccggttgaaggattaaaagcaatagctgccggcggtaaatcgacgactttccgaccaacgcggatcgcaacgaggttgacgtagtacagagaagaccttctagggtttctgagaagttgagtgtacttcacgcgctggggctgggaggtagggccgagtctgagagaaccagagaaggtcagagacctgaaacttggcaaacagtaagagaaagtggacttgtaaatagactgagcctgtgacatgagtgaaagtgggcctcgtcccaagcccaacaagccttgaggtggtgggatggttcctccaccggcgactttgttgacgcatccgaatgtaaaggctttgatcggatcggcggcaagacgtatcgtgtcttgagagaggttagccgcaatggaggagcttccataggtgaggttgaaagagcacgcgcgtgctccacacgtggggtttggtacctgaagcaagtgttcacgtgaattgttgttaatgcagtacagtgtctctgtgtcggtcaagtgtttagtggttctgtaatcccgtgaccgttttttctttgaatgtgggtggaattatcaattataaccacgtggaacccactctctgtgaaaatacatttttcacgtaataaaatagaaactgtcctttttgtatatcaactaaaaaatttctagatctgatattttgtcaaatatattttcattttggggcagcaattaacattctcatgctcacatctttatgatgaaaacaaatgcaggttactaatattaaaatttgactacaatatagtatggtgagacattcataaactattttttcttttttaatactaccggttcatttatgaagctatgaaagtgtaagtgtgaggataaaataaattaatcaaaaaacattccaaaaacatatttattagatatgtagtactgtaggtgtgtaagtacaaaattatatacctgcttacactgaggagcgctgcagctaacgttcttgaaggatgtagacttagcaggggaaaaggccgtgttagaaggacagccaacgcagccggagcaaggaatccaagccacgtcactgctcgtgtccatggctaggagcagcggctgagccggagtaccgatcaaagccttgacaatgtatgtagtgctttgcaacatttgacgccctgaggcaatggggactacagatctcccggcgacgaggctgctcaggtactggagacgggcctggtcttgagccagcgtctggagcacacgcgcttcccatgagagtggggatgatgatttgaagggggagcaagggctgtctatgtggaagattcttagggtagagccttggtcttgagtcttggtcaggtcacaatttgggtggttcaacccaagtgctaatggtaggatggaaaaaagttggaggaataaaacaagagtagacattgtattgtatgcttttgggttggatgggttattaaatggtgttggcatgagaagggtatatatagtggtctgagctacataatgaccaagcacataaaatcaaaagtataattaactatatgatacaaatcaataattatttccgcttattaggttttaagtttgaatccacggtaaaataaagattagcttaaatttaaactgctctcgtttctaactttaacatttcttttgtaatgttaatttttttcattacaaaggtttgccttggactgtctataagaacaataaattgttaaagcatgtatctaaaacattatgctaaacaattaactgtatgatccgttaaaaaaacgctttccagtatacaacaaccacatgtttaaatcgtatatcccgcccttcgagagttcgaccttcaacaaacttaaactgtatatgagatcaaacaagttgcagagctctaaagttttttttatgatatacctttctaaactttgacttatgtgattttagaatgatttgtgtgtgtaaagtgtgtataactaatgtctctttagaggggaaaatctaagatatatattgattcgaaatcttttccattcttatgttaattctttcatttacctctcaaacatattttcgaagataatatattatctccatttaaaataataaaaagtgggttattctttcaaatatccaacaatcccttcacaaagagtgactgtctttaatgtttccgagatgatttcttaatcactaccacctcttaaccatcatatctaaaatagaaagatgtgttcctattgtttcttgcagcatctccaataatgcgaaccggtaaaaacatgggtgctggtttagttattactagtattttgtaagcatgccattattactcttatatttatctttgtaaaagatgtgtcggcaagtaatgtaaattattcatctgtttctttactcttccgatagtgcaaagttactttcttcagatttccactacttttgtggggtattagtatgatgggcagcgtatacaataaggaaaatatacttgtctcccacatgatataaataaactttttttctaatcacaacaacaaaatagaacatgggtaatgtattttgtgattaatttttcttttaaaagtgtacatttaactatatattaacccgtggtataccgcgagcctatatttttattaaataaaaaataattgaatattttttagaatgatttaataaatttatgctattgtttgatttaaatgtacaattcaccgctagacgaaattttataactcaaattttaaagttttaagttgtatttgtttattttgttaaatgtttaatattgtataattgtattttgattgttgtttctcggatttcacccgtagtacaccattccatattaatatcgaatcaaacccgtcaattctatgatttcacccgtggtagtatttaattgtataattatattttaattgtcattctatgatttcacttctaattctatcgcaaattattatcaacccaaaccagtcaattctaaaatatttcgtagtacaccatcccatattaatatcgaatcaagcccgtcaattctaggatttcacccgtggtagtatttaattgtataattctattttaattgtcattctatgatttcactcataattctatcgcaaattattatcaacccaaaccagtcaattctaaaatattccgtagtacaccatcccatattaatatcgaatcaagcccgtcaattctaggatttcacccgtggtagtatttaattgtataattatattttaattgtcattctaggatttcactcccaattctatcgcaaattcttatcaacccaaacagtcaattataaaatttcacccgtagtataatgtttaaatatttataatgtttaaatttcttataaaagaatcaaaatgtgttttaaaaaaattaaagttttaagttttttttttttaatattgttaattttgtttagtgtttaagattatataattatattatgattgttattatatgtttttttccatagcatactatcccatgttattatccactcaaacctgtcacaccatataaccccgtcccgtgaaattaaacacaaatttgtcattttattataaatttcaaatatttataaaactagaaacttcaaaaaagattaatattgacccaaacttcatcattgaattttgagtgttatatctaagatttctctcgcagtatatcgtcccgtattaatatcttttatattgtttaaatttcttgtaaaatttaatttataattttttaaacttttttaagtttcaattttttaaaataaataaccctagtaaacaaaccattttaattttggacacctcataaatcaagtttcatgctcattcgtaatcgaaatcattttggtcctttttatagtatggctcttgaccattgtccaatttttttaagcgatgtgggacattctaaaatcgtaattattatccacccaaacccgtcataccatataacccagtcccgtgaaattaaacataattttgtcattttcttataaatttcaatattataaaatttgaaacttaaaaaaatacaatatcgacccaaaattcatcattgaattttgattgttatatttaagattttttctgtaatatatcgtctcgtattaatatattttttatatatttataatgttaaatttcttgtaaaattcaatttataatttttaaaactttataagttttaaaattataaatatttaaagcattttttaaagataaactttataaaaaaatttaaaattataatatttaacttttgataaagttataatatttataattttttgaaacattttaaagtttcaattctttaaaataaaaaatccgagtaaaatcggataactattttaattttggacgcctgataaatcaagcttcctgctcattcgtaatcagaatcattttggtccttttataatatggatatgaaccattgtccaatttttctaagcgatgtaggacattgtacacatattatttcttcataggttgaataatatatgtccgttttaaaaaatttgaattacatcatattcagaaaaaatataatattttattaactatatatattttatataaatttaaaataaataaagtataagatcaaataaaattgaaagaagaattatatatttatgtttaaattaggtagaaatattttagaaaattagttaaggtaaataagaaatatggttagtttagagatattgtttatattaaatttggtaattaaatcattaattttcgtttttaattattagtttttaggtaacttttccaaaaattaatgttatccaagatcagaacagaattaaacatgttatctaggatccgaacagagttaaaccgggtaaaacccacccatttgaattaattgttgaattatggctcaaatcttcaacattatcttcaaaaatccccaatgtatatatagattattattcaacaaatatgtttatacaaatattgggctgatcacagtcacatgtggccaaagggaatttgatacggttcttcgatttctacacctcatgaataatcaatcataatcaaaattagctaaaaaatgtgattttgatttttttgttttccaagaattctctctacaaatgcaattttccacaaaaatgtgacaactttcccttaaaaaatatttattgattccacagtttctctacgatatgtaactttttacaaaaagtgattaggtaactttgtggaaaaagcattgttcccttaccaaagagaaataatcgttgaatcaactgaggtgaaggacccgaagacagatatagaggtagggaatgatttcgcctatttagatattttgtaatgggtttgcttttggctcttgagagatgttttatttagttcatgaataaatgaaggcgaagaggaaacgtttcagttgacaactacgtctaaacattaacgattgtaattgtagatttggagatgtttcaagacgaatttcaacttatttctagagaatttgtttttggctaatgaggatggtatataggaaagaggaaactctataaaaataaaacaaaaagagttttttgactaaacaagactaattcgtaatcgtaatgaaccatctaagaacttcaagatctaattgataagataacttaatgttgaatgaataatgtccttgaaattcgtacacatagaagatatatggctgaaaaggttgtacaatagatgttataattaaacactaacttcaaggactactttttttgtcggtttttgtgctaaaatataaaacttccatagaatcactacaatttcagagtcaacggtccattataatataaagaagatgaaagattttaggaggacaaattacatatcttcataaccaatctaatatatacatatgtgagataattaatgttctgcagcacaagaaaaaaaaaaaaaaaaaaaaaaatgttctgcagcaccatttaattgtgtttcccgcggactacgtcaaacttgtccccttctcctacaaactctcttcgtcttccacatttttaagtctctctctagctctctctcactcactctctccacatatatgtctcctataagtcctcctgccagtggggttgggcttggctacggtatagccatcgccgtaagcatcttggttctcatatcttttataatgctggcctcatacatctgcataaggtcaaaatctacaggaagagacgaagccactagtgacgtagttcttgacttgccgtctcccgcggctgaggtgaagctcggtctagaccggccagtgatagagtcatatccaaggatagtgttgggagatagccggagattaccgaggcccaacaacggcccatgttcgatatgtctatgtgattacgaggctagggaacccgttcggtgtataccggaatgtaatcactgcttccacactgattgtgttgatgagtggctccggacaagtgctacgtgtcctctttgtaggaactcaccggctccctctaggctagccacacccttatccgacttagtcccactcgcctttcaaatcaggtgaaagttaaagaccttttcttactcccttgtgtgtttgagattgagaaatgagttaaaatttgttatattttaggattgaagttgaaagctcaataataaaggtcgtaaaattttctaatgatttgataaaaaatgatatcttaggatttatttatttgcatgaatttgcgaccttacgatgtgactcttggatcactctagttgtaataccgcgatctcgtgattccggtatgatctttactgagagagattccagatttggtaactttgtacctgtacacttggtagggttatcatttatcaaatcacatctttgtacagattatttatgtatgtgctgtgattctgtgatctccactttaatatggggattcgaatatggttttcgtttttttgttttcttcatttttctgttttttttcttgaagttttcttttagataagttttatttgatatcgaatttcccaagaaattaaataaattgaaaagcagtaaatcaatttatgttttgtgaaatcctcaatatgtgttaaaaagttttcgtattattcaaaaaaaaaggaagccgtaagttggagctctttgtttacaaaagaaaaaaaatagttggagctctttctcttactgaggtcaaaattataagacaaaaatactgattcgaccaaaacagcctttagttttatttttcatatgtagtgccatacaatcttcatggctcttggatagtctttttcaaatgtgtttccgacagtggtacgctgattacaatcgtagagagcatagagttatccccttccgagattttcattttagatccattagcttccacatcttcagttactttactatttgagtcaatcttggctagttcacatatagtcacttgattctccttttgctttccccataagacagcatacagtccaattacaatcagtaccgcaccaatcaccctacatgtcccaaagcagttgataagctttatgtgatgattgatattattcatcatatatgattcatgaccatgtatggagaatgagaaaaggggcaaaagtggaaatttttaccctccaaggaagattttttctgccaagacaaaagaacccatgacagcaacaataaccatcatcaaaggactaaaggcagtagcaaacacaggtcctcttttcttcatcactatcccttgcacatagtatgagatacttgatgccacaatcccctattattatatatcaaattatcgggataagtaaataaatatatgtgactttatatacatgagagctagataagagaggtttaatattacagagtaagcggcggcaaggaggttcatgtcccagccaattctccaagcagaggggttgtgttccatcacaaacgtcacagcaactgcttgtagtgttccgatgaagcaaattagtgttgttagagaaagctgatgcttcgcgtacgtctttagtatctttgcctaatcacatcaaccaaaccaaaagaacaataataagcgaatacttgtaaaactgtacgtaaacacaaaaagaaatatattatatatgaataaagaaaaagaggatctcgagttgtcactcaattttgtctctttatgtgtgtacacacctgtagaacaaagagggaggcccaagcgagtgttgcaaagattaggaggatggagcctttgaggaattccttatcacttgatgagttcttagacgacgtcgtattagcatgtgaagagtcttgaatatgcatatatttggtccaaaatagctcaacgatgggtcctttgtaaattgtcattagcatcgctcccgccactgtcactaccgttccggctattttcgcctgacaccacagtttcttcaggtccaacatctccatcctattatcaaaattaatagaagaatttattaccatttaaaaccatttgtaacgtttagaaaacaataatcgtattttagttgaaagccacataatttagatttgcacatttatttacgtaccggaatagtacagccaagataaaggtcatggccggaagcatgttactcatggcgcatgagaacgttggggacgtatatttcagccccatgtagtagaagttttgatcgatcactggcctgtaaatttgtttatagaaagaaaaaaatgttaactctctttctaatttgcttttgcaaagacaaggtagtcaaatagagacagtgattaagtaacaacccaagaaggccgagaatgaatagttgcatgaaaatggagaacgttattttcggctgagccttcctgtaaaacggaatatacgtagttagaatccattaacaatctatcgattattggcgaataaaattcaaagaatgtaatgaaaataattaaatggatataacctttcgaagaagaaagcaaagggtgcaataacggcggtggcaattgcatggcggtagacgacaaggacatagtggctcataccggtgttgagggatattttggtaattatattcatgccggcgtagccaaactggagagatatcatggcgaagtagggtttagagcttgtgagaaagctctcacagctactaatctcctccatcgacataatgttttaagttgtagttgtttgagtaaaactattgatcgtggtcttttgtatttatagtaagatgcaacgtatttatgatatggttttgtatttgtttaatgtttaggtttcttggttgacatcactatcttacctcccctctatagtcattggaactcaaatatactggtcgaattatataaaaccaattgggtactatgacacttccattaggcaaattatgaaattgtggaacaaatttgtaaatctctatccgtcttggtaatccatggaacgggttaacaggctaaccaaaagatgagttagggatgatctatcgctaatgtacgtactaaattcgtccatataggaaggtattaaattgctaatcttcgaaatatatgtttttatgtgacacaactcgcatcaattcgggattaattaaaatttcgacccacaacgcagacgttctagccaataatcatagacgcacttgtgattttcgttactaagaatatgcctaaacacaaaaagaactgtgatgatgcacttttgcatgattcgagaagaaacaaaagttgtttattggaaaaatgggggaaaagggcataggacacgtggcaggtaatgggagggtttagggggatcatagaagggcatcaatgtagtgactcttgaggtaagcaaataaatgacatagaaggcattatggtgacatgaaagttaaatcttcgaacttggaccatttgatattataaaatcattcaaaagctaagttacctcttcacaaaagtagataactctttctaatcacacggctagaattcaatctcaaatacaattgagacaccatgtgtctattgtgaatgagtcaggatgggagtagaaacggtttcgtgtcctcacaaatttggagtgaaataatgagttattcaagaatttaatagcatctgaaaactaaagtaatttaaaacgttaaaagactaattttcatgtcatatatatatatatatatctatatatggtggtggtgtggggtacggctggtgtggtggcatcgggtaagagtaagaagaataagctctgttgttctcactggtgcttgaaccatcactctcttgggttgaaaaggctgcacccattctctgcgtgtccattgatgggtaatgactgtattcgttaggtggtggtggctgcatatagtactgctgcatttgtgagtgttgattctgctgctgagatattaatccagtatgagcgatactgccctgttgctgttggtttgaaccactttgatcatatttgccatcctcggccatgactctgatagattccatttctccataagcgtagaagtggtcatgtatgtcctgctcaaagattcttgagttaagtccaccgacgtaaagtgttttgatgctttcatcctctggtggttccaaagtgcccatctcaccagcttttctgagtaacttcatcgcgactggatcatttacactgcgaacatatgaaaagtacataagagaaacaactcaaataagcatttgagaaggcaactaaatgtcaagcaatagagaagatccaatagcttacctataataacgatctcttatgttttgatgggatagctctcctgtttcgggcatctcatgccggaatgaacattcggcacctcttttacactgaccaatggtgtagaaactacaaatttttggccggttcttttcataggaaggtgttcttctctgaagctttaaaatagtatcattaggttgcatcttcccaaatgaagattcataatccagtccagctctagtctacaaaaaactagacttgattagtcatcaatctttcacaatgatcgcataacctaaaaagcagacttgaaaatacttagttaaaaagaaaaaggagaatccatggtcatacctttgggtcatgctcgtcagcaaagtactctctgttgacatggctcattgggacagagtagtgagaattaatattgagtgctgagtctctgacctgaacaggaagaccaaaaccgagatccagaagacagacttggcatacattttttagcttagagcaagtttgacaaatctcggttttcttgaatctagcattccggcctggtcgccacctaaaagctgtgaaaggacgactacatatcttgcattccttatcataatccgctcgggtctacatataaacaacaactttaataaggatttgaagaagaaaaacgtgcagtgcaagctatgagaatcattagcacctacaataactttaaacctgaacctaaacctaaattactaagttaacaactccactatacagaaaacatcaacaaagcttaagagatgggagcgagaaatcaccattcgcatgtacggattgtcaccgaagcaagattcgcaggtgattgggaaatcggcgctttcccatccatcggctccatgatccctgtgagacattttcttcggtactagatatcaatctcgtgacgctacttttataggccaaagtccaaatcgatttggaatttctcttaaaaatatgggttagggttaccaattattgggctttaaactgggcccgttaaggctcaagcattaagaaactttcaaaatcttcagcacacagacacataatagtctacaattcatcatcaaaatacgaactttgatttcaaaaatcctgaaacattgttaacaggaacattgattagtagaaaagtacccctccttcagattcaaagtttcaacaatcaatcaacacagacgacatttaaaagaaccggggacatcttagcctcttaggatttaaatgtttcaacaactccttgatttttcttctttgatcttcttctttttgagtttcttagtcggttaattgacaaagttgttatgtcctatcagtaatgattgtccagtaatacatatgagtattgaaacagagtttaagatgcaaaaagactagatggaaactggaaaaatagttatttagtaaaccaaaatttcacaaatcttgctgctatgtatcgaccaaactcttaaagaaattcaattactgtactcatgaaacaatatacgttcaaaacttcacaagaggcaaggtaaaaaaaaagctcgtagttgttacaaatcaatcaactatctacaatttttgtagtctatatgcaaaaagaatccattttgtgcaattgttattgttttccttcctctgttttcgttagagtttcttgatgcttgcttctgtttcagctgaagtcgcaagagggttaccattttcatgttcctgcaacaattcatgtgcttgcagttgtaggcttgtagctgaacttgctatgatggttcttgctctccttgttcatcctgcagtaactgctcctctttctccttctcgccttgccaaacccaaacaatatctgccaaagcaggcctaagatcctcctccactaacttctgatactccattgtatctccattacatttcttcacttccaccaggtgaaacgtcggcgtcacttggaatatctctgcatccatcgtcaaaattccgttttttccttcctttactctttccagtttgaacaagcctgcgccttgctttcttatcttcagcttcaggcacttggcaacctctactagcttagaaatgatctctgaagcaggtttttgcgacgcgaacctagattctcgcttgtcatatacatccccaaaaagtcctgccagaccaaaccccgtagacaaggcgatgatatcgaaagcattcaaggtagcaagtcgaggcggctcgtggttttctccgttttcattttggcctgaacctccagcttccatgggattagtagcctctctgacttgttgtttctccatcttttccatctttttttgcttcaaatgcaaaccctttctgaaccaagaactctccttgatttttgcaatagtgattctagtctcatggttagggtccaacatcttacacaatagtctctttacctcaggagcaaaccagctgggacacttgaagtctgctttacctatcttcctatacatctccataagattagtgtcatggaaaggaagataaccagccaaaagaacaaacaaaacaacaccacaagaccaaatatccgctttcgtaccctcgtatccttttcggttaataacctcgggcgcaacataagcaggtgtaccacaagttgtatgtagaagaccatcttgccgcttgcaatcagcaagcgcacttaaaccaaaatcagataccttaagattatcattgtcatccaacaaaagattttccggcttaatgtcgcggtgataaactccgcggctgtgacaaaaatcaaccgcactaataagctgataaaaatacttccaagcaacatcttctttaagttttccttttgcaaccttgttgaaaagctcaccacctttacaatactcaataacaaagtaaatccttgactttgtagccataacctcgtataactcaacgacattcgggtgtttagcgatcctcattacagagatctctcgcttgatttgctggctaagcccgactctcataactttgtccttgtcaatcatcttgatagctacactctcgttggtatgattactccttccaaaatacactttagcaaaagtaccttgacccaataacctcccaacttcatatctttcagttaatacacttggtttgttctccatccttaaaatctacaaacttcaaactactacctcaaagcatttgagtttttaaacccagtttgttgattccaaatcaagttaggttaactactactgaatcaaaaaagcacaataggatcaggactcagaagtctaaccttttagaccaacaacacaaaaccgatttcgatatctcctgtaacaaaaagattgagaagcaagacgaagagaaaccactcgaaagagaaaggaagaagaaacagtcacttctctcttgtatgatgaaaccgaattgagggatgaatccgaaagacaaaagagaacgaacggatctctctgtttggttgactagtggactcagttctgctcctctgtctaaattctttttatttatatttttggattttatgttttaaaaaagaaataaaggaaaatctaagagttcctttttaaatagttgcgtggaagtgaatagacattagagagagtcgcagagggtatttgttgctcgtgggctcgtccacctaacgcgctatatgcgccgttgatctttgatttttttttggtcggcgatcgttttttttttctttcttctttttggttaacttttattttgtggttttaaaacgataaatcctcctatttattttttattttatgtcgacgataaaagcctctttttttgtgtgtgtgccaacgataaaacctaatattaaaagcagttgtttattaaatatttaatccctggatttttttaattgagtttacaaactgaacttggtcaacattttcaattcttgattctttaagaaacaaccccaaaattacatattttaagtctcggtttgtttcggatgcgcctttagtcatagttatgaattatctatatattataactaggaaagattcaaaatgtgattgtagtaatttcgtgatcgtgaaaaccacaaccctgcaagatgctgatgaatcaatctcatggaatttttgcaaaattaaataattaaacctatagctttaagattgcactagatatatcacatctcaatatcatttatttctatctacattttaagttaagctgtgtaatgaataattttcttaagatttacgtggatcataataaattaatgaaagctctgatgaaggagtttgttaggggaaaaaactgaatcaaattcttgtacgtcatacatattttagtgtggttcgtaactttttcactaaatttttaaattcagttaaataaaaaaaactgtaaatttactaaaatgtaaatgaaatttataaaaaaaatatttcaacataagaagagttcataatggaacaatcataagaagaagctatatatggcgatgtgtatgcactgcagatggtttggagtcacaggctcatagcctcatatgtttacgttaatcatcatggaaagcgatttttgatccaaaaaaaaaggaaagcgataccaaggagcttgtggagtttatggtgatgctgcttttgcgctggttaagttgaaattcagaaagaaagataacccaaaatccaaattaatgattacttcaaacacttttgcatatggagaagaagagctgttcaacattaaacggtacaacgcagcattgaatttccgtgtcccaagcactgactgatgatcattctctaaagtctctataaatatgaccatgtgatcgtacgtggctcctcatgactgccccaacaagccaattactaaacttgtctttatattgcggttccaaaagatctgatgttgatgttctccaaaacagaaacacattttataagataaatgtaaattaaataaagcaattgggaaatatttatatagagtgatgatgaatacgtgaggactagtttatacaccacaacacaaaaacgcgttttgctcattctctctctctcgcacacacgtcaacaatcatatccatcgatgcatttgacttcctcgttcctccatttacatatgtagatccagttatgaaaggagtactagttccaatttcaatacatttatatttaatattttattcaatacaaaagtgttgaaagggattcggataaaccaagcatttttatgtgtatagaaaaataatacttgactttgcagtttccatttccaatcttcaaagtcatatcttaccaaactcacatctctagctaatatatcccctatattttgttacaaatatatatatatatatatatcttacacaaagacagtgcatgtgatatagaaatcaagatgggaagccaaggcatgagttcaccgagtcccttggtggtgaagaaatcgcaagtggttatagtgaaaccctcaaaggctacacctgatgtctctctttctctctccacactcgacaacgatccttatctcgaaaccctcgccaaaaccatctatgtctacgctccaccatccccaaacgaccacgtccacgatccagcttccctttttcagcaagctctctctgacgcccttgtctattactaccctctcgctggaaaacttcaccggggatcacacgaccatagactagaattgaggtgcagtcccgcggaaggagtcccctttgttagggcaaccgcagactgtactctctcttccctcaactatttgaaggacatggacactgacttataccaactcgtaccttgtgatgtagctgcgccctctggcgattacaaccctctggctttgcagatcactttgtttgcatgcggagggctcactcttgctacggccctctctcattccttgtgtgatggttttggagcgtctcagtttttcaaaaccttaactgagctcgccgcgggaaaaacacaacctagcatcatccccgtctgggacagacatcgtctcacttctaacaactttagcttaaacggtatatgttaactagtattatctaaatataatttcttttagatttagacgcattactaatcatcttgatagtttcagatcagttgacaaaaaatagattggtccatatcttttatatattgttgttttaactttattttatttataatgtgatgttactaattaacattgtatatatgtaagtagggcaatgttttatattgtagttttaaatttattttatgtatgatgtgatgttactaattaacattgtatatctatatgtaagtagaccaagtggaggagggacaagctcccaagctagttgattttggagaggcttgctcttctgcggcaacttctccctacacacccagcaacgacatggtatgtgagatcctcaacgtgacatccgaagatattactcagctcaaggagaaagttgcgggggtggtcacgactctagagattcttgcggcccacgtctggagagcaaggtgccgggccttgaagttaagtccagatgggacttctcttttcggaatggctgtgggtatacgccgcattgtggagccaccattaccggaagggtactacggaaacgcatttgtcaaagccaacgtagcaatgaaggctggagagttaagcaactcaccgttgtctcacgttgttcagctcattaaagaggcaaagaaagcggcacaggagaagaggtacgtgttggagcagttaagagagacagagaaaacgttgaagatgaatgtagcgtgtgaaggagggaaaggagcgttcatgttgcttactgattggaggcaacttggattgctagacgaaattgattttgggtatggaggatcagtgaatattataccattggtgcccaagtatctgccggatatttgtattttcttgccgaggaagcaaggtggtgttagagtgctagtcacgctgcccaaatctgtaatggtcaacttcaaggaacacataaatcccctaaatacatgaaattaataagcaggtgaatgtaattcacagtgtttctttaaaatatgaaaaggacctcatgcgattgtatatttaaagcttttgtttgctgtttgtttaagtttttcacatttggaaagtaatattttacaaaccaataatgtaacgccacgtcagcaacaatattccttctaaagaccccacgccaatattccttagtggagtttttaaaatcactgtttcatctaaaaactgattttagctacaacaaaatataaggccgaaaaagaatgctttagttgggcctaaatatttcatgctgtaaaaatgggcctatctaaataagcccaataaatttatgcgagaacaacactagggttttagtttttcttttgatatataatgtaaagggcgccgttaatcgcagcctcagtggaaacagagcagctgcaaacatggttcgtcttctcaatttctcgtttttctcccaattttggtttagtctgtgtctatgtctcttctgtttagttatatctggtcatggatattcaattatgggcgttttggttagtttcttaggacaatggcgactctagttttctcgtttcatgccgtagaccgtacctgtaaatgtttcagactgcgatgttgtatttttcttgacaattgagcttctgggtagtgtacttttgactaggctctgtcaaatgtgataactttttattgattgaatcgtctgttgttttgaccttttatatatcaaatgtgattatgcaggcaagaggattgaagaagcatctaaagaggctcaatgctcctaagcattggatgcttgacaaacttggtggtgccttcgtaagttgtttgtctcatcaatcttgtgtttttaagacaattcattacatttgttctgtaatgttgatgtgtttgtatcgatcatttttatgctgtttcttgttgtaggctcccaaaccatcttctggacctcacaagtcgagggagtgtcttcctcttgtcctgatcatcaggaacaggttgaagtatgctttgacttaccgtgaagttatctctatcttgatgcaaaggcatatccaagttgatggcaaagtcaggactgacaagacttaccctgctggtttcatgggtatgtctttttttttttccagttatgtctgccctttttgtcgtatgtatttgatcactgaactaaattgcattatggtttgaatagatgttgtatccatccccaagaccaatgagaacttccgtcttctctacgacaccaagggacgtttccgtctccactccatcaaggatgaggaagcaaaggtttgttgcactctcttcttagatcttgactggaattagaactagtgattggaattagaagattgattagtctttttctgcttgaatgtgcagttcaagctttgcaaggttagatctatccagtttggtcagaagggaattccatacctgaacacttatgatggtcgcaccatccgttaccctgacccgctcatcaagccaaatgacaccatcaagctggaccttgaggagaacaagattgttgagttcatcaagtttgacgtgggtaacgttgtgatggtgactggaggcagaaacagagggcgtgtgggtgtgattaagaaccgtgaaaagcataagggaagctttgagacaatccacattcaagactcaacagggcatgagtttgccacaaggttggggaatgtgtacacaatcggcaaaggaacaaagccatgggtgtctcttccaaagggcaaaggtattaagctgaccatcattgaggaagccaggaagagacttgcttcccagcaagctgcttgaaagtccaactgctttgaatcatcaagacccgtttcttttacagactcgctgcttgtctcagtttgtgagtctatttcttttcttatgttgttggatttcaaaacccatcaaaaaatagctgagtagtgctttttgtaatgtttgtatggtggattttttggtgatttaccgtttaaatcagatgacagttggtccactcctttgcttagtcttctcctttgctttgcgctattagttgttgagagatgagtaatagatattattttcttggcattaagtaatctagaagaagacctcaaggactcctgaaagtgatgtgaattcagccgccttacacaaaaaagtcaaacattttggtgttttgaatacacacgcttcacacttggtcacaagcttatcttttataattgcttgcttttccttggaaacatcctttccttctatccaactcgtaatttaatataggaagaagaagaagaagaagagtacctcatacgtaaaccattgatgggctcttttgatcgccaaagagctgttccgaaattcaaaacagcaacaccgtcaccgctccctctttctccttcgccttacttcactatgcctcctggccttactcccgccgactttctcgactctcctcttctcttcacttcctccaacgtatctatctatctcctccaacgtttcaaactatgattgtttgtccttatcttggaatattgaaagaattcaaggttcttgatttgtccatttcccttcttcttctctcatatcatcttcttctttgatcttgaaatcacagattttgccgtctcctacgacaggcacatttccagcgcaatctctgaactataacaataacggtttgctcattgacaaaaatgaaatcaaatatgaagacacaactcctcccttgttcctaccatctgtaggatccatttttgcatttttagcttctgctttattatctcttaagacattctagttttaaactatctcattttcagatggtaactcagcctttacctcaactggatttattcaaatccgaaatcatgtcgagtaacaaaacctctgatgacggctacaattggcgcaaatacgggcagaagcaagtcaaaggaagcgaaaacccgaggagttacttcaaatgcacgtatccaaattgtctcacaaagaagaaagtagagacgtctcttgtgaagggtcagatgattgagattgtctataaaggaagccacaatcatcccaagccccaatccacgaagcgatcatcttccaccgctatagcagcacatcagaacagcagtaatggagacggtaaagacattggtgaagatgaaacagaggccaagagatggtaattagcagactcataattaagtaactgaaaccaaaaggatgaggagacaatgagatgtctgattggatttgttgtgaatggcttataaatgcaggaaaagagaagagaatgtgaaggagccaagagtggtggttcagacaacaagtgatatagacattcttgacgatggctacagatggagaaagtatggtcagaaagtcgtcaagggtaatccaaatccaaggtgtggttttatttttctcttgtcaattctgaatgaaaaggaggcttgaagcttgagctataagttagttaaatttgtgatgtgcaggagctattacaagtgcacatttacaggatgttttgtaaggaaacacgttgaaagagcatttcaagatcccaagtcagtgatcacaacttacgaaggaaaacacaaacaccaaatcccgaccccaagaagaggtccagttttaaggttacttggaaaaacagagacataaagagcaaatgagttttggcatttcagcattcctattgtaatctttcattcatatatagtatgtttccttaatcatgcgcctatacacacataactgatcaggactaggcagaggctaaagttccaagcttctccatcattttgccccctatgttcactaccgacgataaatctttattcaactgtttcaagatattaaatcaaacatacatcacaccaagtgtttgacatgatgatgatggaatggaatggatggtggcaaatgatgtgataaacacacaaaggcatacacataaatgtatattactacaaagagcggaatatttttatgtttctttaaaaagaaagaaagacgcaaaagcacatgtgatagtagccgacagtttgaagtaaagccagcaaatcgtgaaagccatttacttttagatctctctctgcactctctgactttgtccgcaaagtagatctgctgcaatggcttctcctcttctcccaacttcgactactcctgatcaacttcccggcggcgatccacagttgctgagctctctacgcgtcctcttgtcccgcgttctagccaccgtccgtcacgcttctgcagatgccagaccctgggcagagctcgttgaccggtcagcgttttcccggccaccatcgctctcggaggcaacgtcacgagtaaggaagaacttttcctatttccgagccaattacataaccttagtggcaatcttactcgccgcgtctctgctcacgcaccctttcgctctcttcctcctcgcatcgctggccgcttcttggcttttcctctactttttccgtccggcggatcagccgttggtcattggaggacgcacgttctccgatcttgagacgctagggatactctgcctgtccactgtggtggtgatgttcatgaccagcgttggatcgctcttgatgtccactctagcagttgggatcatgggcgtggccatccacggagcgtttcgtgctcccgaagacctgtttcttgaagaacaagaagccattggatctggacttttcgcattcttcaacaacaatgcctctaatgcagctgccgctgccatagccacctcagcaatgtcacgcgttcgagtctgagattgttgaagagactacattcctacaccgcatttccaaagtgtgatatttattcatattgaattgttgtaacttgtaaccattcttttgtcatttctgttttgtttactttgttgctggaattttgaaacacaattcatcttactatacaccattaaaacgagagtcagtaaagaagaattttactaactctctcttgttttttgacaccaaagtaaaaaagatacgacaaattggtttaagctcaaaaccatgaatcgaagaataagaataaattacactgtgctctcatgttaagagctctctctatcgtattgccttgtttcctcagcaacctttgtccacacattggcgatcttctctgcatatccaacctgcacattcaaataccaacaactctgttttcacacctttttacatattttcatctctttatttcaaacatctcactcagatttctcagcattcactagcattgcaagagagcagatttcaccaattttcaagcatccattcaaatatctcaaatcatattccttttggtgaatccatttcatgaaagaaagtccccaaatcatagcatcccctataacactcactgacttttctcttccatttcagagctaaaagatc

SEQ ID NO: 702 - DNA, 78172 bp, Arabidopsis thaliana
gatcacagactcatgaccccatctctaaaaccactaagagagcgacaaaaccatagctttttttttgtgtccctaccccatccatggctgctaaaatcttgtgattaccttcttgtctccttcctcttctctttccctcttttatataagaaccaaaacatccacagcttttgttccatcatcacttgcagattctttctctctttcgtaaaaatggcgagttttgaggaaagctctgatttggaagctatacagagccatctcttagaagacttgttggtttgtgatggtttcatgggagattttgacttcgatgcttcttttgtctcaggactttggtgtatagaaccacacgttcctaaacaagaacctgattctccagttcttgatccggattctttcgtcaacgagttcttgcaagtggaaggggaatcatcatcatcatcatcaccagagctgaattcatcgtcatcaacatatgagactgatcagagtgtgaaaaaggcagagaggttcgaagaagaagtagatgctagacattaccgaggagtgaggcgaaggccgtgggggaaatttgcagcagagattcgagatccagcaaagaaaggatcaagaatctggctaggaacatttgagagtgatgttgatgctgcaagagcctatgactgtgcagctttcaagctccggggaagaaaagccgtgctcaacttccctcttgacgccgggaaatatgaagctccagcgaattcaggaaggaaaaggaagagaagtgatgtgcatgaagagcttcaaagaactcagagcaattcatcttcatcttcctgtgatgcattttagcatattaagagtgtgagcagtttccttaagttgtataaagtaattgtacagaggaaacgaattgtgtaggtttagtgtgcttgcaagttgcaacaaatgtgtatggatgttctgtttcttcatgtccctaagatttagaaacatcttcttatttccaagaaagttattcagtttccaggtctctaaacaacctaactagttattagatgttgtaatccattagtcaatggtttatgaaacaatcaagttctcaatctcacacatagaaacttcactaaaacagctacaaaaagtgagtgtaccaagaggagaaggggaagtgaatcaagatgagcaagttacatgaatgtagcaggctagcagcaatgtttgtcttcataggttaggtacaagtcaacactcagtgataaaggaactggaccacaagctacagagacttgaaagagagatgcacaacttgcaaatgcagaataaacaagtcaacactcagtgataaaggaactggaccacaagctacagagacttgaaagagagatgcacaacttgcaaatgcagaataaacagagcagagatatttagttaaatatctacttctctctgtttactaaatggttgagtattaataacactgaaaccaggataccatttcctaatctctgtctggtttcctagtttcagtggtatttttccggtctagacccttgctgggtggacgaatcctaggccaaaatgggatctatatatttttgaagtgagatatcttataacatccatagtgagctaacctggtttggttttagattgaagagactttcttcaagggttgactgagttgtcaatgcaaggcccaccatattggacctattggtcaccactgcaagagtaaacttgtaaaacagttacaaacaatggcatataccagcatatcccattagtacatggaaaaggcagaacaagtcactcttctctaatcaatcattctccatagttccaacgaaatacttgaagaaactcaatcatatctatctcacttttgacaagcataacacttctttagtctgaatacttttcatgttactacaacataatggatgcatcattattcattaccttccaacacagagttttggtggatgcctttatctgttgagtccgccatcgaccaacatcaagcaggagcctatttcctgaaatgagaactttagtttgttgggtcaaggactcaacggttactcaagaaagcttctttatacattgaaaaatgtttttaacattcactagtaaatgtcgcggaaaaaaacactcctaaaattgaaagacaaacaaggctgaaacttttacaaagaaccacataagtaatcttcagtcatcagaactgtagtcgctggactcaggcagagacgggaccgtggcacaacagaacgcatctttgtctttgagaaggagacagcttccatcaatgttccatttgaggtccgatatggagaagcccggaaggggattgcatacacagaaagcacccgagggagtccacatgtaaaggtgagagcttccagtgcacaggaggaggcgtgtgcaggttgggtcccacacagctgctcggatgggttccttctggaccaggatggctgcaacctcgaggaggcgcatgtcccatatccacagagcagtgggcatactgtcgtttcgtgtgcatatgtactggctgtctttgctccaagctagaaggcctgcgaatatttcaaaagagtttagctttggaagttaaaaacaagaaggaaatttcgaatatccgattgcagtttccaaggttgcatttggtcgcagaagaaagagcttaccgactccttgttttgggttaggcttgtccgcaggaggtttctggaaaggaaaagctaccggtaattccatgacttcatacctgacacttatatagccttctgaagcatctgcacatagaaccacagaagaaaacaagataaggttacaaacaagaagaatggtacggaagttttcgctatcagaaagttttggaatcgttgttaccataattgcttggcataaagttttcatccaacgataactcagacatatcaagctgtaatggttcatcgatttcctagaaaaatcatgtccactaggttaaatacacgcctaaatcaggctgttaccaaccttattgtcaaagaatggaagtggatttaccttgaaaatagccgcagaacagggcgcacgaaccgttgataggtgtaagaactcagcgaatgttttccaagtaaggtgattcaggacccgcaacatttgatcatagctaccaatggcaagaaactgaccacacggagaccaggaaacagtcttgacaccaagtccacattcatatgcctggtacttaaacagacacctaccatctggagaataaattagaacctgcccaaaaggtacaaattttagagatatctccaacaaaccaaacataacaaaattccaataactatctaaaaatagcatcaataccaaaacgatacataccttatattcaagaggcgaatcccacactacaatagaactatcatcaggtgaccactcaagatcagccaagtccaaggtatcaacagcaaagctacccattatctcccatgattgacaagacaaaaggttaacataatccttacagtcacgccgtgtacatatagccgcaaacttcccatcttgattgaatgaaactcccttggaaccatgctttggccactgaacatgaacacacgccgtgtttaaaagagaccaaaccgttaaccgcagctgaaactctgacgtagtgagtatatgacggctatctggactccacctagcgtatgaaataccagcaggaccttcatcaatcttgcaagtccattctggttgagtcaaagaccaagcttgaatcatcggttttttataaagaccacaaagaatgtactctgaatcaagagcccattctatgtagcttattttatctaagcaagaaaacaattgcacaacctgcattcacatccataacattgaagattagtacatagaaagaaaaaaaaacttcaacgacatttatcatctctaaggttaaaagttccaaaatttagcaaacccaagttagtataatccaatttaagcacacgatctagttgcatttgaacattagaagaagtaagatccaaaaatctcctagctgaaattgccattctaatcaagggtttaggtggataaattactaaatcgagcttgcttatacctgaaacgaaaacgtatcacggatcacgagacgataatcattggcgacggcgacgtaacgagagtttggggagaaacaacaaggacctgtttgcttgtaagcctccgtgaattccatatttgagtatgtgcaacgagattctcagaagagaagaatcaatgcctatgatctatgataatctaagctcctggattcactgtgatacgagactgcgagaagccatggatatcgactttttcgagagaaaattttcaaaattgaaatgaaagagagattgtgagtcgggtcgggtttgtattgggtgggccagttacggggatggatttcagattgataatgggcctgaggcctattattcattaactcgtttgttgctggaatgacaataatagccttatttaacaaacaccttcacatagacgaaatcatgatcacctaaaaatcgaccatattttgatgttcacgtacgtaaatgcacattcatcttaatcacgtgaaagatgtttttccaactgatacaatagagttgttgtatttttagatcagacagactttcactataagcagattcaacattacatataaacataagacgtttaattgtaatttttttactaaaaaaatttgatcatagaattttgaattactcataaacatgaaacgttgaattttgaagctgctacatgttggaacagctcgaccaatgtcgttcacctcgggggggttttaagggtgtgcaaccggcgcaaatgaatgcagaggctccaattttttttatttaattctctgctaatttgagggtccaaatctttcaaaaatttctagacacagaacgatggctgggattgaatattaggttttatctgggaaaaaaaaagatgactatgtgaaactgtcacgttagctacggcactgcacggatcgatacgcacaaaacatgacttaaagaagaaaagaaatttgggccaattttccattttaaaaaagcttattatttccaacaaaaaggccattattagccacatcactgaacggatctactttttctttgagccggccttacccgccttacccgtaggtgcgggtgcgggtgtacctgcaccagcaccaggaccagcaccagcactagctgcaccaagaccaggaacagcagcagcagcagcacccgcagcagcagcagcaccagcaccagcagcagcagcaccagcaccagcaccagcagcttcgggtgtacttccacctgcggtacttccaccgccagactgatctccaaactttccagtaaaggatcttcctccccaatttgctgtccaagttcctccataactaaaatttggcgtagcttggggtgacgattttcctccccaagaccctttaaaagttccttcataattaatctttggcgttaaactgaactgggcaaacatagttggtggagctcctattgcaggtatattgttcttcgactttactcccatgccgcgcctacatcacacatacacaataacacaagtgtgtgtgtttgtatatatgtcatagtttcattaaattaaattagaaaaaaaaacattgtaccatatgaatatttcaataaaatttgtttgatttactaaatcagcaacctgatgagagcaatggccgtagctccaagggcgccaccggtcgtaaaccctgtggttaagagagtaatggctatcgtggctggtacgagaatcgggctgaatatgatgaaaagcggtgtggttacggttaatccgacggctgtaccagcgagtgttagacccgagaacacgaagaagactatagaggccacgacagcgataacaaccttataaacctccaacaagaagataagaaaagaaaacatgttgtgataaatgttaaatttctatgactgatgagatttgttttgatgtaattcttcagctcatactttgtttttggatggttacgttgtttggggtctacatgcaaaacgatgggagtcgatagagtcatagagatctacgtcacgttacattttctttttttgggggttgtcatgttttttggaccttttttctttcttgttcttgtaaagagttcaaaaattaactgtcgtgttgttcacgtttgtggttggaacatcctaaacatgtaacttatccttgatcctctacaggtctatagcagtttcgagataacaatatttaaaaaactttaagtttcagaagaatacagagtttataagctaagatttgtattagacacgactcaaaattcagaagtgagaacaggtcaatgtcaacgaaactcaaagaataattgataagcaaagcttcctccacaatcttcttgaccaaaaaaacataactcatcacatccttacctctctatataatccaacaccagagtctctcttcttcctcactccaataaaccctaaacaagtttctttttaaaccactccagcgatgtcctcttgttcaagaacaagaacaaaagctccaagatcggccagaagccgtagaaatggtggtttctcttcttcatcggctacaattgtggcagatatcgatgatgtcttgattcaaatcctctcttttcttccaatcaaaactcttttaagattcaaacgcgtatccaaacgctggctttcgctcattacaaaccctgttttctcaaaccgtgtcatcaagtccaaccaccccttacccatctctggctttttcttacactcaccaagagagatcaagtatagctttgtctctcttgatgatgacgcaaccaaccaacggatttcatcatcattaccactttggtttactgatcatcaaacagatatgatcataatgcaatcaaccaatggacttctcctctgcaaatgttcttgtgcttcttctaaccatttcaacacaaattactatgtttataatccgacgacaaaacagtacactcttctccatcagatcgccggtcacatcgcactctcattagcctttgatccttcaagatctcctcactataaagtcttttgcctcagaggaagaagcaacaactctttttcttctgcctctgactctgaactttaccacatagaggtttattcctctaatgaaggactttggagaagagttgttccagttccaacctctccttcaacctttatagagttcagctactcagtcttctggaatggcgcggttaactggtacggtttcagctctagagattgcctctctttcgatatcaatacacaggaaatcaagattcttccactccctgatcatgaacatgaagacgaaccgctacctgatcccaggatactgatgtttctggatgaatcccagggaaatctttactatattgaggtaaataatcagagctcttcaaatttacgggtttacgaaatggaaagcaacagctcaagctggtccgtgaagtataatgttgatttagagcctcttgcagccgctttccccgagatgatcagaaccgaatactataccgataggcggatttacgcgttctctgtcatcggttttgtaaaggaagagacagatgcagcatcatacattttgctccacattccaaaccaagctgtaaagtacaacttcatagacaagactttcaagaaactttgtgatttcaagtcattggtcaatgatgctcctgaggatcatttttacagattccaaagaactttccagttcatcaagtctcttgctaatgtctaaatagtagtttatctttctctgtaaaatccatccctatgtagaagcttttattcaaaagatgatacctcttctaaaatttcccaatctcttcaagtttcctcaagacttgtttgacgtttggcctaagagaaggcgaaggagagcaacaagacattgcaagctgaaaatacttgaggacacattcttcacttagattatcatcacttccgagaatctcaggacggtataaatcagacaacctatgatcaagaacagcattcctcataaaatcaggaagatagaactcatcatcgccagttgcattctcgtttatcggttctttaccagagactagctcaagcatgatcacaccaagactatacacatcactctctttgctcacgtccttcatctttattaactcaggagctttgtatccctcagctgcagaaacatcaagaatctcttgtcctgcagacaggttcaagagcaaatgtaaaccgaaatcagagattctaggttcgaaactcgaactgagaagaacgttcttggacttcagattgccatggacgattggtttttgcattcctgtatgaagatgatcaagggctttcgatattccaattgtgattcttaaaatattgatccattttcttgattcatcatctccacctgtcaaaacaaaacaagaatgtaattttcttattagtctagatatttgctgagattgatgttcttagtgtcaaattttgttcttactacactaaagaagtggaaaatgacagaaaataaaacaaaaatagtaccgacaaaagacaaagatgatctcataccttatattttgaaaagcttgaagaaaataatatttaagacaaataatgaaacactgaattaaatgatccagctaatgtgcttaattccagctgtgtggttctcttttggataatcttaacacattgttaatcttacatagtatttttaatttatatctttatgaatatatatgtatgtatgtacatatgatatcatcatcatgggaatggtaaattatccaggaagattctaagaaactatatatgtatgtatagaatcttcccgggaaaacccatgaaacaagtaaccacgagattccatggggttaaaaggaaaaaaagaaaaaaagttaacattctttgctttctgtcggaaaaaagaaaaagtttggtcctttttaaaacttttttatcaagaaagtagaaaagaaaacagagagacttacttctgatgaagtcggaaagattcccggaaccgaagaaaggatgaaccataagcttctctcctctgtttccagcgtagaaacctaacagaggaaccaaattctcatgtcgaacaaacccaagtgtttcgatgatgccattaaactctttagaatccgatctcactgtacacaccggtctaagaaacctaagaaccctaatcttgccgcttctttgtaaagacgctttgtatagagtaccatagcttgattttccgatgacttctccgggagcatcgaggatatcgcagatcgtgagatcttctccgccttgaaagattacgagttcctctgtttccgaggagaagccttgtttgttgtggtctagtgattcgacgtcgtattgatctgattcagtagatgatgattcttttcttctaaggaagatgataaagaagattactatcaagaatgctgataaagatactcctagtaacaatgttagaagtagagattttctcatctctgaaacacttttttaggtgagagattttttggaagatttatgattatgagtattgtgaggtttgcagggaaaaaaattacagagaaagagagaaagattgatagagacgggagatgaagttgatatataagttcagaggacagatctaagaatatcttttttattttatttccttgtatcaatgttgactttatgatttcttggccttgtaagggtatgtgtatatttgtatttacatatatatgcaaatttactttcctcttatgttctcaaccaattatgatgacctaataattccaaattgtattttcgttacacgtcgacctatatgtacttattttctctctagggttgatgtttttcagtttcacacatgcttgtatactccgtataaaagagtttttggaaaataatatctcgagtagaacgttttagtttctttcaaggtaaaaatattaatgagcgaccgtggtaattaattgtaatgatctcaagaaaaaatgaagaacgttggaagtggtgatgataattaaatgttgggtttgactagtgatggtagttgaagtgcgtggggtacatatttagatccttgattggatgttttatccggcaagttagggtcagactggtggagaggaaataaattgaaggcaagtacatacaactcctaacttgagaatgaaataaattgagaagaaaaaaggatagaggaatacttttctctcttttgttgaggaacctttcttctactaataccaattttttctgtttttcaagctgaaattgttttggaataagtatgattgtgtttagagaaaagactgaaaataatgattgttgagaagtgaaaatcgacatcacgattaatctattgttagctgtaagctttgtctctactccttaattagacagttgacacagatgatgaaattcactttattcaacggctcgaaatcacccatttttggttccactatcccatgtcatcatcattttaaattgttcaccaccaaatacgattgtgaaagcatactcgttcataatcataataaattgcacgatatatattggctagccttttctaagttttctcgtaactaatttatatgtagcactacaaagtactataaaaccatatgagttgaaaaaaagaaacacatcacatgagcccacatattaagttaggagtagttaattagctctagattgagaagatgggaatatagattttctttagcattacattttgaagaaaaatcggaaaaatatcatagcaatattttactaatattgattattgagtacatgggttcaaaataataaaaaaaaaatggatgaggttggcattaaatatttattgaaaatgaaacgttggccggcagtttcattttatggccccaatgtgccatgtaagtactatgtagttcatactcctaataaaaaaatgtaatttggactcgaacagcaaaaacatttgatgatagaaaaacgaataaaactgtaaattgatagaattggcttgttttctacttgtatatgatgaacaatgaaggccaatatattattgttatcactggtcgtataaacttaatttagttcttgcacgacatctctcatactcttggctcaatagatggaatatatttacactttatttcaggtgtgacaagtattaccaaacttgtgtttaatttggttgactgactatgacgaggtctctgactcattcattgcattcagtttcaagttgtgacaaatgaatctttctttgcttatctacgtctattactaaaactgtgttgtgttttgcagcctaaacttttagtggatgatgatattcaagaccatgctggtaaaacggtacgtaccatcactagagtccgttgtaaatttgacaaggatttttctgatgaatctgatcttaatatgttgtggagttattattggtacgtgagtgcaatgttccttcatgtatactttggcttgttgcaagaactttaagtttagaaaaggaaaaaaaattcacaggtcatatttgtaagggaatataaattaaaaactcataataatatcaacgagtcaggttggccgagtggtctaaggcgccagactcaagttctggtcttcgagagagggcgtgggttcaaatcccacatctgacattcatttttatttttcttacccatttataaaaaatccccaaatcaaaaccctaaaaacccaattatttttttttgaatttgtgataagattgcttaatgttattatcatgttctttttgggatcaaagttacttggattggtgctgcaattgaatcgtcgttaacccagcgagggactttgagttttgcatctccaaacaaaatggctaccaatagtgacaacaacgttaatctctcgcgcattttcaagttttcactaagttcgtcttcattctgtgtttcttactttttctgagaagctctcttttgcattaagagcttctaattagtgtgtttttccttgattctggattgaattttggaattttaggtaggcagtttatatcaagaagcatccccttcgtattcaattcctggatcgtcaggcatctcaccgaacgagactatgcggtaatgaatctttgttcaccagttgaatgtttatcttgttagattttgccaatgtatttgctttaagcttgatggaaaggatttattattttggttgttgctgtctttgtatgcatttcttatggtaaagattgtgtttttatggactcttaggtgaccgagaaaacagttataaagtcatgttttataagttttagctaaatgcttgattttaatctcgatctatcttttctcattgaaatgcagctctacgctatccagttccatctttttgttacttgtgtcttgtttctcagccgggagggatttcggcgcgcttgcttgcgggctggcaccaaacggtatgcgtaatgcagtttgcgctgatcccgtttgtatatttggtttttgactgagtttttggtcagtgatattcctcaacttcgtgcttcagtgatggtcctgaatcagaggaaaatgtgactaggatattgaaagtagcatgggtgacagttccactcgggatagctattactattgcagcatgcatttttgtgttatggtggcagaaccttagttactccgacccatatgcacaggctatctggattcacggtatattgtggtcttttttgtgcctttatcatagttctttagcttacagccttggaatttgaaagtttcggttttcggtcatacttgtgtctgtaatcaactcaaggactaacctactaacgtggcaggatttgcatgtgtactggagcttatggctgaacctttgtatatcctctctcagacattgctgaaactacagttgcgactcattgttgagaccgtagctacattggcacggtgtgtaactctgtactctctcctagtcatgcaaaccaacatggtacagtccttgtactattccatcttgtttcaggcaaaataaagcatatattatcgaacttaaggttatcttcaacatgttcaggaaaaagtgataatcttcgcattgtcacaagttgcatatggaggttccttgtttattgggtactgggcctattttctcatctgtggtgtttacagaagttcgaatctctttcctttcaggtatgagttctctatcatttgatctcctcgccagcattgttaactcttaatatgctctaattaattctatcataaatattaatgttcaacaatttttgtgatgtcacagacctgggaacttcatggattttgataatgatctctcgaagatgtgtaagctgtttacttttcagtccttccgaaagttaatccttcaagaaggtgaaaaattggtcctggtatggttagatacaccttataaccaggctgtatatgggatagtcgacaaactaggcaagtctttttggtgacaaaatgcaaattatctacgggtacaaatgttgcctagaaatgtttcttacacagttcttaaaactccaggtagtttagttgtacgcatggtgtttctcccctttgaagaaagttcatacactatatttgccaggttcgcatcaggttcatttctctcctgagtgtagttaagtatggaataaatctcaattttagtgtttcatggtattggttcagagatttctcccaagatatttactgttcattaccatatatggtttctatctgtgtgtctctctctgttgacaggtgattatcaggaaaggaataagaaacttggaatttacttgaccgtggcgttgaagcttgtgatattaataggtatattcctatctattgcagagtctctaaaaccgaaattacagatccccaattgtttttgttcctcaatgtagataaagacttcttgactcttatctttggaaattttctgaatacgtgaaattaggtcttatatttatggcatttggcccgagttattcgtactctctcatcagattgttgtatggcgaaaaatggagcgatggagaagcttccttggccctacagttttattgtctctacatcattgtcctagccatgaacggttagtgatcatatctggattaactaattcttatggacttgtcaagcttcttcttttggcggttactatcttcaatctgttactttgtccattatttcgtcagggacctcggaagcatttttacatgcagttggaacaaagaatgaactggagcgctcaaacgacatgttgcttatattttcattgatttacgtcgcattaaatattctactgataagatctgccggagcaataggtttaatcatggcgaattccttgagtatccttcacctatatatatatatatatatgtatatatatatatacttcaactagaatcagctattgttcatctcgtttttgtcttcttgacttctaaaaaacaaagatatgatttttaggatcatctattcagggagattcatccaacgttacttccaggtatgcttgattaaactatagaattatgtaacatcacccattttttcaacaacatttgtattgaacctccaaatttgtctgtagggcacttcttcattctcgttccgaaaatgctttcctttaggttggcaaattcttatcctttcgagcataatcactctcatctcagagaaaaccatcctagatcgtaagaacttttgggaaacatttcccctccatttcggcatcggtgtcatctgcttctgtctttcggccattgtcatgtaagtctcctctcctatggctactacaatatccatttcaaaaaactgacatttaaggtcttgtttcggttctgaaaacttgtgtgttttcgttggtagataccggcgtgagagggtgttcatcaaaagaatcaaacgtttcagggattacaatcacgacgactgaagaacccggtatatgccctggttaaagttcggttaaggattcggtttatagttttgcttagaaaagaattttaacgctgagacagagaagcttttgtattaccgaatccacctttagtggggaaaaaccctcagtttttataggagttatttaacatggtactactcttcattatttttgtttttggtaatggttgaatcatttcatgaatgaaaaggtacagcaagattgaaatatgtataaaaacttattagaaacaacttgtcttgccgcaccgatgatgattcggaccaaatcctaaaacatttttttatacattcaaaatgtgtgtgtcgacgaccttttggttatattgcaagggtttggtgagtgaagaggtgataagggatgagagtaagcagatcggtggttttggtgtggccatatgtgatcacgaggataatcgactatatgagatgaacaaagttctgggaggtgaagagtccacacaccagcaagctgctgaattggctgccttaattcatgctttgaattgggcgttggagcttgatttgggaagggtcacattcttctgtgatgattccaatatcttagaatacgtaattactcaaccctaaaactttttttcattattagacataaagtatttgcctaatgtttttcttttctatgtaacaggtgacaggtaaagctgaaccaaacgagtccactgtagcaacacttgtgaaggaagtttctcttcttcagagcaaattctcgttttgcgaagcacttcctgtgatgaaggacatcacttttgtccttaagcttgcaaaagatgctatagcttcccaaatcaggtggcgtgaaggtgacgtctacatggagacttgtccagtatgctatgaacacgttacatctgacgagaagtttgaggtacccggttgtttccaccgcttctgctttgattgcattaagaaacaagccgacgtggcactagaatttgcgaaaccagtagtaaactgcccaagcttcggttgcaactcagaactacagagagaggattgtgaaggtgttttgaaacctaagcagcttgatcgtatgaccatgtacaagaaggcgagcatgatcaaagccaaagttttagactttgtatgttgtaccacatgtgacaatgtaatggcaaagcccgacctcattgaatacacaaaaacgttcttcgttgatgctgagctgtcaggagtcagaaagtgcacggagtgtgggtattgtttctgcggagaatgcagagcaggatggcactctggcatgacatgtgaggaatactttaaaagagagagtaatgagccatctcctgaggatgtggaacgttaggaagcttcggttaagagtcttagatggatgcaatgcagaaattgcaagtcgaggaaggtatttgatggaggttgcaaccatataacctgcaggtacactctctctttctctgcatttttacttcatatatagtgtattagtaaagtgtgtgtatcatgatatttgtttttttttgtttattaatactggttttgatctcacagttgcaaattcgagttctgttgctcttgtggagctgagtggaacaaggaagccaactgtaactgcccgagttgggagttagaggaccagcgaggcagtgatgggtttttgtgttgagtggggtttaattgatgcaaacactttctcatttgaattgtcacaaacactgacatcacttttgtatatgcaaatttaaacccacacatattaacaacaccaagcagtgaaaatatttacatcactcgtttatatcaacacaaaatatctgcttgcttttcttttagtgaaagcaacttgttatttcgtcttctccatttccgcttccttagcatctttattcttgtccaagtccgcttgcttgacattctcttcgtgtgctttcttaaacaaccttataaaactcaagagtgtcgtggtaactgcagcaatatcgatcgatcaccaggtcttaatgttattagctacatataacgagccactctctaaagaggatgaagtttattgtttccgaggcatatatacctttttcaaatggataatggttaggatcctcgccaaaatagtgtgcaagtgcatcagcattttttccctgtcgtccatacataagattgattcaaaaacaagtgtaattactttcaagatcaaacacattgtaaaatgtaaggcacttggaatctactagtaataagagattgacaaacattaccacggaggagtaaagactcgataccgttgctacttgagtctcagccatggatatgaagtccttcaatacctgtccaaaacacatagacctagattaagttatgtggcagagtcatggacctaatctcaaattcatgattgataaaagagaaatgcaagagatcgagatagatagaaaaacaacaacatactttacggaaaacttgagaaactggaccatcactttcagatgcagtgagttgcttgttcagtttttccaatcctttggttatagcttgtatttcctcagccagagacttcaattgtatctgaaatagacaggacagtcaaaattacagctaagaacggaaaaggtacgtacaaaggcaaacctttgaagctgattcaagactttcaagatctttatggaagtctagtagatctgatgccttggaagcaaggacctgggaaaataaaagaggatggtttcatgatcgcataaatataatgcatgcttcgttctttcgattgtagttttaccttgcaaagataatgcatgagagtcatcttgctgttaggtgcacatgtgtcgcttaatatcaataaacttttcaacttgaatcccacggcactgcctacagaaagcagtgcaaaggatttgcgttcagataaaacaaaagaggacataatgcaacgattaaacaaaggcgccattcctttcgttaacttagctcacattgaacacacgaatgttattgtgttgcgttaggagatatcttaaagccaaaagataatgtaatactcaccctccgcagttccttggttcaatatgttccccatgcagaggatatttgccataatctcttttagcttttctgaagtacggacctgatgaacaaaagaaattaatgaagagaaaaagtctaagaaagatggactgcacaaattaaaactttagagataattattgaaaatatcttacctcctcacatgcagaattaaccgcatttaaacctttattgagttctgctatctgcaaagtaatcatcattataaaaaaaggtatcaagaatctacatgagctacttagacactgataaaaccataacttttattcctccaaagaaccagatagacagaaaataacattataggtaataataccaccagacctgagtgccaaattgaatcttgaaggaaaatgctctcagctttgattctactcctggcaccttcattacctctaggaagtactgcggtgtgagtgaaggaaacgcattaatcacccggaaatgctctttcagtggagctttagctttagctaactaagcaatttgttacaactatatcatagtggggaataaaaagagtgtgataagacttaaaaacagacctgctcacactttcccaaggttgccttgtcaccagtatagttctacaacaaaccagtcaattacgaccaagaataaggactcgtgtcaagtaacaaccttaagaagtagataatgctactcaaaaaggcaagaggtaaccttaagaagctccatctcctcctttgttgggcaaaaccttataagattctctatttgatcaacatctagtacatactcatccattcctagtactgcagcctggatggtgcaaagaataatgtgataaattatcattaaaactataaaacatcaaccagtaaagtaggtttaggagcttaattaccatcatatcagccagcggaatgtttactttagtaagcataatttccgtgtcattggctctcctaaggtcaatctggaacccagtagaaaaaccgtccatcaaacagagtgaaatatttaaagtttatgggtcatctattatatattgaaccacttttcttgtgagacagagactcctttcacctgcttcatggctttcttcttctccaagtcagcttgtttaacattctcttcgtgtgctttcttaaacaactttataaagttaaagagagtcatagtaactgcagcaatccatcaggtaattattgttagctacaaaacaattccaacttaaagtaacaaatagggaattttttttctttctatgtatttcctaagaagattgaagtttatatattttacgccatacgttgttcaaatggacattggttaggatcctcgccaaaatagggcggaagtgcatcagccttttttctcttttgaaacaaagcaaaaaaatcatatcaagagcaaacacattgtcaaaggttaaatctagtaagaggccgttgagaaattaccacgacagagtaaaggctcaatacagttgccatttcagtctcagcaatggaaatgaagtccttcaatgtctgttatcagatacataaaactaggtttcaggatccggaggtcagatatctgaagattatttacgtggtgcacaatcatggaactaaactcaaatcataagacgaacaaaaaaccaacatacattacagaaaacttcagaagcaggaccatcagtttcggatgcagtgagctcctgcttcagtttttccaatcttttgattatagcttggatattctgagccagagacttcacttgtatctgaaatagacaagacaatcagatgatgagccaaaggagtagatcgacgacgccggaaaaagcacaaatgcaaacctttgaagctgattcaagactttgaagatccttatagacgtccagtagttctgatgcctcggaagcaaggacctgaagaaagaagagagttaactccaggacctgagcaagaccattttctaaaacaaccctataattgtaatttaccttgcaataataatgcatgcttttaacagtatgtgtatcacttactgaactgtccaacttgactcccactgcaaccacagatgattttcgttcagaacaaataatgtatatgatgcagcggaacagaggcgccgttcttgaatcaaagagaaagatatgaaacttacccctcgggttcgacttcgatgtgttccccaggcaaggaatctttttcataatttcttttagcttttgtgaagaaacggacatgatgaataagaaatgaggagaaaaagtgtaagaaaaacgaaattcatcataccgttttgtaagaatttagttgcttgcttgttgttatgtttttttcatctttcgtttagaaattcatatatggactagaggtaactattgcaaaatacatatatagtttcaggacctgagcaagaccattttctaaaacagaatctagaggctttttctttgtaaagagagtaatttaccttgcaaaaataatgcatccttttaacacttaatctgtccaacttgaattccactggagaaagaaaggttcttatcaaccacagaggatttgccttgagaacaaacaatatatatatatgatgcagcagaaacaaaaaggcgccgttcttgaatcaaagaaatcttattgaaggtcttgtgcaaaaaagataaaatatccctaatacttacccctgtcaggtccttggttcgatgtgttacccaagcaaggaatctttttcataatttcttttagcttttctgaagaacggacctggtgaataaggagcaaattctaagaaagagaaatgcatatatggactgcacaagaactagaggtaattattatacctcctcacacgcagaagttaccacatttaacctttctttgagttctgttatctgcacagtaacaacagaaccaagaatatacagttacatagacgctggtaaaaccaaaacgttttcctccaaagaatcagataacagaaccgccggaccttagtgccaaattgagtcttgaaggaaaatactctaagctttgcctcaagtcgtggcaccttcattagctctagtaagtactgcgataaacaaaattgatggcagaagtcaatgagttagctaagtaagctaattactaaccatatttatttatagtaggaaccaaaaacagtgcgagattgataacttcaacagacctgttcatactttcccaaggctgccttgtcaccagtgtaggtctacaacaaatcagtcaatcacgacaaagaacaagaacccgtgtcaataaaaagtgaataatgatgattaaccaagaactgacaaatatcacaaaataaataaatagaaagtaaataatgcaactactcaaaagtcaaaaccttaagaagctccatctcctcatttgttgggcaaaactttataagtttctctatttgatcaacatctactacagactcatccattgccaggactgcagtctggacgatgcaaagaaaaaaatgtggactattatcattaagctatgaagcgtaatgacttcttacccaggtaattaatgtaggttttgtagcttaccatcatatcaggcagcggcatcgaaagattaataaccttgttattggctctcatatagtaggatctaacattaaaaaccctgtaactggctctcctaaggtcatgctggaaaaccataagagagactatactttcaaaagtctccaccagaaaagagcaagttaaaaaatatatgtgacgcaataaccaaatgtgttaagaatatttcacattaccagtcgaattttttcaggttttgcctcaacaaagaaaagggtctctaattctgatatatcaagttctattgcactggcaaaaaaaaataagaaatgattacttgcaaagcaatggtcaataaaacgtcagtacgtattatcacatagaagtaagagaaaagccaagataaagttaaagtccaatacgtttgtgaatctccatgtcgtctctgtaactcatcccataagctcccctgcaaatcgcttgttattttaacccaatgtaaaggcttcagggaggccctttttttagctggacgtggaaaaccccacaccattcctgcacccgtatgatcaaaggcatcaaacatcggaggtaatcttctaggcataggaggaggacgtggtggtggtggtggtactcttccaggcatcggcgccgccatagcatcagagccagagatctcgacaagcgacattggattaggaacaaacagacgatttattacagtttatatacaagaccaaacagattgttttagatcatgttcgatctaagtcagagcatataagagaatgatcaatcgcataaatagacttgggaaagcacagttgactttgggcaaaagaggttgtccaggtttgaacagtcgagaagattcctagaagaagatagcaaggaaacattgttagcattaaaatgttcttttttaaatttcgatgcaagcaagaagtgcgagatctgctgggccatcattatggtcatgaaaataacctatatttgagtcaaacctagttattttccctttagtagtttactattacacaagtctccaaaacagagcattttggacataatcatgagccctatccgcttccaaggagaaagaaccgatcatgtacgtatcccactcactaatatgctaatccaaagacggttaaggattcggtttatggttttgcttacaaaatatttcaacggtgagaaagagaaagacaaagtgaagctttattggaaaatataaaaaaccttgaaaatttcattattttttgtttttaagattttttttttggaaatttcagaattttcatttttgtcctattttcgttccctaaaaaaaaaaaaaatatgaacgaaaagaaattagcaagaaaaaagtgtaaaaaacagaggataatgatagttattcttctttttttcctataaacatcagagatagaaactacatacaactggacaaaaaaagggtagaaatttcttaagaaacaaattactttgagtttttatttccaaagaaacaacaaaccatttgcaaattctttaaaaacttaattgaatttcgaaaaggccaaattatggcacgtttttattttatttttgtcgtatggcacgtttattatataaatccgtaccattagttatctcctcttttatttcccgcccattaaaacatccaactttcttctgttcttctgagtacgaaaccctaaaaagtgacagagatggatgaacatggcgaccatcgacagagtaatcctttcaacgatcaacaaactagctcgggtaaaatccttaggattcgccttgagaatttcatgtgccacagtaatctcgagattgagtttggcgattgggtcaatttcatcactggtcaaaacggaagtaagtatcttttcacctaaatttagcttttttgagtgaattcgcttatggcttcgttttctcgagccgggtgtttgctattttcagtaaataagtctttttaggctttgattttggtttgtgctcaaaacccatgtttatgaatactcaattttgaatcatttaaatttgttgaatttctgaatgattgaccaattaagagcggaaatgagttttggagagtgtgttttcgtggttttcaggtggtaagagtgcgatattgactgctctatgtgttgcctttggatgtcgagccaggggaactcagcgcgccgctacgttgaaagatttcattaaaactggatgcaggtttgcgcacatttgcttctccatgggataaattgcagaaatgacataactttcttcaatctatttggttttttttttgcagctatgcccttgtttatgtcgaactgaaaaaccaaggagaggatgctttcaagcctgaaatatatggtgatactctgattattgaacgcaggatctctgattccactagtttaacggttctcaaggatcatcaaggtaaacaaattctttgatgttatcttcgtagtttgtggctttgtgcttctgcttgatttgtatatctacttacttgttatgtcattgtataaatcaagtaattgagttaagaggttttcttcttaattgtgttgtgcaggaagaaaaatatctagccgaaaggaggagctacgggaactagttgaacattataatgtgagcttttctcttcgatttaagattaaaagtatgatcatttatgttatatcagattttcgtgttatttgtggtattcattgcttggatctgtattatgctttcgttgactagattgatgttgagaatccctgtgtgataatgagtcaagacaagagcagggagttcttacattctggtaacgacaaagataaattcaaggtatatcctgtaaatctgtacgcgctgaggtaaatttagttgatagttttactgaatgcttttgttccgtagttcttttataaagcaacccttcttcagcaagtcgatgatattcttcaaagtattggtacaaagttgaattctgcaaatgctcttttggatgagatggagaagaccataaaaccaatagaaaaggagatcaatgagttgcttgaaaagataaagaatatggaacatgttgaagaaataactcaacaggttctgcatttgaaaaagaaactagcttggtcatgggtatatgatgtggataggcagctcaaggagcagaatgagaagatcgtgaaattcaaagaacgagtgccaacttgtcaaaataaaattgatcggaaactggtaagtaatatgtttctatttactcaaatttagactgctatgcacagggtgcatgacttgtatcaaatagtgaatgttgagctttgaggttagttctaccctaaaacattcttctagggccatagtgtcccttgtgcactcttcatttaggagaggttgagtttctaaaatgtttattttcttacacacttatatacttgattgtggcatcaatcataccttagcatatgcttgaatccttcatattgaagttgattataactgaccttttatgtagggtgaggtggaatctttaagggtaagcttaaccgagaagaaagctcaagttgcctgcttgatagatgagtcaactgcgatgaagagagagctagagtgtttgcggcaatcaatgaagaaggtatgttaaaaattagttttaaaagagagtcccagttgacgcgattacccttgaggatgtagtttgataatttatctttcctcttttaaacaaactatattttcctattcagcagttaagggagaggaacaaatgaaaggattggatattatcaaagaaaattttgttattgaaatatttgaattgcatgactctgataggcactactctgatagtgtagcttaaaaattgcgtttggtttagatacttttcgcatctgtgtgtacttgacatacaattttaaacaggctgcaagagagaagattgctttagaagaagaataccatcataagtgcagtaacattcagaagattaaggatcgtgttaggaggcttgaacgacagattgaagatattaatgaaatgactataagaagcacacaggtcccctacttgtaaactaagatcctttcagttttatgctcagggtttggtatggtgattgaggcgtagttaagtgtgtgtgtgagtatgtagaggtgtctatactctttacaggctgatattgatgcaggtcgaacaatctgaaatcgaaggaaaactgaaccaattgacagtagaggttgagaaggctgaatcattggtttccaggtcattatgtttttcgatttcttctcttgaactatccttttgcactatcttcttttatttgactaaccatgggttaaatatttttcacttttagtttgaaagaggaggagaacatggtaatggaaaaagcatcagccggagggaaggagaaggaacacatagaggagatggtatgatggtgcttgtagctttttcttattacactgtttcatttatgtgctctgttttcaatcgtataattgtcacctttttgtagttgtctgtaaatatatttacatttcagtttttttttttggccctttggcttgtagattagagaccatgaaaagaaacaaagaaacatgaacgcgcacatcaatgatctgaagaaacatcaaacaaataaggtgcttatccaattacatggatttactagcaggccctgttttgttatttctattcttttggagaatgataatctcgaggattagttggataatttcaaacttctcttgctaggttaccgcatttggaggggacaaagtcattaatcttttacgagcgattgagagacatcaccgcagatttaaaatgccaccaattggtccgattggtgctcatgtggtaagttacagtttgtcccttctgcacatctgtgcacaaagaaattcaatcgagtttgttcacatcatatggaccctgcatgttgtaaagaaaagctaacattttcaagtgttacgacaacaatctctgctgttttagtgtgaattcttctaatcgtctggtgttgtacagacattgatcaatggtaatagatgggcttctgcagttgaacaagctcttggcaacctcctgaatgcctttatagtgaccgatcataaagatttagttgctttgcgagactgtggaaaggaagcaaaatataacaatctaaagattatcatctatgacttttcaagaccaaggttcaaatctgaaaaacattttccaatatttctgtttatgttctgctttgatgaatggatagatttagttatattgcaaacgccatggctattatttatgcaggttagatataccaaggcacatgattcctcaaacagaacacccaactattctctctgtcttgcactctgagaatactactgttcttaacgtcttggtggatgtggtaatcttactttcagatttctctgtatttgtatactactaacttctcaccctccaacccctgtatagtgatattcattttagctttggtttctgtatatttccagagttgcgtagagaggcatgtgcttgcagaaaattatgaggttggcaagattattgcctttgagagaaggctctcacatctgaaggatgttttcactatagatggataccgaatgtaagtttccagttagattggcaagaacgaatctcttagagagccagacacaaatacttaggttcagattataagggagggacataaatatcaggtgttttcaaattttgtaaaatgagataatgattttacctaggaagaggtttgagttgagatcattagagccaacttctgatgattttactgagtattgacttaattactggaaaggctatatgtctatattaatttcatctgtagaggaagatctgcgtcaacattacagtaatctacatattcttttcttaggttttcccgtgggcctgttcagacaacccttcctccccgtcctcgaagacctactagattgtgtgcttcttttgatgaccaaatcaaggatcttgaaatagaggcctcaagagaacaaagtgagatacaggaatgtaggggacaaaagagggaggcagaaatgaatctcgagggtcttgaatcaacaatgcgcagactgaaggtagtgtaacatcactactgtctctttagctgtatccattgtttaatgcactggtcatgtcgaactaatgtgccaaacttttaactgtgatacattttatttgtttccgcaaagcttaagcttctttggattaataaccattttgcatatttttttggtttatgtacagaagcaacgcacccaactagagaaagatttgacaaggaaggaacttgaaatgcaggatctgaaaaattcagtcgcttctgaaaccaaagcatcacctacatcaagtgttaatgagcttcatctagaaatcatggttagtgatattggttgaaaccgtttgattgtcaatatttcccatagcatcattcttgattgcactctttgtatttctcagaaattccaaaaagagatagaggagaaagaatccttgctagaaaaacttcaagactccttgaaggaagccgaactaaaggctaatgaacttaaagcttcatatgaaaacttatatggtatgttagcgatacatttatattcttggatttgtgtaaaagagattagtcatcttgatttacagaccagtttactttaatatagttcaagctagctacagtgattctatctaaaacgtacatgcagagtccgccaagggtgaaattgaagcccttgagaaagctgaggatgagctaaaggagaaagaagatgaactccattctgcagaaacggtgcaccttcgttaagagtttggttctttacttgtttgcacttagtactgaactgtgattctgtttcaggagaagaaccattatgaggatataatgaaggacaaggtcttacccgagattaaacaggctgagactatatataaggagcttgaaatgaaacggcaggtaagcaattataaaattctactagtaataaacatgaaaagggacaaaaatatcataatgagcaatgcaatttcattatatatatatgtttgtatgcaagttaattattgctcttggattcattttttttaaatactttgttcaactgctgaatttcaggaaagcaacaagaaggcctccataatttgtcctgagagtgagataaaagctttgggtccttgggatgggccaactcctttgcagcttagtgctcagattaacaaaataaatcataggctgaagcgagagaatgagaagtgcttaagtttctgtgccttgtgattgttcctacatacggaaattacccgttgaatgcctgttaatgttacatgcgtttatctcttattgatacagttattctgaatcaatcgatgacctcaggattatgcacggggaaaaagaacagaagattgggaagaaacgcaaaacttacaaaagctgtcgagaaaaactcaaggtttacagatatattttcccttcatccaaaattccgagatatatgtgctaattcatttaatgtgtgcattactgtttaatcaggtctgcaaagatgcagtagactcacggtggaacaagctccaaagaaataaagatcttctgaagcgagaattaacttggcagtacgaattgttttgcccataattaccaataccattggctaactctttagttatgtgattttcatatgctattttccttgattggtgatcatcaaagcagattcaaccatcatttaggaaagaaaggtatcagtggaaatatcagagtctcttatgaagacaaaactttgtccatagaggtaactggtgccatattgctacaatttgcatgtgatatgtctatattattactttaatttactggttggttgcacttttgtattcgacaggtaaagatgcctcaagatgcaacaaacagtgctgttcgagatactagaggactttcaggtgctgtttctctgctctagatttgcatatgaattatttaagacttaaattcactcattctagaaacgttagaacaaggttcagtggaataagttaagtaactaagcccttgaagatggtacttaaatctaagaatctaaaactattttgacctttgtttactatatgccctctatgttgtcctatatttgaatctctagaagctaatgctccattgagagtataaccttattcgttcaaattatcagctatttacatttctagggagcttcaaagtttgatcaatcctactcttatcataaattccaggtggggaacggtctttctcgactttatgcttcacattagctcttcagaatatgactgaagccccaattcgagcaatggacgagtttgatgtgtttatggtaatctccttttgggaattttatttcttacaacttgatctcggtttgcatagtataatatcatacaccacttcttctcataacttggagcttctaaaacaaaattcaaacaccttgagagaaataacgtgttaacgattcggtttctgcaacctcaggacgcagttagcaggaaaatcagcttagacacattgattgatttcgcattgaaacaaggttcacagtggatgttcatcactcctcatgatataaggtaacttccatccacttagtgaagtaacacacaacactgtttctttaaagcataggaactatgtaacattgtaatctctcttttgcaaattacacagtatggtgaagtcacacgagaagataaagaagcaacaaatggctgctccacgttcttgagctacaaagaacctctccttttgtaaattcaccatcttactctcttttggccataacttaatggggtctttctaactttatcctatattttggaagtttctcttttgtcaataatctcaacagatagatataatgattatgatctagtggcttcagattttttgatgaaaagattgaaagtgacaggttcaattttttcttcttcactgtacatttgagaccgtttgtacattattcctagaaatctaaacagtttccaaaacgaaagctaacaaaaagagaccgaatctttcgtctttagagagagacaacaaaaatatcattttttataaacaaaatctaaaatccctaaaaacaaaatttttgctctgtgaatgtaaaagttctctagttcctcaaagcttcaaactttccatttctattgcagaaatccgttaaagctctttctcgggaaaatcaaaaccgagaaaaaaccttcaagaaacgttgacggagaatgtgaagtatcatgtcttataatacggggaaggagagtagtccagtttcgccattgaagaagcgacgagcaagctggtcggaactttgggttaaccatcaccacttattgtcttcttcgccccttgatttagccgcaaagtttcagtctttgactcctcctatctccaaatccaaaaccctacttcctgatttcacgcttctcttacctgacctcattctcatcagagtcattcagaaaatccctaattctcaacggaaaaatctctccttggtatgcaagagatggtttagactccatggtcgtcttgtacggtcttttaaggtttcggattgggaatttctatcgtctggtcggctgatttcgaggtttcccaatctggagactgttgatttggtcagtgggtgtttaatttcgccgccaaatttaggtattttagttaaccacaggatagtttcgtttactgttggtgtagggtcttatcagagttggagtttctttgaggagaatttgttgtctgttgaattagttgagagagggctaaaagcacttgctggtggttgctctaatctccggaaactcgtagtgacgaatactagtgaattagggttgttgaatgtagctgaagagtgttccaggttgcaagaactcgaattgcacaagtgttctgatagtgttttgcttggcattggtgcgtttgagaatctgcagatcttgagattggttgggaatgtcgatggtttgtataactctttggtttcggatatcggattgatgattttggctcaagggtgtaagagactggtgaagcttgagcttgttggatgtgagggaggatttgacgggattaaagagataggtgagtgttgtcaaatgcttgaggaactcactgtttgtgataataagatggagtcgggttggcttggaggtcttcgatattgtgagaatctcaagactctgaaactcgtttcttgtaaaaagatcgataatgatccagatgagtccttgagttgttgttgtcctgctctcgagcgattgcagttggagaagtgtcagttaagagataagaataccgtaaaggctttgtttaaaatgtgtgaagcagcgagagagattgttttccaagattgttggggattggataatgatatattcagcttggcaatggctttcgggtactaaaaactttatctctcccttttgtgcggttgaggcttgataatagttaactgaactgcattctggttttgtagcactatatgaatctctaggaacaatgtgatctttaaaaagttgtagccaatttcattgctactagtataagatcttgtcgataatttttaaaaagttcaaatcttttgccaatttcattgtttgttgggtttgcaggagagtgaagctgttgtatctagaaggatgctcattgctaacaacatcaggtctagaatccgtgattctacattggcacgagctcgaacatctgaaagtagtttcatgcaagaacataaaagattcagaagtctctccttcgctgtcagctctgttctcagcattagtagaattgcagtggagaccagacaccagatcccatctctcttcaagccttacagggaccggaattggggaaaaaggtgggaaatttttcaagaaaacatgaatacttaacacttcgcaactctttcttcaatgttgttttttgaaagtttcttaggttctctttctttgtttcttctcgttgaacaatgtagcaattactgtaaattctactttttatccattctctgtttcatagattcatagattgatgagagacttgaccccaaaaaaaaaaaaaaaaattaattggaggaaaaatggagatgcggggtatcgatccccgtacctctcgcatgctaagcgagcgctctaccatctgagctacatccccttttgatatcttattatatcttaagacatcaagaacgattttatcaaatattattgttattggatgttgaagtattcacaaataattaactagtgatatatagaagtattttcaaacatttttcttactagaaatagatcattcattgcatgttaaggaataattttaaatgattatgtataaaaaaataatagtgataattcaggtgatttaaacgacctggaagtttttttttcctaaaatcaattacactatatactccacattatcaatcctcaaataattacagatttaattagtgaaatatatatttttgtgtatgtgtgtgtgttgcccaattgagaaaaatgtacatgtggggtccggtttcatacaatattgcctaattaggccagtaaacaataaaaaagtgttacaacttaaattaggttttcttaagtggtttaggttcatccatatatacacatatatctttattttctttcgttttacaccaagaatctcacatgggccggctttgttccattctacgtgattttcattttaagtagtaataatagtgtggagtttcttatatatattttataaaaacaataataatatggagttttcaaataaatttgtttgtgttactatttgcaatttgtgcatgtgatatactaatgtaccagacaacattttaaaaaaaaaatttgttcgtcatgtgtatttgatttattaaacatgttctaataaagggttgcaagtttccttttaagaaaaagttaactaactacaatttctagtcttctttagttgttaataaggccagtcataattccgatatccatatatatgttagcaagaagcattttactagcataagttagtttcgttagataaaagtttgaagaggtctacacaataaaactaggttaagaaaaaaatgacacacacatatatagtaacaatgttcttttctgttacttaacctgcataatcacagacaaaacatttttgggacctgagacataacatatatatagctttatattccagttgaactcgataacaagttattttcttccaaccaattgaattaatctcgcttgctaagaacaatatcgtttatacttaacactcattcaatgatcagtaagacttgaatctaggtcatccatttaactcttttaagtatcatttttctttattacactcttttgtgtgtgtgtttttcaatgtacaagatgcgtagaggagtttgtctaatcttacatcgttagttttgccatctcgttcacatcactgtactgtacggccatttttctatctttctcagtattcgaagaaatgcaccccaaaaaaaggctaccttcttaattgaccctattagccactaagagacaaccacgcaactggagaccagtacttaaccaacaaggtcaactatcgcttcattgataattacgtagttagctttcatccacgacacgtggttatttataattggatatagctggcacctaagtttttttatgtgtgattaaaactcggaatggacaagttgactatgctaatgactggcagtctttgggattgctcgagaaacagccagacacgtggtcttgtcttattagatctatttcctcaaatagaaatattagtcgctatcttactaacctaatttgcaacattttctataagtagaattttaatttattagacgaccaaatcttattggatcagttatttgctcaccccacaatttaatatgattttattgattacaatattatcctctaatccactattcggacaaacaaatttgtcattactgctggcttgaaattggaagaagatgaatattagagcttttctttaagatcatagggaatttcactaatatagaaaaaaggatgtctattacgataggtacttactttaacggggtaaactattttatagtaaaataacattgaaagttaaacctaaacgtatatttttccctttttactacgtctagatagataagtgtttgtattttcgccgagtctgcatttgcattctcatttggcacctcaatatctggttaattaaataaacatattctttcttttcgtttgagggtacgtataggtcactaagtagagctaatacctttgaagttactatttgaaattttagtgtttaatggaagcactgcctcaccttgacacccttgtgcttaacaaatatatggccgctctagtgtagctatgtgtatatgtaatgtaatcacatgcatatagcaatatgtaaattatgcttttaccaaaaaaagtgaaagaggtaaattatagataccaatatggctttaatgtagctatgtgtatatgtaattaaacatatagatatacatgtagttttagtttcaaacattgattaaaatcacagtttgtagttgccattaatggatgtaaattatttattagttcgtcgttttttgtgacttggattagttatattgttggtagatttactaattttctattttattttagaccatttgacttttgaataagtaattaagtagaataggactatcacctaaaatattatcagaccaacgaactatttaaagcatttaatttatataaaaataatcagaatattaagaacagaattaattaattaaatgctgtaaaaagaatttaattaaactaaattagcttagaatcaataaaagaaatgattataaggtctcattgtggtcgagagttttctactaaataattatatccttagtaaaataacacatttttgataaataaggaaacaaattaaagaagaaccaataagagtacagaacaccatttgttaaacctagttcatgccttcctgacaccactattgggaagaagatagttagtatactatttaaaactaattaatactacattaaaaattgacaaaagaaaaatcctactaaataatagtataactagtaaatcgagtatttgtgttgagtcatcagaatttcaacatttaattacttgtaatgacatgcacatacctctttatttaagtttttaaaataaatgaattgattaataccaaaaacggccattttaataactccctgaaatcatatatacttcttcgccgttattcattcattgtgtgtagcttaacgaacgaaatatatttgggtaattcactatattactattttcattataccgttaattgattataactagtcaccgcgttagattcaaagaacctaaattaaacaaatctatttctattttttttatccgaatatagttttattaattatttctaattacaatttttatttttattttaaatgagcagaaaaaggtttctttcttttcaaaaagggaaagtgcaaaacaacctagccaagttgcgttacacactacgtatctttctcctctcacagaatatatatatttttaatttaatacatgaatcaaatttgtatgatgaaaaacgatcattttcgtcaaaaaattccacctttctagttcctctgcgtctccttaatctctctccctaacttctctttcacctttactctctctatctctcttacatatatctatatatattccctgaacccatctcttgaaaacattcaagatcaaatctttctcgatctattcaaagaaaaactatttaagaaacatatgttttggatcaagtaagggtttgatcttgtaccggaatcaggtttttgcttttcttctagggtttaaggttatttaaaaacagatggaaactttcggtgtgtttcacaaggaagatgatgagcagatggatttgcctcctggttttaggtttcatccaacagacgaagaactcataacccactatctccacaagaaggttcttgaccttggtttctcggctaaagctattggtgaggttgatttgaacaaagctgagccatgggagttgccatgtaggttttaaaaaaaaacataatttagcaacacacatccccccatgtctaaattcaaacaaggttttgaagtctaatgagttctgttttttggtgttttttgttttttgttaaacagataaagcaaaaattggtgagaaagaatggtactttttctgtgtgagggatagaaagtatccgactggtctgaggactaaccgagcaactcaagccggttattggaaggcgacagggaaggataaagagatcttccgaggcaaatcgcttgttggtatgaagaaaacacttgttttctacagaggaagagctcctaaaggccagaaaacaaattgggtgatgcatgagtataggctagatggaaaactctctgctcacaacttgcctaaaaccgctaaggtcaaataaaaacaatccaagctttgctctgtttcttgctctgttttacaactctgtttttgttttgttttgtttttttttccatttgtttgataatttttggggtttggttccatttggcagaatgaatgggtgatctgcagggtatttcataaaactgctggaggtaagaagatcccgatttcgacgttaatccgaatcggttcttacggaaccgggtctagtttaccacctttaactgattcttcaccatacaacgacaaaaccaagaccgaaccagtttacgtgccctgcttctccaaccaagctgaaactagaggaacaatactcaattgcttcagcaacccttcccttagctccatccaaccagattttctccagatgattccactctaccaacctcaatctctcaacatttccgagagttccaatccggttcttacgcaagaacaatcagttttacaagcgatgatggaaaacaacagaaggcagaacttcaaaacattgagcatctcgcaagaaaccggggtttcgaacaccgataactcatcggtttttgaatttgggaggaagcgatttgatcatcaagaagttccatctccctcttccggtccggttgatcttgaacctttctggaattactgaagattcagaacctgaaaagtctattaatttaggtcacaagtaagaaaatctttgcaaagttttatccttttagcgtggtgtgctaagcttgtatagattattgacactacttcctgtattagtgttttatattattatattcaactaaagttaatattagagaggataaaatgaagcaactaaattcgaaatattttttcttgaaatttttgttaatgcattgtggtgggttatttgtagcaattactcaattatatgatgtcttttgtgataaacatccctgatatacattaaaagagttgacgagaaatgatatagaaaacaaattttatagacgagaaaagtaatgttaatgtggcttcttagacttaattaaattataagatttctttttgttgattgttttacgtttgagtacaggaaacacatatttttaaatttcagaatatttttaaaaatagttacaaatatagaaggatggggataatttcagctatctgaatttaatttatcatagtgtaatacatacgatattcaaatatgttgaaacttaaaaaaaatccagaaaatgtttttttttttcacatcgtcataacgctaaagattagtctccaacttcgattcatcataaatattagaaccaagccaagacataacgaaccatatcgttttacacatatgtgactggcgacgagacatgacgaacaaatccttcgaagaaaaaaaaaaaaaaacatcatcacaccaccatattcacttgtatgtttcagtagtttctcataaataaaagtctaaatgtcatttatctatgaagatccatcctaaatcgaccatctaattcactggtagaatccaagtcattcatgttactttcttaatagttatgtttttcgttccttcttgatttatttcatttcttccatgaagatccttattccgttataaagttgttacgcatgatgtatgaaacgtatataaattaataaattatagaacataatacagaacatctgttaatacaccttttaacttgttatgtcaatgttatactgaagtctatacagtttgactaagaatggtttacattttaatcggttatcacttatcacttatatacaacaaaaatcggcgcattagtcgagtctaaaataagataacgatcaataaagcttgaaagacttcctcaatcttaaaccaaaaagaaactaaacagacttccgtaaaaaaaattagtttttgaagagaaatttatggtataaccaaaacgaactaggacacgtgttaaaaatgatatactatataaaaggatcaatttgagttccacacaacatctttttaacaatttttaactttcttttaccttttatatatattttctttttgcaatgatatctttctaaccattatatacgaaaactatgtgaaaaactggtataattctgatttcataaaaaatttgttcactttttcacattcagatttcagataaagtagtagtcttgttcttttttgaaaaactataagaaagaaagtagttttattctatgttctaacaattattgcacatttgcaccaatggtaaaactcgttttgaataacatataactcgattggtgattacattaaaataaaccggaattatttggcggttatgaagaaagaagttagatgcggaccatgcggtaagtgatgacgatatactgatatagtatggatggtagaagacatctttaagaagtgtttccgaataataatattttggcgactgaatattaaattaagaaaaatacataaagtaacaaatataaataatttaataaataggataaatatgtatgaataaaacagatatgaatacatttggatttaaagagataaaagaaatactatttatattcttgcggtaactatattaataatgacttaatctcttactgattaggttttctgttcttaattagtccaagttttataagaaaataaactgtttcgaaaaaaatatatttaaaggttttattatttattgatgatgaaatgtaaacttttttttaaaaatagttacatattatttattcagaattatatataattattgaacacaaaaattgatatattataatcaattttaatatggtgcattaatgaaaggagtagacgttaatttttgttttgctcattttgaagttttggataagaataaaaccaaagtcgataactttggttacttttaacagttagattccgaacacccgaaactactcgtattaaattttgtattattgctaatttcggattagtataaatttcagtattggaaatctcacctcagttaattacggatttcacatggatacgtattcccacgtgtcgtattcgttgtaattactcgccactttatttcaactttttcttactggtttgtttagttcccactttataaagacaattacttgtccttcattattcctgtttaataatttggggaattcaagatatatgaagtaccatagtatctaaatttgctaagtttattctaaaaatcaaataatataactaaaatgacaagtcttgagatatttaattactgttaaatttgtatttataaaatgtacatgatatatatatatatatatatatatgttattttgggaaatatacggtgtgttgactgttgagttttaaattttaattatcatagccacgtgacttgatttctcgataatcactaaaatgggccgtaagataatcagaatctgacttaaactcaaaacatatatgggcctatttgatctaatagtcacaatgggttaggtttttcggagaatcttcgtttttgttttgttgtaaattcttttgttcacgtcgtttagtttaattttcacacttcacacatgggtgtgattggcaaaacttttaaataatgacatcagataataaataatatacttaaattgacattatcgtaaaaatcgctaaattattgtgattagttctaccattttaatttaatataattggctaaacatttctttttttttttcttaacaacaaagatttatcatgaaagtttgaagcccatggtaatgcatcaataatactatattaaactactatgccacattttcaggtcatataaaaacaaaagaattattttatcacaaaaacccggagcgaccacaccgaccataatttaaacaaacatttacagccaaaacctaatatttaaaagaatagtgacattgggtccacgatagagtgaatataaatatggtctacactattatcagttagctatgtgttgctgcatgcatacgaattctgttccgaaaaataaatcatgcaatcaaacagtacaacacttcaattattgggactttttgtgtcaattagaggaagataatgataacacacaattactggccaccgaaggtacgacgaagaatgcttattccaatcgaaaatcatcttctattttttgggctttgatgtttcgtttcttgaagtcaggggcggatctattctaagaaggcagtaggagtggactgactctacaaataattacgagagtttatgcattttgtcatcattttcttacgttagtaaaagtcattttccattcaatcattcatcttaaaagattatcctaaagttcaataatgtttatgaaagcatgagattctttttaaagtttttattttatttttaaatacacttcaacaaaattttgatttgaaaaacaaaaaaaaaagttgtagtgcatgaaaaactttgagggaagttgatagcatcatcatcaataagctgaaaagatcctaattaatcggaaaaactcattggattttcttaacatactatattactatactataaggtactataaaataatatatatactaaaaaggaggatcattgaattcttaatcatcattagtattaagcttatatgagagttagttatagtttgttactttactctcatattatatatactcttgtaatgtttactttgttcattaatgagaaatatactttacatttgataaagttaatatggtatcagagcaaagaaaaattgttttctcattcactttctcgagaaagttctaacaaccaattttccaggaaaaattcaccaaattcatcgtcttcttcatcatcttcttccattttttctgcttttgtcttcaaatcgtcatcatcaacgacgattctcacattatcatcttcatccatcatcatttcgcagctcaatttgctgttatcttcaatcgataagcaacatcaagctttcgatctttccttcaattcatctctacatcacaatcatcgcgattcacattgaatcttcttccgctttcattcacttcatcgatctggatttggttgttacttcttgaacttactcgattctttgattctttcattgaataatggcaggctaaaacgatcatctaaagctccaagttacttatcggattaccattgttctctcatacacaccaatcctacaccaaaggtcattactactccttatcctctttcttctttcctttcatatgctcagataaagcccacctaccaaaattttgtgctttctatttcggttgagacagaaccaaaaacatttaaagaagtcatagcatctgttcagtggactatggctatgaatgtggaactaggtgttatggaacttaataagacttggagtgtagtttctttaccaccaaataagaatgtagttgggtgtaaatgggtatatactattgagtacaatgcagatggctctatagaacgatataaagcacggttggttgctaaaggtttcacacaacaggaaggagtagactactttgatactttctcccctgtggctaagcttgctagtgtgaaattagttctaggattagtagctagaaaaggatggagtacgactcaaatggatgtcacaaatgcatttttgcatagtgacctagaagaagaaatttatatgagtcttgctcaaggatacacaccatcttcaggatctttaccaccaaatccagtttgcagacttcataaatccatatatggattgaaacaagcttcacgacaatggtataagtgcttgtctcagactttacttgatgatggctttcaacaatcttatgtggataacacgttgtttgttaagatcacatccactgctattgtggctatgttgatatatgtggatgatatcttgattgtgagtaataatgatgaagttgtttgtgctgtgaagagtgttctggctgcaaggtataagatcaaggatttgggtccagcaaagttttttcttggcttggagatagcaaggaactctgatggtatttcgatatgtcagagaaagtattgtttggatttgttggctaattctggtctattaggatgcaagcctaaatcagtgcctatggatccgaaggtggttcttacgaaggatttaggtactttacttgaagatggaagaccttacagagaattgattgggaggttactgtatctttgtgttacaagaccggacattacatttgcagtccataatctcagtcaattcttatcttgcccaacgaatgttcatttgcatgcggcacatcaggttttgaaatacctaaagaacaatccaggtcaaggtttgttttcctctgcaggaacagaattgtacttaaatggctttgctgatgctgattggggaacatgcttggactccagaagatcagtaagtggtgtgtgtgtatttcttggcacttctctgattacttggaaatctaaaaagcaggaagtagccagtggaagtagcacagaagcagagtacaggagtatggcagtagcgactaaggaattgttgtggttagctcaaatgctgaaagacttacatgtggagatggagtttcaggttaagctcttttgcgataataaatcggctatgcatattgcaaataactcggtgttccatgagcgaactaaacatgttgaaatcgactgtcatactacacgagatagagtcaagaatggcttcttgaaggttcttcatgttgatacagagaaccaacttgctgatattctgactaaggcgcttcaaccaggtccatttcggtctatccttggtcgtctatcagtgtcaagcctcttccttcctcaaaaaggtcaagctatacaggattcggcttgaggggggtgtattaagcctatatgagagttagttatagtttgttactttactctcatactatatatactcttgtaatgtttactttgttcattaatgagaaatatactttgcatttgataaagttaataattagcaatagacgagtgggagaaccacatgaacctttcatatgagagtgtcaatgggcctgtcattgttgcctctgtccttaggccccacttttccatcatttcttcactttgttttgtagttaaaaatatatattatgtttctttccatcaaaaattgttactgctttagttctatgggtctatttatctaggtccactatgattcttatatatatttccttatctacatgtccactatcaatcattgtaattaattctatcaggccctttgttattccgaaaaagaagtgtaaaatctaccgaataacttatgttatgatgaatgggagggggagtcagctttgaaatcgtatactgatcttgtgtatcacaaattcacaataacttattagatctttgattttattcacaatggtattaaaaactattgtttaagtgaataatttgaggtgtcaaaaaaaaaaagtgaataatttgaatgattggctcaatatcaagcccaatgatcaagacctcgtctctccattgcgttcgcgtttgtcacaaatctcatgccatagtattttcaagttgcatttataatgacgaaagtgacaacctatataaggctaagcaacatagaacaggcatactaaaaatcattaatatatagtattattgctacacctatttagttatgtcggtggatatctaaggtataatatgcactctggggggattttgaaaattttgaccaactaattattacaaaagatcattaatactaaatgaaactcatgatttggggcaagtctttaaaacatagttttcctgcccacatttgaaaagtaaaataaagatcctcttttgttatttgagggttgtctttttttttttttttttttttgaatcaatgtaaaatttattcaaaaaagtccttggttacaatatatgcagctttaagcataacgtttttttgagtttcagaaaattttaaaaccaaggaaaaacagaggtataaaggatttcaaaacagagcctttgttaggctctcgagtggaaccaaacccggagggcgtcggccatgtttgatggttggagctggtgaatgaaggagattctacgtacgccacataattttaccattttcaacgattgcgttgtttcccaaattatgaattggaactttggtagcatcgcaatatatacgacgtttgggtttggcccatgctgccatgcatagcaatagttttaaatacatgtggttggtaatatagaaaatggtttgaaagaccacaaactttgatcagtgatcgattcggtagggccacaaataacaatgttttcgccacatggtcatactttacgttttcgatgagaaaatatttaaacagtttgttcgtcaaatttcgattaactagaacaaaattcataaacgagagagacagaataattcgagagagctagagtgagggtaactagaaagatagtaactgattttgtatctaataattaattcattaatttaaaatcaatgataaatcactttgatggttgtggccttgtgggtaattataattaacacgtaccattttttatcaaggcatttttaaacattttgtttgtttttattgaagttttcttctcactattcaaaaacgtaaaaccctaacaaaaaaaagtaaaagtagaactgtttacaagtctggctgaatgggttgattgactcgacaaaagattttccatgtggattaatagaacaaattttaataatatatacgaaattgatgtattttcttttctttcgatcactattaatgtcttaaataataaaaacatatagtacattttacagattataaatttatgttgtgttttattttgagttttggcttgaattttttttttttttttgttgttgttgttaaagtggtttgaatctgtattggttacaaataaaacaaataatgttacgttcattttgtctgtagatatttttcttacaacttatgcagctatctttggggtttcattttgagtgtggatgtttggttttgagttaactctgcatgttccgaagaggcgtaactaaaataaaagaaactacttgagatgcgagatgtgaaatgtgattagatgagaaaaaacgaacattaataattgagcaaaataactttatttaaattttgaattcagcgttagtgttacacccaaagtggcaaacaaataggaccgatgttgaaaaagaacacacgtgatataaaatgtactgagagaaaattatttgcattagatgacaataaatacaataataatgaatagatgaaataacttttagttgacgaaaaaaaaaaaaaacttttaatctattttattcactagatcaaaaagcatgtttcagacagttttattcttatcattcaattatttcacaacgtataattttagtttattttcgtaatttgttaatatacgtatcaattgaatatttttgacggtttttattatgtcatttaattatttaagggaacatagtttattttaaaatgcagttctattttacaaaaaaaaagaaaaaaaaaattgcagttctacgttgacatctagctgatcaactattcatcatatatacttgtataatctattattttaagttctatattattattaatatgttaaatatagatatatctatttaagaaaatatcatataaatatatgttataaatctatatatagaaaaaataaagcacagaattttgtcccacattctgtcgatacgtactcgagcttatgaagttgttcttttctaattatattttttcccattgccctttatcaaatcaactctaataaaaatatatggtaacttatgaagttgtcatgtatttatgatatttctctttgggtcggcactgtatttgtgatgttgattatttatctagtggcagaaaatattccataagtctctctcaaaccatttgaatagttccaaaaacatcttgtcactaacactcactcttgatgagttttttttttttttttttggggggtcaaagtactcttgatgatgagttgatattcttatttaaaaaaagcttattacttatttaagttatttcaaaaagtacattctacacgagtgccaggcttatatatatgcataaacatatataattatgcatggaggagtagtagcttgcaatgtcttgaaactttgatatatcttctcctagtctttcttttaaatgtttaatatgaaaacacaaaatcctacaacggtcgtctaccacagtttctcagtcagtttcatattcagatgcatcagagttctcatcaagagatctatcagtctattgccttaaactcgacgacattctgttttttttttcttttcttattttttctttttcttatttcttacctataggttgtatgtaaatctatatcaaaaaaagaagaaaaacaagatgtcaagaaagccatgttgtgtgggagaaggactgaagaaaggagcatggactgccgaagaagacaagaaactcatctcttacattcatgaacacggtgaaggaggctggcgtgacattccccaaaaagctggtatatatgtgctttattattatgtatatattttaaaacactttttacatatatataactataattgttgtttttatgacaaatgatggtgtttaggactaaaacgatgtggaaagagttgtagattgcgatgggctaactatttgaaacctgacatcaagagaggagagtttagctatgaggaggaacagattatcatcatgctacacgcttctcgcggcaacaagtaaaatcctagcttgccgaaatccatataaataagggtatatataattaacacattattaaagtttatatatatgttttacttaaaaggtggtcagtcatagcgagacatttgcccaaaagaacagataacgagattaagaactactggaacacgcatctcaaaaagctcctgatcgataagggaatcgatcccgtgacccacaagccacttgcctatgactcaaacccggatgagcaatcgcaatcgggttccatctctccaaagtctcttcctccttcaagctccaaaaatgtaccggagataaccagcagtgacgagacaccgaaatatgatgcttccttgagctccaagaaacgttgttttaagagatcgagttctacatcaaaactgttaaacaaagttgcagctagggcttcttccatgggaactatactaggcgcctccatcgaaggaaccttgatcagctctacaccgttgtcttcatgtctaaatgatgacttttctgaaacaagtcaatttcagatggaagaatttgatccattctatcagtcatctgaacacataattgatcatatgaaagaagatatcagcatcaacaattccgaatacgatttctcgcagtttctcgagcagtttagtaacaacgaaggggaagaagctgacaatactggaggaggatataaccaagatcttcttatgtctgatgtctcatcaacaagcgttgatgaagacgagatgatgcaaaacataactggttggtcaaattatctccttgaccattccgatttcaattatgacacgagccaagattacgacgacaagaacttcatatgatccgttgattgcttaccggactagagttgaccggttaatgtcatatggttctcttagatatttgtcaagttatagtaaaggtccactatagggtcactatatattaatattcagtaatggattctcttagttagagaaccttgtgatgccgtggatcaattagtatttgatttgcgggagacacgagttttttttccttctattgttgtttgtggatttacgtactataaataataaataaaacacccatttgattgcaagcgttcactgtactaaaaccatttgatttaaagtttgagccttagtttgtctgacagtctgagccatgttaccaaaaacaatgaaaaatatgtaacacattttaggtttttggtgatatgaaactccgaagaaacaaatccctactgactactgagaaagtcgataagcttttttgtggataagtttcatggatatattagaagtagtaaccattaaccaacaaaaaaatagcttaagtgagttatcaagggatcgatgaacaattatgagatccaatgtgtttttgttaagaggcaaaatccgatgcagtctctatgagacaaaatttccatgggaaaaacagagagttctgaagtctctctaccttaaacatgtgcaagccttagcttcaaatgctccgtaaggttttcatttaaaaacatgaaataagatagagaaatgatacttgatccaactgatgaagattaacaagataattttgaagcaacttctgtttgtataatatgtcgtacaaaatctgctaccaatttagaggccaaattattttcttttctagacagtttgtgaggtgggcagctgaaggtgtttaagccaagattctcaagatttataaatcttgaatcgaattaagctatcagccggaaattaggaaatgatatgcatatagggactaaagatatagttgttgcattaaaaagcttaaagagagaagtggatgtgaaaagaaaaaaaccacagatttttgcacacaatcttgtgtgttgattgatatccaagtagactaattagactgctttgttctacacgataattggttgtttttagatatcaatacgaaacatgttaaaatgtgaaaatattttagattagatgataacacctgaatttaatgacaaaaaaaaaaaaaagtggatagagactagagggacagcaaggctgtgtgacatatatgggcagatagacaaagaagccgaaaaacgtgcaccgtccaagattctggctactatacctaatttccttcccgcagggacttgacaaatatcactatctgccatttttagttttattttgtattggtgtcaaagaattgaaataatgaacaacggtcgtaaaaagatgtaaatggtgtttgattgattaatgtttttttttttttcttagtatattttagcaattgcatattatcatataacattaattaataattattgtgttgtagataaatgtcatgcataatgcagtaataaatgtgtgtgcatatattatatatacacgttaattagatgctaaaatgagtgacatatcttttaattctttgataacaccatttccataaatcattgtaaaacttaccttataacaaaaaattaataaatgttataggggtcaattgacccccataactctacactagccccacctctgcggataagcttaacatgtctattaatattcattagtttacgtggtttaaaagtttattgtcacgagtgcatgacacttaccgtgatgttgactatatgaagaggtagatcgtacgtgtacaaatgacttcatagatctttgatcttttttttcttcttcttcttttttggtaatattctttagttttatttgatctattgtcgttgtaatgatctttgattacaaaggaaaaaaaaaactaagacccttgacgaaaataataaccgtattcgtaatctctgatatcctacattatgtactatttctgatttttgtttcttatacgcacttttgttctagatataactaagaaaatgtcaaagagaccatattgtatcggagaaggactgaagaaaggagcatggactacagaagaggataaaaaactcatctcttatatccacgaccacggtgaaggaggctggcgtgacattccagaaaaagctggtacataactatatatagacgcatttgtgtctctataatatgaatttattcacaatctgttactaatatgtattaattattctcttaattgatcatttgatctttatctgctttttttcgagtttagggctgaaacggtgtggaaagagttgtagattacggtggactaactatttgaaaccagatatcaagagaggagagtttagctatgaggaagagcagattatcatcatgcttcatgcatctcgtggcaataagtacgtatggcatttctctaggcttgtttgtgctcatatcagtttagtgaagacatgatcatcaatgttttgatatatatgtaccctgtgtttttattttattttactaggtggtctgtcatagctagacatttgccaaaaagaacggataacgaggtcaaaaactattggaacacacatctcaagaaacgtttaatcgatgatggcattgatcccgtgacacacaagccactagcttcttctaaccctaatccagttgagcccatgaagttcgatttccaaaagaaatccaatcaggatgagcactcttcacagtctagttctacaactccagcatctcttcccctttcctcgaatttgaacagtgttaaatccaaaattagcagtggtgagacgcagatagaaagtggtcacgtgagctgcaagaaacgttttggacgatcgagctctacatcaaggttgttaaacaaagttgcagctagagcttcttccatcggcaacatcttatcaacatccatagaaggaaccttgagatctcctgcatcatcttcaggactcccagactcgttctctcaatcatatgagtacatgatcgataacaaagaagatctcggtacgagcattgatctcaacatccccgagtatgatttcccacagtttcttgagcaactcattaacgatgacgacgaaaatgagaacattgttgggcccgaacaagatctccttatgtccgatttcccatcaacattcgttgatgaagacgatatacttggagacataaccagttggtcaacttatcttcttgaccatcccaattttatgtatgaatcggatcaagattccgacgagaagaacttcttatgatctgtctatagatggcttgtcaatttcccaatgttgacatgcccaagattatgattaggcttttctcttagataaatttcaagttgtttgaaacaaataatcccgtggatcgattagtttttgatttgccggagtttttatatttttgtaactcttttgtaatataattttaaatagctttacatatatacattatatatgacaaataagaatctaagcgaaaacgtttacaaaaatatatacattataggtccacaaaaacactataacacaaaaggtaaatagcaatgagtgggcaacaatattggatctgtgacccggcaaaatttatccgctaacaaaaacgaatctgaataaatgtccactgatatatgtgtatgtgtgtgtgagagagatatgacttatgcgagcttttgtttctatgtgtgtggctgcacatgaatgatttagtttttgttgtgtgtgtgaaaatgaaagttgtattttttctgtcggccgattaaaaactccaaattcgaaacagaatttgaaccaaaaatagacacacaataatcctcacgatcaaataaacccaaaagaaacgtagctattacaagtacgatctctcaggaacaaataatccgcatagccaaaataggctacatttcaggtagtcacatatatgactgcaatcacgaaatcacacgttgagctatcccaaaaagctctcttcttcgaattcgatgaattggtcgtaactgagagttttatgaatggattaaatgaaatagacgtatataaaaagtggaataaataatgcctttatgtttgcataaaactagtccttaattgtatttatgtatttcgtttccttttaatggaattttctatgtgcactcaataaaaattgacctaagattcttttcatatttgaatataagtttcattcaagaacaaatccattgatcaaaccaaattacatactgccaaaaactttaaacgtggaaatcttttatatgctccagcaaagtggagattttataaattggaaaatagaagaaaaccttactttatgataaatttaaataaaattgaaaaatttcctcatgtaatttaacaaaactaaattattgcagcattttcgttactcattattaagtgaaaactgtataatggtcaaaagtgcatctaattaactcctattaatagttcaaactaacacacgaatctttttcagattcatatgaagagttgaatctttttttattttccagctgaatcttctgatccaaaaccagaaggtccaaaacacatttctgtttttttcaccaaaaaacaaacaaacacaattctgtttaaagtaacctaattaggccgttaagaatataaaccttatttgggtcgtcaagaacataaaagcctgtataatagttttcttcttttttgggctaaagttttagttttaataatcaaaattaaacaactaatctatttgttaaatcatcatcttaacaaacctcggaacaaggacaagatcaccaggtttacaaacgaagcaacgaatcaacaattggaatcaaaaccttacctagaaagataaaccctaaagtaaattcagtttttcactttacctgcagaattggacaaagtaacttgatcttcatataatccctcgatgatccctcaaatgttcttaagaaatttcgaaacttttcacattcaccactcgattgaaccggacccgtttattcaatggatccagaggataggtccgagattgccttcttcgacgttgagacgactgtaccaaaacgaggtcaacgtttcgcgattctagaattcgggtcaatcctcgtttgcccgaagaagctaacggagctccgaagctacacgactctcgtccaacctgcagatttgagtctcatatcttccttgtccgtgaggtgcaatggtatcaaacgtgacgacgtcgttttggcacctctgtttgccgacatcgctgatactgtctacgacattctccatggttagaaccctttctacttttggcctcttttgtaactctgttgcgtttctgtattgaattggaaagaaaagttttgtactttcctgaactttgagctcttggttgaattgtctcttgaccaaagatagtagtatgagtgtatgaccaagattcaagctttatgtgaagttgtgttttgatgttgggggatgttgttattgcagggaggatttgggcaggtcataacatattgaggtttgattgtgcaaggatcagagaagcatttgcagagattggtcgtcaaccacccgagccaaaaggcgccattgattcattgggtttgctaactcagaagtttggtagaagagctggtgatatgaaggtacaacgaaacattcgaaaaatgttaatattttcacgagattagaatgttacatgctggaaatttatctctttgattgaggtttaaggtgatttaaagtgtcttttaagtcctgtgtgctttgtttctgcagatggcaactttggctagatatttcggactcgggaatcagacgcataggtatataaaaagcataagacttaagaatctaattatttacaccaaaactatcaaaatctggtgtgctttaattctttgtttctcttcaggagcctggatgatgttcgaatgaatcttgaggttctcaaatattgtgctactgtcttgttcttggtatgttctcttaagtcactttataaatggagaatctttgtctcctattagctatgttttaaaaactggactaatcagcggcactgcattttatttggcaggagtcgagtctcccatatgcacatgtagataattcggtatctcctgaaactattagttcaaggagacgtattgatgcatctcgcgagggtaatactgtaacgacctctgttaggctaccatccattagcgagaacagtgcagctcagccagatccgttcaacatgagcgtcttgaggaatgaaatggcttctgacaaccatattcaatcagacattctcatggaagaagaacaaattgaaccctctgatgttgtcgcctctgagaataccagtgaccatgagggtttcttgacgcctgacgcgatgtctctttcaaacatcaaagcgatgctcttcccgttttatcctggaagccaaatgatgaaactaaagctactccacggcgattcccctctgcagctctactgttcttatctgaaaatacggtttggagtcaatgggaagtttctggataacaccgggagacggaggttaaactttgttgttgatctgaatccaagcctttacagtatactcgaagcatgtgacagtaatgcgcagaaactatctgttgattcaggttccacttctgagtggaacccggtcgtgaatccaatgaagggatttgttaactaccctaacgcaaggatacagtgagttagctaactatactctctctatttctagttccatgttcttcaaacaaaatcatagtttctttcttgcttgctttagtttctcctgattagtttcgtgggttttctgcagtattgcgacagagataaatggagatgaagctcggtatgcaacagagatacaccaaagagagtcctctggagctactcagaaactaatcttcagcaacccgaacaatgaggagctcgaatcgttgctgaccacgggaagtgttgttgatgcattcttgtctcttgaaccgtatgattatcagcagaaagctggaatccgccttgttgccaaaaagctagtcattcagtcgtaaatcatacataattgttaataccaaattgtaaagaaaatggagcttagtagatgtacgcacatacactctctgttcatgtagttgagaaatgctttatgattttgaacataaatagaaacctctttatcttaagacacaagattgcataaatatttattttataaaagaagatgatatttaaagacattattaatggtttcactatagtatttatggtgcaatcaatcgaatcgaacccaaatcaattaatgtcggaaacttgatctctgtaaagttgttcattgtccgcttcctctctcttttatctcacagacaaaacaagtaaacaacaacaacaacaacattacaacaacaacaatggctctttgatcaaactgttttatccaagttacaacaaaaatgggaaaggaggacggtttcaggactcagaagcgcgtatcaacagcttcctccgccgccgccggcgttcttccgacgacgatggcgagtggtggagtaaggagaccaccaccacgtggtagacagatccaaaagacgttcaacaacgtgaaaatgacaatcctttgtggcttcgtcaccatcctcgtcctacgtggcactatcggcattaacttcggaacttccgacgccgacgtcgtaaaccagaacattatcgaagagactaaccgacttctagctgagatccgatccgattcggatcctaccgactcaaacgagccacctgattcggatcttgacctcaacatgacgtacactctcggacccaagatcactaactgggatcaaaaacggaaactttggttaacgcaaaacccagatttccccagtttcatcaatggtaaagctaaggttttgcttttaacaggttcgcctccaaaaccttgtgacaaccctattggtgatcattacctgctgaaatcggtgaagaacaagattgattattgtaggattcatgggattgagattgtgtataacatggctcatttagacaaggagcttgctgggtattgggcaaagcttccaatgatcaggagattgatgttgtctcatcctgaaattgaatggatttggtggatggacagtgatgctttgttcactgacatggtgtttgagattcctttgtctagatatgagaaccataacttggttattcatggatatcctgatttgttgtttgatcagaagtcttggattgctttgaatactggtagcttcttgtttaggaactgtcaatggtctttggatttgttggatgcttgggctccaatgggacctaaaggacctattcgggaagaagctgggaagattctcaccgcgaatcttaaaggaagaccggctttcgaagcggatgatcagtctgcattgatctatctgctgctttcgcagaaggagacgtggatggagaaagtgtttgtggagaatcagtactatcttcatgggttttgggaaggtttagtggataagtatgaggagatgatggagaagtaccatcccggtttgggagatgaaagatggccttttattactcactttgttggatgcaaaccgtgtgggagttatgctgattacgcggttgaacgttgcttgaagagtatggagcgagcattcaactttgcggataatcaagtgctcaaactgtatgggtttggtcacaggggattgttaagtcctaagatcaagaggatcagaaacgagacaacatttccattgaaattcgtagacaggtttgatattcggagaacaacaccgctcaagattgaagcacgaagctagcagctgatgaaccagtttcagtttggtaaagcacaatcagttcctacttaactgaacaaaatgctacattgtttcaaagctcacttctctttcttatatttttacccaatatataaagtcaatatattcttttgttaaacttgaacagaagatgaattatcaatttgttcaagtacctttcaatgcaaagatctagttttgcagaatcctaagtatgaagtgaagtaactctgactcgtaacaatgggaaaatttacatctttatctcaattgagagattaaaatggaagaattttacagaaagagagtggcttgcgaaataatataaacaagaaacaaaagaatcaataagctaaaatggtttgaatttgtgatggatcatcttcttcttgatacaatgtccttgtggtgctttaacagtaactcattcatttgagcaagttgatgcaaaagctgaactatcctctgtttcaaaatcagaaaacaatagtaatgtcacgtctcttaggcatttcatcaaacactttgtatgcacaaaaacatacctcgtctctctctttgatcacatctcgaagatgatccatgttttctcctttaacgcgtttccgaggagctcgtacacgcatccaccaccaaatcgcaatggcaagaactggataaaatgatcggatagtctttgagaaccaggtcaacaaattcttcaacttggagtataaacgtacaagaagaggctcccaccaatcgtggaggacatcaacttcacgattcaatggtttccccagtaatttcccatctgaatcgcatggtggagacttgccgccttgttcagaaggtaatcgcggagatatctgttcaaatggcgactgttcccccgaatcggacggtggagattcaccgcttaacaacaacggcagagatttttcttcagtttccgacggagccttccggtcaaattcaaacgcagtcagtgacgtttgtccatctgaatcagaaggaaacaacgaaaaagaagaagatgaaccagagcgtctcgacgaagatgacggagacgaggattccgacggagattcgaggtatctatcgactccatagacggaagaagcgacatggagattctcatggtagatcggcgggaacacaacgccatcgtccttggcgaaaattggcgattctctgatgacaaccattgacgaactgtgatccaatggaccaatcaggtgttgttcacaataatgatcttcatcttcagccatcttcagttggatttgctggaggaattatctcgctagggtttgcttgtgagaaagaaacagttggaggaagaagaagaaggacaaatccatgaaagtttcaaacttttgggatccaagaagaacacgtgattgttgcttttcgctgattcgtttaagaaaatctggtcatacacacgtgccatctcattttctcgcgcaattttcttttgtattaattagtttatcacacgtgccgtctcattgtctgaactgaatcctaaaaagaacattgatgttaaggtatacaaagttacacactaaatagacaaaatgctctacatctctcactctctctacctgaaacctatacaacattccaatctatcaaaaattcctctaatcaggaaataaaaaacaggaaagaattctaatttacaagttagaattaaatcaatgtggagtcaatcatgttaaacgtgagtggcgaaaagacctgtctcttaatctttcgatggttcctcgatagcccccgccaggcgaaaccgctccccataggacccgagcctgtttttttaaccgcactaagcatccaatgccgctttgcggaaaggtttacttgaacagcaccaccgcctctttgctggcttacaagactagctcagttctcttgagaggttgaggcggaatttgcaaattgatacttaagtttttcgtcagctatcatcaactggtttctttgtgaggttgactccttttgccttctccatttccgcttccttaagagctttcttcttctctagctccgcttgcttgacattctcttcgtgtgctttcttaaacaaccttataaaattcaagagggttgcagtaactgcagcagtccattacccggtattattattagctacataacacttccaactaaataacgattagggactttttctttttctatgtattgcccaagaggatttaagtttatagattcctcgtcataccttgttcaaatggacaacggttaggatcctcgccaaaatagtgagcaagagcatcagcatttcttccctgccgtccaacataagaaacaacacaaaaatcattttcaggatcaaccacattgtcaaggtaaaggcgcttggaatctagtagaggttgacaaattaccacgaccgagtaaagactcgatacagttgccacttcagtctcagcaacggatatgaagtcccccaatgtctgttatcaaagcataaaagtaggttttaggatcaggaagaaattaactctataaacaaaacccaactgaagaattattttccagcgggttattgatgattttaaaagtgatacagatttagtaatgtggcacaatcatggaactaatctcaatttcatgatagataagatgtgcaaaaggaaaattaaaaaacccaacatactttacggaaaacatcagaaacaggaccatcactttcggatgcagtgagctcctggttcagtttttccaatcctttgattatagcttgcatttcctcagccagagacttcaattgtatctgcaatagacaggacgatcaaatgatgagccaatagaaactaaggagtagaggacgagaaatgaacaactgcaaaccttcgaggctgattcaagactttcaagatccttggggaagtccagtagaactgatgcctttgaagcaaggacctggaaaaagaaagatgagagtttcagaattatgtatctctcctgatccagaccactttttataataaccttcatcagaaactagatcctgctctttttgattgtcatttaccttgcaaagataatgcatgagagtcatcttgctgttagcagcacgtgtatcacttaatttcgataaactgtccaacttgaatccaacagcagcgcctgcagaaagcaaagcaaggatcatatcaaccacaaaggttatccgtacagacaaaacaactagcaatgtcttgtgcaaaaagatgtagaacaagaataacataaataatacttaccccttgcagttccttggttcaatgtgttccccaggtaaagaatctttttcataatttcttttagcttttgtgaagagcggacctgatgaataagcaataagtagaaaattctaacaaagagaaatgcatatggactgcccaaaaactagagttaactattgcaagcatcttacctcctcgcacgcagaatttacagcatttaaactttttttgaattctgttatctgcacaaaaaacatcattatcaatagtctaataaaattatattttgtcctccaaagaatcaaatagacagaaaataacggtattaagtaattccaccagacctgagtgccgaattgaaatttaaaagaaaagactctaagctttgcctcaactcgtggcaccttcattagctctaggaagtactgcaatagcaaaatggatgacaaaaaatgtattaactcagtaagctaattgctaaccattttatagtagaagccaaaaacagtgcgagattggttggtaatctgaagacttaaacagacctgctcacactttcccaaggtcgtcttgtcaccagtgtagttctagaacaaaccagacaattacgaccaagaacaaggactcatgtcaataacaagtgaataatgataaccaataattgacatatttcacaaatgatctccaaagtaaagacagaaatagataatgctactcaaaagtcaagacgtaaccttaagtagctccatctcctccttggttgggcaaaactttataagattctctatttgatcaacatctagtacagactcatccattgccagaactgcagcctggacgatgcaaagaaaaatttgaataattatcatcaaactatgaaagggtaaccagtcatgactttcactcaggtaaagtaggtactggaacttaccatcatatcaggtagcggcatctttactttagtaagcataatttccgtgttattggctctcctaaggtcaatctgaaaaaccataagaaaacaatatttcaaaaagactagaatactgaatcacaaaagtatacagacatgccataggctgcagagtagaagaaattccagggaaaagagatgcggcagagtagcttagagagacattcttagtacaacttttaatatatttatatacatattcgggtagtactcagattcctggcaaatcataacatgctatcagtcacttctttatacatttccaaagtctctaccagaaaggagcaagttaaaacatctgacaatactaagggttaagaatatctaacataatcataacatgctttcagtcacttctttatacatttccaaagtctctaccagaaaggagcaagttaaaacatctgacaatactaagggttaagaatatttaacattaccagttgaactttttcaggttttgccccaacagattttcgtcgactcccagatttatcagctggcttttgcactgtagcagagaagagggtctctatttctgatacatcaaattctgatggactagcagaaaagaaagaaaaatatgattaattgaaaaacaatagtcaataaaaccccaacagcacataattagttccttgataaacaaaggtgcaagagaaggaacttagaagaaagaggaaagcaaagataaagttagtccaatacgtttgtgattctccatgtctctgtaactcatcccataagctcccttgcaaggcccttgttactttaacccagtgtaatggcttcagggaagactttttttgagctgcagacccaaaacctggacgaggaagaccacgccctcttcctgcacctctaggatcaactgcagctcctctggcaccaagcattggaggtggaggaggtccaccacccggaggtcttggtccaggaggtgggggtggaccaggagcacggccaccaggaggtggtggaggcggcggtgcaccaggccctctaccgccaggaggcggaggtggtggcggggctcctccacgcatcgggggaggcggcggcggtggagctcctccatgcatcgggggaggcggcggtggtggggctcctccacgcatagggggaggtggcggcggtggggctcctccacgcatcgggggaggcggcggcggtggagctcctccacgcatagggggaggcggcggcggttgggctcctccaaacatagggggcggcggtggcggtggagctcctccatgcatagggggaggcggcggcggcggtggagctcctccatgcatagggggaggcggcggcggtggtggagctcctccatgcatagggggaggcggtggcggcggtggagctcctccatgcatagggggaggcggtggcggcggtggaattgagcttacatgactgaaaggaggaggtgggggtgggggtggagatccataacttggtggaggaggtgggggtgggggtggagatccatagcccggtggaggaggaggtggtgggggtggagatccatagctcggtggaggaggaggtggtgggggtggagatccatagctcggtggaggaggcggtggtgggggtggagatccatagctcggtggaggaggggaaagtactgaatgtgcattactaaaaggaggaggtggaggtggtggaggagctgttttaacaggtggagatggagcactggaaataccatgtaaaggaaggatcttgactgatggtgaaggtgcaatactagtgtaaggtagagggggaggagggaggatgtaatcatttgcttttgttgtatttaatgggctaaaaggaggaggtggtggtggtggtggtggggaagaagatgtagagcacgcctcatgagtttcaaaagtcgaagcatacagagacttccaaggtggtggaggtggaggtggaggcaacaaagtttcactgtttcgcctcacagatgcaaacggaggtggtggaggaggtggaggtggaggcaacaaagtttcactgtttcgcctcacagatgcaaacggaggtggtggaggaggaggcggcggcgatggtagctgagatgtttgcaagtcactgctcttttgacctactgaatagtatgcaggcggaggtggtggtggagttggtgaagacgtaggggcttgagatgtagaacatattgcaggaatcgccaaagctgaagcatagacagacttccaaggtggagatggtgggggaggcaatacagttccactgtttggtctctcagatgaaaaaggaagaggtggtggtggtggtggaggcaacacagttccactgtttggtctctcagatgaaaaaggaggaggaggcggtggtggtggaggcaacacagttccactgtttggtctctcagatgaaaaaggaggaggaggcggaggtggtggtgggagctgagatgtttgatagtggctgtaagttggcaatggtggtgggggcggaggaggaggaggtgatgcaactgcttgtgaagagtgtaaaactgttttggcctcactggttaaagaaggcaggggtggaggagcctgatgtggagaggcaggaggtagagaagaaggcgtttccttcgggctagaatctggtgatgaacaaattggagctcgactcctcatatccggtgaagaaacagatgctctcaaatatttagtcttagcatcctttggaatcacgccatcaggtgatgtagctcttttaccatccttgagagaagtggtaattgaggcaggagcactgttaattcttgtcgggggataagccacatgcatagaatctttatatgagcccttatttgaaggaatccatcgagagactgcgttaggcttagccattcttacattaggaccctgagtttcttgctgcttagacttcggtttaagggaatctccagcagcagccggttttgcatttgctccgacctgtttccttagtgtagcttgtggtttttcagatatgggtttgttgagactagtatttgttttctgactcatagattccaaatcgttactttcttcatcacctttgctttgagtctgtactgtgctagaatcattttcctttgcttccactgttcttctctttcgctgctcatcaccatcatctattcctatatccttcactgagtcgatattagaatctgccttcccatccgatctatactgtacatcatccacagtgatatctttgactggatccgtgctagtctctgcatgcatatcatgtttatggtttgaatcatctgatgcacaatctagaaacgcattgggttccacatcccccttccacacctctttaccctcagaatcatctgaagcagtatcaacaaccacaaaactatccgagtctctcttatggtcaggtccatcaatcacatcgctaaagatctcctccacctcaaaaaattcttcaggtgaagtcatatcaaaatcgttctcatcatctgataatgtagacgttgtaataggaggcaccacggcatcagcgccagagaaaagtacctgatacatatatgagtatgcattcaaacttaaaagccttattcagcatatgatcagagaaaatttcacaacggcctacctctgctttaaattcctttgggaactggtccttgacatcccagagtatatccatctcatcgcgttggagcattaaaatattagcacgcacaaacgctgtgtggaacatgatcctaaaaaccatctcctcactcaccaaatcatcatgcaaatgtatacattccagcacaacatccccttgaacgcggcactgtatatctaatttcactaggatacactcttcctgcagatgagatcacaaatttgcgcatatttcttcaatagagaagcatttaactaatgtataataaattaccaaaagaactcataaaattttaatctatcccttactaatgtttttaattcgcacaaaacagtgtgatgattacaatggtctgaaaagtacctgttggtagagacgagtgtgtttctttgtctttagtgtggagaagagaagtatggaactcctgttggttcgggctttagggtcctgaccataaacacgtaaaatgggtctgcaaccttttttcccttcaaaatgtgggagatctctgagaatcaagcaatccaaaagaagaggagtgtcggaaggaggccaatcagagcctaaatttcttctagaaatgtactgaagatatctaagttgagatggctgtgggtttagaggagacaatagatgaagaagctccttaggagcctgtttgtgtaccatctcaagcgtcttctgctcgccgtgatactgctttctgtacaataaaaggcccgataacataaaagcaagaacaggccaaccacctctttcacaatgcattaacaatacattttgttgaccttccaacgataaccagctttcactcgatctcagaaagtgatggatcatttcaagaggtaaaagcgggcaactctcatactgccgtggataatccataaccgtcatatcgtattgggacaacacgtctgatatttgactccgctgttccccctctctaaagttaaacaccatgaaagacgcctctgggaaatgatcctgtagctgcgccacgatgccacccaagtatactttgtactcatcctcccccataacatcgctagagaaacagcagtcaaaaactgcaaagaagaagaaaaaacaagagaagttggatcagctctgaaaccttgaactactccagcaaaatataggttgctagaaaatggaaacacaaatctgcaagctctgaaattttaatcactatccccaagtgcaatccagaagctcaaataaaccccttttccaaagaactatcattgtccaacattaaaggaaacaaaagaatatcccacaaagctataaattgtcttcaaagagattctgattcctaaaacctctttaattcaaagttgagctcaaatgagcatccactaattctcatcccaatcaaactgccaaaaaccctataccatccagaagctcgtcgtagcagttttgatcccaatgcgcatatatcaccgattgtaagaataaatccggcaacaatttcatctttttatagatactttgatcatgaaaagagagaaaaaggaaggagtgattaccataaacacgctcagagatctcgagaagccgatccggaggctttttgtagaagaagcgacggaacagcgccatgggatggcgctgtctctcctccgatcagatccaaaccgtcgatttagtaaaccaacaagcagatcattctcgattgctccaattccgttgacctaaaccccagatccccttcttcccccaaaaattcaggtcacaaaccctaatttctcacccctagctaaaaagttgacaaatttcgcttaattacaagagcgtgataaagacccaattcccagaattccttcttcacctctctgcctccaccaataatccaattttggaaacaaaaacgcaagtcgtaatcacaaagccaaaccccaaagttgagaatttttcaaactagtttcgttccaaatgaatcgatctctatgtacaatgccgaatcttctctcaatcgtgggaacaaagaatcttcgaagctaatcaaaaagttgttaaaaataaaataaaagagggagatagagagagaaggaagtgacagtgagatgaagaatttcaggtgaaaaaaggagaagaaggagcagaaatgaaaaaaacgaaggaagaaaccagatttcgacaaatcttccagcagtttatttttttatttgtgtgtcaataaagttattaattattcacaaaagggtttaattcatatttttagaggtatttaataatagcaaacaaaaagcttttttgatttttccatggttgcgtaattgaaattgaactcttggaaacgaaagagcatagtagtggtggactttcgagaaaaaaagagcgagacttggttcggacacacgaccagacccttctcttctctctatctttaagcctctaggtgttttgtctaatcctacgtggaaacgtaaaaaaaaaaactatatttataattacaaccacgttttcatttacgatcaacttgtgattttcccttctgtcgaaacacgttattattgatttaaaataagtcactacataccaatttttagtaattgaatcggtattagtaacccgtcatattcatgtctggttgctatattttcatcatgtaaaactttaataaaggggggtggggaatgtctttacgagacccatatattaatttttttactagttattctcatttatattttcttaatcagcggaggagacccatatattaaaggctgggcttaatttacttaaaagcccattgataacttacggagtcacgtgacttctccttatgggttctaaaacaatgctaacaatgtttcagtactatgttgcattagctcaaagtttcattttttttacttccttcgagggttttaatgcaaattttattgttttgtaatggaaaggatggtctaaccgagacatcataaataagagtggggcttggtttcggcccattggtctttctgacttcgtcgtttttttttttttcgtcaacctgacttcgtcgttttgggtagatgaattcgtcaattaatatgccagtagtaattattattcaaaaaaatggacatcaaatactctgtctcgtccgtcgactgttcaaatttttctcaaagtcaattgtgctgccattgatcattctgttaatattttctgagtatttttgctatgaactagtgttatttgatctaggtcggtgaagaaatatgtttgttattaaatctctctactaaatcatccgtttggttcctgatccaatgtcccctgtcgagatctctggcgctgatgccgtggtgtcgcctcctatgcgtggaagagttccacttccaccaccgcctcctcctcctcctcctcctatgcgaagaagagcaccactgccgccacctcctcctcctcctatgcgtagaagagcaccactgccgccacctcctcctcctgctatgcgtagaagagtactaccacgtccacctccacctccacctccacttccgatgtttgatgcagaagttctgtgttgttgttatccacctactcgtgtgcgtagagaagcgccactgccaccacctcctctgatatttgtaggagccccacctccaacttgtgcacttaagggtatagtgtgttgttttccatgtccatctaaaaagaagtcctccctgaagcgatttaactgggttaaaataacaagggctttgccggggagcttatgggatgagttacagatacaacaagtatgccacggcgatatcgaggatgaacagattctctggtaatcccttcaagaaaccgaattccaacggattgaagaaggaagaattaaagttcctatatcattgacctttgctttgcaattactctatcatttttttctctcctttttttttttggctagtgcaatagaacttgatgtatcagaaatagagacctttttctctcttggggcagcaaaacctgaaaaagatccactggtaatgttaaatattcctaacacagatattttaacttgctcttttctggtggagacttttatcacgtagctataaacaattaagtgactgttgtgattcaatattccactctttttgaagagttttttttttgtcttattggctttcaagattgaccttaggagagccactgacacggaacttacgctaatgttattaaatattcggctgcctgcagatatgatggtaagctccaaaaacctacattacccgagtaaatgtggattattaattatcattaagctatgaaagattaaccagattgcatcgtccaggctgcaatcatggcaatggatgagtctgtgctagatgatgatgaaataaggggtcttataaaccttttcccaaccaaggagaatatggagcttcttatggttaacctcttgacttttgagtagcattatctacttgtgatctttattttgtgatatatatcatttaattgactgatttgttgtagagctacactggtggcaagtggaccttggaaaagtgggagcaggtctgttgaagtcttgatattatcaatcaaatcttgcacggttttttggttcctactatataatatggttacttcgtttaagtcattttcttctgtcatcaattttactatcacagtacttccaagagctaaggaaggtgctacgagtagaatcaaagctgagagtattttacttcaagattcaatttagcactaaggtccggctgtataacttattctatctgattctttgcaggaaaacgagattatgtttcacagcagcgtctacgtaactgtatattcttggttctgttgttaataatgattgctgtgcagataacacaattcaaaaaaaggttaaatgtggtcaattctgcgtgtgaggaggtaagatgttacatcaatcacctcaagttttttgtgcagtccatatctgtttcttagaatatttctcctcatttctaaatcatcatcaggtctgttcttcacaaaagctaaaagaaattatgaaaaagattacttgcctggggaacacatcgaaccaaggaactggcaggggttagtattatattttttctttttttgcacaagacctcaatgaaacatgtacaataagattcctttgattcaagaacggcgcctttttgtttctgctgcatcatatacattgtttctttctccaggcgttacagtgggattcaacttggacagtttatgtgttaaaagcatgcataatttttgcaaggtaaactacaattataaaaaaaaacagcctctagattccgttgagggttgttttagagaatggtcctgaaactctcctctttctttttcccaggtccttgcttcggaggcatcagatcttctggacgtccataaggatcttcaaagtcttgaatcagcttcaaaggtttgtatttgtgctcttttcgtcctctacttcttagtttctattggctcatcatttgattgtcctgtgtctatttcagaaacaattgaagtctctggctgaggaaatgcaagatataatcagagatttggaaaaactgaaccaggagcttactgcagccgaaactgatggtcctgattctcaagtatttcgtaatgtatgttggttttgttcttatggatattttgatcaaccatggatttgagattagttccggatcttaaaacctagttttatgtatttgataacagacattgaaggacttcatttccattgctgagactgaagtgaaaaccgtattgagtctttactctgtcgtggtaatttctcaacctcttacctttgacaatgtatttgatcctgaaatgattttttgcttttctttctcttatgattgtcaacagggaaaaaatgctgttgcacttgtcaactattttggcgaggatcctaaatggtgtccatttgaacaaggtatggcagaggaatataaatttcatcgttcctcttgtgcaattacatagaaaatggaactgttatgtagttaataacaatacctggtgacggattgctgcagttactgcgaccctccttcactttataaggttgtttgagaaagcacacgaagagaatgtcaagaaagctgacttggagaagaagaaagccgctaacgaaacggaaatgaagcatgtggttcataatagctggctcaacaacttaaatattagagcatccacattggttagtacttcttatggtatcttaacaagatacctccattggagatactcttatgtagttacaaacaagtgattgacgtaataataataatatatatatcactctgtttgatggacggtttttctactggtttgtagatcgaccagaggagagcctttaacactatgattatgcttcagaaagtagagatgccgctgcctgatatgatggtaagctccaaaacctactttactagcgaacaagtcattactggttaatgttttatagtacaatgataatttattcacattattctgtgcatcatttaggctgcagttctaggaatggatgagtctgtactagatgttgatcaaatagagaatcttataaggttttgcccaacaaaggaggagatgaagcttcttaaggttacctcttgacttttgagtagcactatctacttctgtctttacttttgtcaattcttggttatcattattcacttgttagttgacacgagtcattattcttggtcgtaattgattggtttgttgtagaactatactggtgacaaggcaaccttgggaaagtgtgagcaggtctgtctttaagtctttagattaccaatctcacactgtttttattttccactataatatagttcttaacaatttgcttagtttagctaaagctaaagttccattaaaagagtatttacgtgtgattaatgcgttttcttctctcatccattttgcttccgcagtacttcctagagctaatgaaggttccaggagtagaatcgaagctgagagtgttttccttcaagattcatttcggtactcaggtctggtggtatttacctataacgttttggtttttgtcagtgtctaagtaactgtagattcttgatctccttttttatgatgattactttgcagataaaagaacttaataaaggtttaaataccgtaaattctgcatgtgaggaggtaagatatttgcaatacttaaaactcaataatttacgcagcccatttgcgtttatctttcttagacattttctccttattgcttgtttatcagatacgtacttcacaaaagctaaaagagattatgaaaattattctctgcctggggaacatattgaaccaaggaactgccaggggtgagtattataattattttcttacccaaatattttttttctgtagcttaagacataacacaataaaatttctctgttcaatgtgggctaagttcaagaatggcgcctttgtttcattacatcataaatacttgttttgtatgaacgcaaatcctttgtggttgataaagaccctttgctctgctttctgcaggcagtgcagtgggattcaagttggacagtttattgaatttaagcgaaaaatgttctgctaacaccaacatgactctcatgcattatctttgcaaggtaaatttcaatcaaaagaagtagaatctatttatactgaaacccctaatctttctttttctcaggtccttgcttccaaggcatcagatctactggacttccataaggatcttgaaaatctcgaatcagcttcaaaggtttgcatttgtacgtactttttatccgttcttagctgtaattggctcatcatttgattgtcctgttgattcagatacatttgaagtcgttggctgaggaaatggtagctataaccaaaggactccaaaaactgaaccaggagcttaccgcatccgaaagtgacggtcctatttctgaagttttccgtaaagtatgttgttgtttttcaatcttatccatcttttatcaatcatgaatttgagattaggtctatcactttgccacattactaaatctgcttccatcattttgtaaaatcaataacagctagaaataattcttcagctaagtttgttttttcctacataacttcttccggacgctaaaatctagttttatgttttcgacagttattgaaggacttcatatccgttgctgaaactcaagtagcaactgtatcgagtctttactcctcagtggtaatttttgtcaacctctactagattccaagtaccttacatttaaaaatgtgtttgatcctgaaattaattacttttgtttttgaatcttatgatggtggaccacagggaggaaacactgatgcacttgtacactattttggcgaggatccgaacgattatccatttgaacaaggtatacgatgaacttcatcatcctcatttgtgctaatatacataaaaagtggctggctcattgtttttacgtagctaataacaatacatgattatcgatattgcctgcagttaccgcgaccctcttgagttttgtaaggttgtttacgacagcagcacaccaagagaatgtcaaacaagcggagttggagaagaagaaagctgcaaaggaagcagaaatggagaagacgaagaaacgagtcagtctcactaataaaaaagcaagcggagttggagaagaagaaagttgccttatataactgaccatagtgtggtaactcagatattttgtgttgatttaaacaagcgatggaaatattttcactgtttggtgttgttaatatgtgtgtggttacaaccacgttttttttttacgatcaacttgtgctttttcccatctgtcgaaacacgttattattgatttttagtaatccccaattgcaattattgtatcacattcatatttacagtagtttataattgaatcggtattagtgaaccatatattaaaattttaatcagcgaagacccatatattaaaggttgggcttaatttacttaaaggccggcccattgatgacttacggagtcacgtgagacgtgacattctccttatgggttctttgacttttgttcatttcaatccttggccagtttggtctttctcttcgtcgactcttttgctgaatgtgatttcgaagttttgtgtgaatgaatcaaaatcttcagataagtcggaatcaaacttttaatttaatttcagacagtatgacacatgtgacatgtcatgtctctcccctcaactcttgccatgtcttcgtctgtaagtttcctgagaatattctccattttcctgcaatccaatcttctctcttctccaatgataatggcccagcagatctcggatacgctcttcttgcttaatcgaaattgaaattaaaataaaatattttagtgctaacaaatgtttcattacactatgttcttctaggaatctagttcaaaacttcatttttttctcttaaacttgcttctaggtctgtaatgctaattttattgttttgtaatggaaaggatggtctaaccgacacatatataaaggagtggggcttggtttagttagcggcccattgggcttcctgactttgttgttttgggtagataataaattcgatgccgttattgattaactattcaaaaaatggatcagacaatactctctgtcttgtcttatcttgtcgtccctccaattttggacaagtcttttccacaaagtcaactgtgctgccattgatcattctctttatattttttctgggaatttttgctctgaactagtgttatttgctctaaatcggtgaagaaagcagtttgctattaaatctctctactaaatcatctgtttggttcctgatccaatgtcccctgtcgagatcactggcgctgatgccgtggtgacgcctcctatgcgtggaagagtaccacttccaccaccgcctcctcctcctatgcgtagaagtgcaccatcacctcctcctatgagtggaagagtaccaccaccaccacctccacctccgatgtttgatcccaagggtgcaggaagagttatttgttgtctacgtccaggtcaaaacaagtcttctctgaagcgatttcaatgtggtaaactaacaaatgcctgggaagagttacagagacatggagaagcacaaacgtatttagactaactttttatgtttgcgttcctttttttcttctgcaccaggcagatataattgccgagttattagacaattatatcctcatattattcctttttctttccatgatagtgccccagaatttgatctatcagagatagaggcccttttctctgctgcagtacaaaaccaggctgataaatctggaagtcgacgagaagcttttgaggcaaaccccgataaacttcaactggtaatgtgaaatttatattcttcttttaacatttggttattactattgtcatatagctataaaaacaagcgactgaaaagcatgttatgaaatgccagaaatctgagtaattttaataagaatgtctctataagcatgttattaatttgaaattgccaacactctgtcttgtagtctgttcaaagtcttctgcaactgtgctttcacaagtctatgcgattgatcattctcctatattttctgggattgttttgctctgaactagtgttatttgatctaaatcggtgaagaaaactgtttgttgttaaatctctctattaaatcgtctgtttgcttcctgatccaatgtcgcttgtcgagatctctggcgctgatgccctggtaccactaccaccacctccacctcctatgcctagaagatcacctccaccaccacctccgaggtttgatgcctttgatcataagggtgcaagaatggtttgtggttttcgatgtccagttacaaaaaggtcttccctgaagcctttacattgggttaaaataacaagggctttgcaggggagcttatgggatgagttacagatacaatatggagaatcacaaacgtattgaacttaactttattgaccaatccatgtaattcaattctgtgatactgagttttcttttatcaaccattgcttttttttttgttgttgttgctagtgcaatagaacttgatgtaccagaaatagagacccttttctctgttggggcaaaaccaagaccaaaaccaaaacctgaaaaagttccactggtaggtaatgtgaaatattcccaacacagttggttattgtcagatattttaacttgctcttttctggtggagacttttgtcatgtagctataaacaagtagtattactttctggtggaaactgtaaaatattttgttttttaagttgtactaagctactctccagcatctctttcccttagactttcttctactccgaagcctattgcatgtctgtatacttttgtgaattcattttggagatttgtttgtcttatggtcttccagattgaccttaagagagccaataacacgatagttaacttaaagatattaaagatgccgctgcctgatatgatggtaagctccaaaaccttaattacctgagtaaaagtcaattactggttaatctttcatagcttaatgataattatccacatttttctttgcatcgtccaggctgcagtcatggcaatggatgagtctgtactagatgttgatcaaatagagaatcttatacaactttgcccaacaaaggaggagatggagcttcttaaggtgttacctcttgacttttgagtagcaatatctacttgtgtctttatttaagtgatcatttactgacacgagttcttgttcggaattgactgctttgttgtagaactatactggtgacaaggcaaccttgggaaagtctgagcaggtgtgtttaagtctttagagattatcaatctcgcattgttttggctcctactataaatatgggtagtaattagcttacttaagttaattcattttctcctgtcatcaattttgctatcgcagtgcttactagagctaatgaaggtgccacgatttgaggcaaagcttagagtactttccttcaagattccatttggcactaaggtgtggctgtataacttattatgttatcttctatctgattctttagaggaaaacgtaattcttggttctgttgttaatggtgattactgtgcagataacaaaattcagaaaaatgttaaatgtggtcaattctgcgtgtgaggaggtaagatggtacaataatcacttctagtttttgtgcagtccataagcttctccttcttatacttttttctcctcatttcttattcatcaggtacgttcttcacaaatgctaaaagagattatgaaaattattctcttcctagggaacacactgaaccaaggaactgcgaggggtgagtatttcctaacgcaacacaataaaatttatctgttcaatgtgagctaagttcaagaaaagaatggcgcctttgtttcattgcatcatatacttttgttttgtctgaacgcaaatcatttgtggttaataaagacccttgctctgctttctgcaggcagtgcagtgggattcaggttggatagtttattgatattaagcgagacacgtgctgataacaacaagatgactctcatgcattatctttgcaaggtaaaatacaatgcgaaagaaatagatgctgcatgttttagaaatgatttggcttaggaggaatacataatcctgaatcccct

SEQ ID NO: 703 - DNA, 83599 bp, Arabidopsis thaliana
gatctttctttttccgaggtccttgcttccaaggcagcagatctactggacttccataaggatcttcaaagtcttgaatcaactttagaggtttgcctttgtacttactttttccgtccttagcgcagtaagtggctcatcatttgattgtcctgtctattgcagataaatttgaagtctctggctgaggaaatacatgctataaccaaaggattggaaaaactgaagcaggagctcaccgcatccgaaactgatggtcctgtttctcaagttttccgtaaagtatgttgttgtttttctatctatctcgatcttttgcatatcttttatcaaccgtgaatttgagattaggtccatgactgtgccacataacgtaattttccatcacttttgtaaaatctagtttttatgtttttcaacagttattgaaggacttcatatccagtgctgagactcaagtagcaactgtatcgactctttactcctcggcggtaatttttgtcaacctctactagactccaagcgcctaacctttggcaatgtgtttgatcctgagattactttttttttttgaataaatcttatgatggacgacagagaataaatgctgatgcacttgcacactattttggcgaggatcctaaccattatccatttgaaaaaggtatacaatgaacatcatcctcatttgtgctaatacattagaagaaagtggctcattgttatgttgttgctaataagaatacatgtggtgatcgattgcctgcagttagcgcgacactcttgagttttataaggttgtttaagaaagcacaccaagagaatgtcaagcaagaggacttggagaagaagaaagctgcaacggaagatgtatttggtgggcctgaccacaacatagactcagatacttctttagatgattcggaggccaaatcgccttctagaataagacctccgccttctataccaagacccccttcacgtccaaggtatgcatgctgccgaatacctgcagttaatccgcctcctcgcttggtgtgtggcccatatccgctacctcgcttagtgcgtgtaggatccccatcaccaccacctccctcgatgagtggaggagctccaccgccaccacctccacctccaatgcttgttgccagtagaacagctccacctcctcacttgagtcatgtacgttcaatccctttccaaactcgcttggtgatgggcacatctccgctacctcttttagtgcgcgaaggagccccaccaccaacacttccctcgatgagtggaggagctccaccgccaccacctccacttccaatgttaaggtaccagtagaacagctcctcttcctcacttcagtcatgtacgttcaatccctcccattcctcctcccccaccaagtcgtagagctcctccaccccatccttttggtaaaacaattcacctcttccatcgagtcacaaagggaaaccaaaatagattgccaaagagacatataaaaacttgtgtggtcgtacacctgcatatatatattttcttgatcatcttcctccgcaaagagacatactccttcatctgattcttccattcattttcacaactttgtgatagctactggatttcataaaggccttcttccaagactgaaccggttcgaccggatggtttgtattataaaattgattcttatcttctaataaatgaggactagtttgctggaattacagcaaactatattttattcaaaaaaaaaaggacaatctccaatactccgtcgtgcttttaaaaaattgacaatgtcttgtcgtctgttcaagacacatggaatttgggacaaagtcctttgcccaaagtcaactaatctttaacaagtctatgcgatttgatcattctcttttattttctgggactttttgctctgaaaactagtgttatttgatctaaatcggtgaagaaagtgatctgaaacaatctgtttgttgttaaatctactaaatcccctgtttggttcctgatccaatgtcgcttgtcgatatctctggcgcttattccctggtacctcttccaccaccacctcctcctcttatgcgtagaagagcaccactgccaccacctccacctcctcctcttatgcgtagaagagcaccaccacctccacctcctcctcttatgcgtagaagagcaccacctccaccacctccacctccacttccacgtccatgttcacgtccacctaaaacaaagtgctccctgaagccattacactgggttaaaaaaacaagggctttgccggggagcttatgggatgagttacagagacgacaagaatgccgcgatatcgaggatgaacagattctctggtaataccctgaagaaactgaattccaatggactgaagaagggagaattaaagttcctatatcattgaccattgctttgcaattaatctatcattttgtttccttgtttgttttgctagtgcaatagaactatcagtatcagaaatagagaccattttctctcttggggccaaaccaaaaccaaaaccagaacctgaaaaagttccactggtaatgtgaaatattcccaacacaattggttattgtcagatattttaacttgctcctttctggtggagacttttgtcacgtagctataaacaagtgacttttgtgattcaatatacattccactctttttgaagagttgtttgtcttatgactttcaagattgacctaaggagagccactaacacggaaattaggctaatgttattaaatattcggctgcctgatatgattgtaagctccaaaacctacattaccctaagaaaaagtcatcactggttagtctttcatagcttaatgctaattatccacatttttctttgcatcgtccaggctgcagccatggcaatggatgagtctcgactagatgattttgatcaaatagagaatcttattaaccttttcccaaccaaggaggatatgaagtttcttctggttacctcttgacttttgagtagcattttctacttgttttgtgaaatatatatcaattattcactttttattgacacgagttcttgttcttggtcgtaattgactgatttgttgtagacctacactggtgacaagggaaattgtgagcaggtctgttgaagtcttgagattatcaatcttgcactgtttttggttcctactatatattatggttagtaactagcttacttagttaattcattttcttctgtcatcaattttgctatcgcagctattccagtacttacaagaggtagtgaaggtgccacgagtagaatcaaagctgagagtattttccttcaagattcaatttggcactcaggtctggtggtattattacctataatgttattttctgtctatctggttctttggagaaaatatttttggtttcatcagtaactgtagattcttgatcccttttttttttttttttttaaatgatgattactttgcagataacaaaactcactaaaggtttaaatgcggtaaattcagcatgtgaggaggtaagatttttgtgcagtccatttgcgtttctctttcttggaccattaatcgatctcctcatttcttgttcatcagatacgtacttcacaaaagctaaaagatattatggaaaatattctgtgcctggggaacatattgaaccaaggaactgggaggggtgagtgagtatttctattatttttacccaaatatcttttggctttaagatatttcctaacgcaacataataaaatctgtgtgttgttcaatgtgagctaagaaaagaatggcgcctttgtttcattgcatcatatatacttttgttttgtctgaacgtaaattctttgtggttgataaagacccttgttcttttttctgaaggcagggcagtgggattcaggttggatagtttattgatattaagcgagacacgtgctgataacagcaagatgactctcatgcattatctttgcaaggtaaaatacaatgcgaaagaaagaaacatgcagcgtctttgctttagaaatcatgaaaccctcctctttgcttttcccaggtccttgcttccaaggcatcagatctactggacttccataaagatcttgaaagtcttgaatcagcttcaaaggttttcctttctacttactttttccgtcctgctgtaattggctcatcatttgattgtcctgtctattgcagatacagttgaagtctttggctgaggaaatacaagctataaccaaaggattggaaaaactgaagcaggagcttaccgcatccgaaactgatggtcctgtttctcaagttttccgtaaagtatgttgctgtttttctatcttctccatcttttgcatatcttttatcaatcatgattcatgaatttgagattaggtcctgactgtgccacataactaaatcttccatcaataccagctgctaaaatctagttttaatgttttttcaacagttattgaaggagttcatatccaatgctgagactcaagtagcaactgtgatggctctttactaccccgcggtaatttttgtcaacctctactagattccaagcgccttacctttgacaatgtgtttggtcctgaatttgccattttttcttgaatcaatctaattatgatggacgacagagaggaaatgctgaggcacttgcacactattttggctaccattatccatttgaacaaggtatgcctcggaaacaataaacttcatcctcatttattctaataccatagaaagtggctcattgctaataacatacatggtgatcgattgctgcagttaccgcgacactcttgagttttataaggttgtttaagaaagcacatgaagagaatgtcaagcaagcggagttggagaagaagaaagctgcaaaggaggcggaaatggagaagacgaagtaacgagtcagtgtcactaagaaaaagagcaagcggagttggagaagaagaaagctgccttatataactgaccatagtgtggtaactcagatgttcttttgtgttgaaataaacaagtgatgtatatactttcactgcttggttttgttaaaatgtgtgtggttgagaaaaaaaaacagttgaaatttgcattcaattaaaatatttgatactaattcgaacttgggactctgaacagaagaagaagtcctcctcccaagtcaactgatattttatgtgtgggccgatctacaatttcttttattttcgtaaaatggcccatttaaaggccttcaagactgaaccggttcgaccggatggtttgtcttaaaaaattgattttaattctttccaataaatgaggatttggtttgctggatctgtaattctccagaaatagtttttttgttcactttttttctatgtaggaaatgataaaaagagaataattttctctgacttgggaaagtaaggatacattaaatgaataaatgtaataagaaaaagacaagaggaggaagaagaagaagaatcagatagagacgaaaaaaggagtaataatctttttttttctttttcttggagttggagtgggtcttttctctcacacaggtctctctcttctcaactcttcccatgttgtttcgcttcttctgtaagatttctgtaagttagttccctcagaaaattctccattctccattttcctgcaatccaatatctttatctccaaagataatggcccagcagatctcagatatatagaagatccctcttcttttggtccactttcccttgtttacattttcccgagaaaacaaaaagaaagcttttttgcttttttttctttcttctctgctttcccagctttcaagcttctgaagtaaaagaacgaagctttgtgttaaaatctcagaattttgattattcttcggattgaaaaaaactgttccttttcctaaaggtagatcctttcactcgttttgatttctgggtttcttcatcggcagattttttgttctgtttctttctttaaatactcatttaaaatctatactttctttcattactatgttcttctaggaatctagctcaaagtttcatcttttgcttccttcttggtctttaatgcttacaatgtcttgttttcttcttctttttttggcaatcaacaatgtcttgttttaaagcttggtttttcttttaaaccacttatgatttttctgcctacaaaatgttgttaatagtctttgagatcttatcttaaatctcatctttttacatttgcatattttgtttgtatagagaagcagatttgatgatgcattgtggggtttacttttttattttattttaatgatattctttcttggtgcagagtgtgaaagtgaatgaagaatgcagcagaacagctttttccttggggtaaaccgtgacattacggatgctagaactgcctctggctggagtttgtgtcctgtactagacattgatacgactagatacggcgtgaacgtgcatgttgatgatacattctctttcttgtatagtgatctttatcttagacaagtaaaagaagcattaagacacaccatgcttgtacatgaatctgtctttgaaagtcaggtgcgttttcttttgtaatgcttcttcatctttgttgtttcctgtttcctctcaagtttaagagtttgatactttttccatttcagatctgtgagcttcatcgtctgtatcggaagcagaaggagctgatgatggaaatggaggaaactcgacataataaggccttgtacttgaattctggtttgcctatccctagaacacactggatgagttcgagcatttccgcataccaaactaggaatttgcctcatgaagaagaaaacatttctagacttcttgtagataacaaggttgagaagtttgaaaagaagaaggtcttggatcttgaattaccggtttttgagtatagtgatatgcttgaagaagtccatgaagctcaaaactttttggaagagcaatctctgcaaaggatgtctctggattcgggtaagcagtcgagtaagctacaacttgatttgaatgaacctgccaagattgaggaacattcagattatgtgttcaatcagtttctaagttcagttatatcaaatgaaattggagaagagtctgatacaaagaatgagggagaaagtttagtaaaaggttccaatgggataaatgaagcgcaaggatctgtaaaatgtcgagaaggtaagaaaatggaacaataggtttcttcttaagcattttgtcacactttcttaatatattgaatgaagcctaaatgttctgttatatcttttgagcagattacgtaattgacttgaatatgtctcccccgtcatccgaagaagaattaactattgttaagaagtttgaaaccgagaaacctcaagagtcttcttcagtttcgctgcatggaaaacacggtttagatcagccgcaaggggttgtccaagagctaccatgtttaactagcactttacttttggacaagcgatataagtcattgatgacaaggtcaaggtcaaggaacaaggtaaaacattgtccaagcaacaaaaccttcaaaggctcagatcatgacccgcactcgagtggtcaagcctcctcagaatctcaaagcaatcaaacgagtatggagaaagggagttcaagttctttgtctgaggcaaaatctgcaaaaaaggggactagtctaggaaacaaaaggcattgtaaaccacaaatgaaatccagtaagggtcaaaaagtagttgcgaaaaggagtggaagagttaaacggaagaggagcagaaggatatctcttgttgcagagggaaattatcaacaagtatctgcagctgaggctatagttgatatttctagaaagtctggtcgagaaactgctgcttgtatcacttccttaagcaaaaatctactttggttcgccgacatttcttcctcggttgctgaggacaacaaaatagacacattgcagctgacagaaaagaagctagaggagcacgagacaaatctaaggttgaactcttcagacaacattgcagcagtctccagcattgtccttaaaaagcagaggagaagccgagccaggcaagggaagcggaaatgccaagatgaccagcacattgtggacacattttcagaatgggaagctaatgatgatctgcaggtaataggaaagctaatggaagcgtctgacttaaaatggaattgctggttccctaagaacaagagcaaaagctctcctcctaaaccagtagatgctttcacttcctccggggaagaaaaaacaggcgtcgattggggagcattaagaaagcgaagacgaggctctagaattcctgctgctgattttaagcatatgatcatcaaccaagtagtatagccaaactaaagaggtaattacaatacttgctatagtttgcttcatgtttttttggagaatcaagaatcttacggaagatgatgatttttgtaacaagtcttgttctagaaatgaagactacataggagatgatattaaactgttagaatatcagttcatcaaaaggcaaagaatgtgtgtttaaactggagatggtactgaagaagttatacatatataagcactgcaaatgaaagttcaaagtttgttagaccaaagattatcagtcttcaacattaccatgacaatgaccatggccattgtgtttttaattaatgattcttgacttggtccattcaaaggttcaaagctttacttttgcctcaaatttatatggtttctgatttctgaggaaaatgtttataaccaaattgatgtctttttaaaatagagatctccattgatgttgcttacgatattgtactatactgatgaaacaaatgtatggatataaatagtcaaccaaaaacgtaggcagatcaaactaaataaaggaaagaaacaacaaacaaacaaatgtatgaatatataataaactctttctttctaacataacgataaatgagtaattcaagaattgaagtttgtgaaatgagagctttgaagagcttcttgtaggagttcatgatcatcccaagaatcgcgataagtctcaagattttcttgtgaattattgagagcagacaaacatagtagctttctccaatcttctaaatgcggaaacccaacataatccgcgtacttatcgcaatactataagcaaagagattcaaacacaaacttttttattagggcaatgaaatcaaaagtatacaaaaatgttaaaaaaaattgtcaggaaggttttattaactaccgtgaaatcggcaatgtcgtgagtgttgtgtttagggactccggctagatctcttgaccggtaaaactcgtctactgattgtaacatttggtcaggagaaggaagagatgactttcctgacaaaacttgtgctatccattttgcttgtgcttcaaagaatgggaatcctatcaactgcaaaataccaaaaatgaattgtcaaattttgtttagaggtaaaaccaatgatgttttagttaaaacaaaaaaaaaaagagataaaataaaggacctttctggggataccgacaaaggagagagaaggggagagacaaggagggaaagtgtgttcgaagagtggaccaactctatcatcatccacttctattcttcctttactctcaagaaatggaaacttgtacgagtacctgtgttttggtcccccaacatataaattattactttaagtaataaacaaaatacataaaagatccacaaaatgcataaaagatctaaaaacatatgacagaaattgattattgttgtacaatatgatggccccaagaactaggggaaatcaattgagaagaccaatgtagaaaagatttgtagcccactcattctggcttttacatactatactataatataatattgatattttcagtgatatataagtgaatttgtattttttgttcgatcgatatgattttctagtaagactaatatctaagttacgcaatatcaaaaaaaaaaaaaaaaagttacgcaatatcatgcagattccaataatttattatttcttttccagtcttttttttcttacatgaaacaataatttatgaagaccacaataccccacaaagccaaaacacaattaattaaatttaacttaacgttaactaattacggcggctaaacactatctgagaaaccttaaacatcatcatctatttgtcttctctaacggaaacaaaaagtagtaattttagtctatttactcaaagttgtttatatatgcgaatcatctgttttataatgaactaatatttttatcatgtaaataaatagattaagataaggtttttcgtttatctaaagatctaaatcttacccggtgcaatataaaattgtatcagcgacgacccaagaaccatccacaaaaatgactttcccatcatcctctaaagattcaatctacaaaacaaaaatcaaagaatgaaacttttaaatccaaatttatacaaactatattattaaagtgaagagaacctgtgggtgaataagaaggtttgggtgtttggaaatgacttttgaaaggccagaagatatatcaagtgtcttggcacttaaatgaacttcctttgccacttccacaagctccattgatatgtcttgtccactcattgagttcccaaccaccaccaccacctatcaccatcatcataaccatcaccgtcatcataaccataaccatcattatcatcaccaaaattaaagatataaaagtttcaattacctcattacgaaatggatcaggcaccctgtaaacatggctatgaatttgcttccttttccaagaatccattcctataaccatcaaagaaacatgaaaaaacaaatcaataaccatagatacacataacatgattaaatgcgaaaataatatgaacaataatatacctttaatagagggcaatctagggtgagagtaatgaccagtagcaacaacaacagcatcaaagatctcttccataaccttaccactaaatttctctctacttctcacaatccacttcttcacatcatcctcttcttctttttctcctacaaactcaaccctaacattaaacctaatcatctctcttaacccaaaagcttcactaaagtccttaagatacaaccaaagctccttatgccctggaaacctcctcatatctctccctttcttcgccaaaaacggaaaatccgaataacccattatctctctcggtgaggttagcctcaaggaagagtaaatgctgctatggaccttcagttcaccattaatggaaccactacttcttcctaagggatcttcttcttctacgtttggttgatagaaccattgacctcctacgtcttcgttttgctccaacaccaccactttgtgtccttcttttcttagctcccttgccgagactaaccccgccggtccagctccgatcacacataccttctttgatcggctccttgatgcttctgatgtgaacgtaaccatacttgttagtttgaagaaagatggatttggaatggcttcttgatttggtttctttgtgtggtctctcaccggaggttgtttttatagtagaaatttaagacttcctcactactacatctcgatatggcatgtttcatatctctttatttttttaccttttgctggttatataattattacatttctaatctttttgcagattacataaaattgttttgcttatttcaagaaaaatgatatatttgacagaataaatacatgacaaatcagactgactggtaataataaaaaaatgaattgttaataaatacgtacattctaaccttcaaactgatcaaaatcctaataagtattaccattttgaatactcaattaaaaataataattcaatgggtcccgatttgatatcaaaaactctgaccgatccaccttcttcgtcgatatgactatttttgtaggtcaaattcatatttccacgagaaaactagtgtttcaaaacttttttctttcttttcttccggcaaaagagattcataattaattaaaaaccatcattttccttagaaaacaattttaaaactctatatcattgctttggcaattggttacttaattgtatgctaaaaacggtaactataattagcttggcaatatatcggagagagatacatgtgttttgatattgatataattaatatatttttgttgcatatatacttatgccttatattctatttttaattttaaccgtatagtttgatttttttctgaattttggatgataatttatatgaaaactcagtatataccgacttacaaatatcaaatcttattaatattaaagtaagaaaaagtgagacaaaaagttagtaaaccctttcgaaccaagttaaaagaaaggtgaaaaacagtcttgagacacaaaataatggctatgtgtccctccaactcaaagaaaactccttgctgttaaaagttgtgcttagggtttgttggaaacattacccacctctatataatatacatacatatagtatatatgtatgggaatcaaagtgaaactaaatttaaatatgataaataatacaaataaatgcttttaaatgttattttcaactagtataggtttatatataaaaacttgattttaaataacaaaaataacgaaatatctacaatagttttccaaacatgaatgatatgttatacatatcaattatacatatatgattatatatgcaaatattacaagtatagataaccaaattattgaaattgggagaggaagactaaaatgggtccccacatattggaaagagtaagtcttaaaggcaagggaacatcaacaattatttcattgggctctttatgatcccatcctcctacgattacataacccctcatgaactataaaaccaaactcagatttgatatatataattgatatttttatctcatgaaaatttaataagaaaatggataaaaactctatcttcatgcaacgtattgggagttacgtataaaaatgaataaaatagatgcaattaaattttaatatgtaggtttctctgaagtttaccagattaaattataatgtacttgtgtttatcttttaaatagttggtgaaaatgaggttctcttctaaataataagagtttgaaaacattaaaaaaaatcaaaacatccgattagcagccatgaaaattggtgtatggaaacattgaaatatttgttgtcaacagtattttatattattacttattagtttatgtaataaaacgatgatacgtaatagcactggatcgtctctttgttttctccagtatctgtttcgcccattggaacatccttgcttgttaattacacaacaaattttctttaatttatttatataaaaagaaaaagtcttgagtattttcaataattaacttctttttgttgcttatttatataaaaagaaaaagtcttgagtatttttctttttttcaatatgacttagtattacgccattttaaaaaaaattaggacaacattgcttttctgacaagaaactgccgatgaaagaggctttgattccaagcaaaactgtgattacagatacaaggatacaaacaggacctgtgctttgtcattgagaggtcaatctactgacaagtcaaaaaatgagttctatgaggcatcatgattgattttctgatctatggagtaggcactaccaggaacttcaatcattagttcatcttcctcttcattggtagctgaatcagtctcctggaaacatacagaacaaacatttaatgctacatcgagtcttttgtaaaattcccccattttcatttaagtctcagtcatacctttgtgttctcgtcagccgagagatctttttgcttcggattgtttctgagttcgtttaaagtgtttttgagttgcttcctggctttggaccgtatcagtttacgttctgcacattgagctgcagtgacatcggcatggcaagccacacatagtgtcctcatgttctctagccggcactcgcctaccaatgatccaataaaacttgttatgtcagttgaattcacaaattcaaacgtttattgagtgatctagtgttaggcctatctagtgtatgagattaggatttacctccgccttggtagactggaatgatatgatccgcatgccatgcatttccctccgttggatcattaaccagggtttcaagccttgaacattagatgtgaaaattaagaatttcagtttcaaaaataaagtgtatgttcaaatgcagtaattaaactccttatgatattcaaatagaactacaagaaaaaagttgggcttgaatggctcacaagttcttccgggcaaacaattctggagcagctttgtttatgtatgtacgtcgtttttccagtggtaaaggccttaaccgtttgacaagttggtggcagtctaatttgcagtttgtgcaaattccatgttctatctgaaaaagttcctgagatttgaaaccttacacctgttagtgatgcactaaagatatacttgatatgaaactttgttaatcaacactcatttgcattaaataatgaaagaatggccaagaaaaacctggcgaatgtatctgctgcttgttcttgtccggtagtcttcatagcatgcaagctcacagaaaagatcctctaaatactcaggctctttggcgttgtatcccctagatcaaacaaaaaatttaaagttaattaaaaacagtaaccaaaaactatcagtcagtaaatacaccatgttttcactcacgcgcagggcttttgacagagtttacagagtggttcgttgctcatactccaagcttgggtgtattctttttcctttctttggtgaccacttcgaaggttgacctttatccacactgcattttcaggtaaaggaatgctgatctcagaaaacggtgtgtttcgtcttttgctccctcccctaagcaatccctgatacaaaaaactcttaataatggttttggaatcaaaatatttggtaagcacttctcagctacaagatatacctcgctgttgtgactagtactttcactcaggtagctcaactccagtgataaaggtagttgcaaaggctttccaagtagtttccgcttttcgattggccgtagcgatttccactctttcataaattctaagatagcaagtacatgaaccgggtcatccgtaatggattcaggatttttttctttcgtggtaccctgacttggattgcttgcttcaatctcctctggacggaagttttggaaatgaggccttggtcttggatctttcccaggaatgcaagagtataaatgaattcttccagtgttttggctcacctgaaagaatttaagatctgatttatatgcgttttcaactccaaacaagtaaagataatgtcatttgtaaatttcccaatagaagtaagaatcagattgcagcgtagatccaataaacttagaaactgacacgagattgaaaagtatgcagtggattcaccaaatttggcctccttgtaatgattgtacttttcatgaccaccaaggcaacaagaataacaaatgaaatataaagagccaatgcagactttgaactttacctcaaatctcagagaatctatgagtggaaaaatggaactggaatcaacttctttcacaagcccatcatcagcaataagctgcatcataagaaaatgtatttacattttaggacatgtcagagaagaaaaatagacctttcataagatttaagttcatacatttttaggcttatgattttcttggttttcctgggctaacatagtcaaagaaatggtgccagaagacctcatgccagagccggaaccattctcaacaaaaggacagacttctaatatttccaattgagaagtcatgtcgtcctgctaggccaaaaaaatcaaaaagcattcagccaaatgtctccttgattatggaactcagatattcatggtatacgaaagataaattccgaggtcataaaggtccaaactatttgatcaatgaaaagtcaagagataaaccttgagatcaatagtatttgacacatctgtctcagttcccggatcgtcacagctttcaacaatcttatcagctactacagtatttgattctgatggttgcccttcaagaacttctctttcactgctttcttcagcaggcttgaaaatagatgctcctccaatctgcccagacaatttttttatcatataaactaatggttgtcatgtgaataaaattaagcctatgacatatgaataaacctctatgtggtgtgaacatctaatgggaaggacaataatctactgagaattgagaaaaagagcaaagatttgagaggtacttcgatttcagtcttcccatcatattttccatcagtggtagatgaaatacggtgcaacttcttgtttagattttgccaatttgactcgtccatagtatcctgttacataagagtcgctattcaattatagtggataaggcaaacttcaagtaactagtataacagcagcaaacgagtttaccttcgcgcagaagatgtatacatttactgcacttgtttggcctcgcctatgtgctctatcctcagccttcaaaatgtaatcaattgattatgcatctagcagccttaccgcattttgcagataggtttaagaacaagaacaagaagttaaaaagtataaaaagagcagtacagggaaaatacctgaagcaacagagacggtgttttaggcaattcaaggaacacaacattttgtgctgctgaaaaatccagtccaactcctccagcttctacaccaattattgcaatttttacctggatgggaaagccaaagcataggtcaaataccacacattctaacaggcacaataaattcaagagttgataaatgtatagaagatattgtgcatacctcactagaaaactgaaatgactgtacagccaattgtctatctcttggcaatgtcgtcccatcaatgcgaacaaaaccaatccctttatcacatataaattcctgaaaagcaataatcacaagaaaaaatttaaaagcaaaatacttgttcgaatatgttaaatgagctagcagagatataaagttttgaattttcaaagagttaatgacgagaattaaatatattaacctgaattccatccagaaccttatggtgatgtgcaaaaacgaccattttagttgagcttctgtctccatcaatttcttctggggtataatccaatcctgatagaagtggatgtagagataaccattcacgaaaggcagaaagctttgcaatgccaagttgttgataggaaagtttcccacatagttgattctctttgtcagctaaagcacaacaaaaggaaaaaatgaaaaaaaaaagagagagagtcaaatatatgcaaagagaattgtctccttgacatctatggaaagaaaacagtcaaaacatacagttagggccatcagaattctctgcgtttacatgtccagcttcatttgatccacgagcattttggtctatacttaaaaggcagcatgtgttaaaacagtgtacggaccacagtagttaactagatgtaaactccaagacacttaaggtttgtgttaatggcaaaaatataatgcctcgaatactgatgataaaaacagttcaacatcatcactaggttggtataaagccagccacataccaggttcatgtgacttctctgtgacttctgctatagcaccatccttttgtttcttagcctcgctgacaatagccattgctaaagctatatcagacttctttagcaagatggttacgatttgcctacgttttgggggtaactgtgttaacaaatgctgcttcagtcttcttatctataacaaacaaaaaggaattttcacatgacatagttctccaccaaatcacaacacaatacaagaaactttggcataacatataagtgatatcatttcttttctttttttcttcacaaatttcacgaacagctccaggcaataaacagatagttaactgaactgtgaatgttggaacatgggaatattttcacccacaactctaaatttaattctcttcatatttatctagaaatacttctaaagttataagttgtaacaaacattcaaattatggtttgagagactagtcctatctgaattctgaggaaaattcaattagaaaaaaacaagtttcccagtatcgaccattgttacggaaccattaatgccaaactgaaatagaagtataagaatttaccatcactgtttggtttagcagtatgtttaactccagtaagcgagtacccttggaaaaatcctgaatcgttgaacaaaagatttgttaccatctcgcaacattaacaaaagaaaaaactaagataagggaaccaaagttcatatcagaaaggaagtgattgaaaagaaataaaatgaagtatgatagcaacatcctctatgggtgaccatttaccatgcaatgggagtattatgcacttaaaatatggaataatgacgacacaacaggctaccacataaagtccaaatttacctggaaaatcttcccttggatacctctgacaagcccaacttcacaataggttttcgcaaactcatacttatcttttcccagcaaaccaggcctggtgacagaatcagtgttagaaaaggtaagtagtgcgaatccaatcttttatgtcaaaaagtttgcagatgacttgccatagcatgtttatctgatggaaaatgtcgaagggcctgtggtcacataggaaacaaatataaggataaattacaaattcgaagtaaatggaagatactgatttttacagagttaagtttccacaacctcgatacagaaggagttcctgacaacagaattatgtgcttaaccttttcagcaacatcaaggactgtctttatctgcaaaacataaccgaacgtattttgactaccaaccttttttaaaaagcacaaaatctccactcagagttaaggatgtctcatgaagtgttagagaaagtgtcactgaatcatctctgtgtttatcgaaggtaattaaagtcaaccaggaaatcatagaaaaggggacacaggaagccatgcttaaaaatctcattaatgaggaaaacgaattcttacatacctcaggtggatctgacttctttttcgaacatcgtagatgatgagattcatctactatcaagagggcccattctcgctctagcatggtcgtccggagatgctgaagcatcttgtatgagataaccacaacttttggccatcttggtaaataggcaggattatcttgatgaccgaatactgaaaccaaaagtttcatcaaacacaactcgatttgaaaagatagccaattaaagctttagctttagagctccagaggagaaaaaaaaagtattagagacagaaattgctaaattgcaattctgtattccatcagttaatatgtgcaggacttggaagtgaaagataaaaccagaaaggtaacacgcaaaattgttaattctgtattcaactaatgtagctaacaagtgcaagacacataagtttagaagagaaaagataggcaattcagtagagacttttaccgagatgtacgtcagaaggcaaacaagatggcaaccaacgttccaattcttctgcccatgtgaaacgcaaaacagcaggacagacaacaagtatggaaccctcacttatgaagcaaccggcaatggcgatggcctgacacaagattgaacactcaagattaactactttaccaaactactaaaaactttcttctacaataccaaatatataacctgaagcgtctttccaagccccatttcatcagcaatgaaacacctgccacctctccgtaaaccaaatcttagaccatcaagttggaaaggcaaaagggcattcaccaatttccttggcagggtttcaatcagttgttcaaccttctcctccgtataatgttcaggtaaacaaggttgccatttcccggaaatatatgactgagaaagtttctcaacaacagccaacgttttccaaggtaccccttcaacttcaacgctcttggaccttttaagacatccagagaccttattgtagtctctaatcttataaaccccagcttttcctccatcatcattttgagtgtagtgtaaaggaatcgcctgaaagtaaaatcaactagaatatcaacttcgttcttcgcattatactaaaacccctaaaaaatcggagactcaaaatttccccttttcgtaaaattctcttctacatttcgtcaccctttaacaaaaaacaaaactttacgcgagaaaactcagagaagaacttacatcagatagaatctttctcaattgacgaaggcactcttgttcttcagggcatcgaaacccttgcaattgaaccggcgtaaccgaaaacgaatcaggagaacagatctcgagcctgacgcgaaacttttccggcacactagtactcaatactcgtaccggttcgtagttccgatacccttcttgaggacacacatcgttactaccgtcaagctttcgacatttagctaacctgaaatcttgttgtcgctgtgggttttccgaagaatcgaacgactgctttcgtttctccgcaaaagctaaccgagtcgcttcgtctcttcgcctttgctcttcggaaacctccattgattgaatctgagagttgtgtgaagaagtgaagagaagacattttgaattttgaaacgcaagagcatgaacaagtgaagagcgggtgcgaagaaaccacacgtgtcaactacacacgtgtgaattaaaattaaaatccggttcggtaccaaaaaaccaatcaaaccggatttccaattttataacagagtactatttcgagaaacaaatcttgaactcaagtcatctacaatcttcaagacctctctataaactcagcatcgtagaaaagaaaatatgatttctttgaaaattttacattataaagattcatgaaccaaaaacaaaccatttttcctttaaaccaattcacaactttgatctctttctcaaggacttagcagccttcaacgacttgtgaagatgtggatttgctctgaatcttcttcttctgagatgttctgttgttatcttgaagagagataacagtttcaaaagcaccaaccaatgctttaactttacttttcctcacttcttcaagcttattcacagtctcttcaatcacattattgaaaagtgtctgcaatttcttcttcacttccacttttctgtgtctcagaacaactttctctcgtttaccttcaccgttaatcttcccaacaccttctcttttatctttcaggctcttcttctttttgttcacatcacttgttctgagttttggttcttgaacaactatcttcttgaatttgatcgatgttgtagtggaatcttctggttttggttcaagaactttccctttcttgaaattcatttgctgctttgttggaggaggaggtggagtaacctttaaaccaatccttttcggtctaatcttgctttcgggtttcggattagtaacaagattagcagaaccactctgtttcttctcaggcaaactagtcttggacctggaagtagtctgtcttattggcctaggatctgaccctgtaaccacctctgagggtggaggcaaagatggtaataagctaagacttttcttgccggtgcttcttatgattttcttctcagaagattgctgagtctcactgatcttaacacttttggtgctcatcttcttcttcttcttctcaacactagattcaacaacatacaatgtcttctccaccgcatcatcaggtctaaccggttcatcaatgttcgtcttctctttgttcttcagattctttaaacgttcctctttagaattcttgttctcgctgatccttgaaaccttctgagcatcaagactcgttttctccaatacatcatcacatctaactggctcatcgatcttcgccttctctttgttcttcagagtatcctctttagaactcttgttctcactgatccttgaaaccttcttaacttcaagatctgtcttctctaatacatcatcacatctaaccggttcaacaatcttccccttctctttgttcttcaaattcttcgaaagatcctctttaggacttttgttctggctgatccttgaagccttatttacaacaagattagtcttcttgaccgttctcacaacaggtgaaacactcggactagtactcttggtttcactcttcttaacgtgtaaaccatcacaagatttgacaacctcaccagcagcttctctctttgcagcctgcaatgatgacttgtccggtttagaaacattccccaaggacttcctcaaagtctcacccttccccaaatctccactgtcaacattctttttcttagccaccttccatggtttgatcaccaaatcttcctcacgcctcttcccatgtttacatagatcatgagtagaactcgtttggttcccacggtaacgggtttgaacctgagctttgcctgtctttttatctaaaactcgtgttgaataccgcttcaaactcgcatgattggtctctgcagctggatgaagaacatcatcatctccttgaacttcctcatccactacagggatagtttccacagatatctccattgggtttgcatcatccaaacaacacttgtcatcaacttgtgaaatattctcctcagacattgcaacttattacaacaactacagagaacataatgtactgatcatcaaaatcacaaattttgggagcttaaatcatttaaacaacacacataatgatcctaaactgtttttctcagattttgagaatgaaaagtacaaaattgaatctttggttccaacgtcaataaataagcaattacatcaacaaccaacaacaaccaaaaaatccaagtttgatcatgactgaattcaataacataattaccacaaaaagaaaaacagatttggtttatgatctcaagttttgatcaagactagagttatagtaacatagttgatcctttaacaaaaaaaagttatagtaagatagttctaagaaattacaatgaagtcaactgtgatgaaaatgtgagatacaaatagaaagatgttgttacctttagatcacccaactcttcaataattattttcccaaaaaaaaaaaaaaaactcttagagaactgaagctgaagaacaaaatactaaatagttttgtccagaagaggatgaagagtgtgattagagaatttgagaagaaaaaggagaaagttagatttgattagaagaaaaacaaatgaggtcaacaaatctttaattgaacgaaagagagggaaggagagaatcttttgacaattttttcttctaatattttcagttttggactttattaatacagagccatatgattttgcaatttattctaagtgaccatattaattagtcaaaacatgtttaagatctagtatttcttttgatacaacataaaaggaaaataattgaattatttcatttcatttattaaaattaaactgaagattgaaaatttatgatggtaacaaacaaaattcaaacttaaaaaactcaatagtagtccatataataatactgtgtatattaatatattaagcttttaggttttgacggatcgggagatatggaaacaaaaagtctttttgtatttttctaaagaatgatgccttccgcgatggaccgactttggattcttttgattatatattgcaaaaagataagatctacatgctgacttccaaaaagaacagagatgctctaaataatttctaataattcgtgccatttctatattattcaagtaaataatactttgtaaaatttaatacttttcgtggttgtaaagcttattatacctaaattatattttttttaaaaaatttgtatcaaatgtgctgcaatttagcaacatagaaaaattgtgatacatcaaaagaaccttgttatcaaatgtggttactggttatgcccatttgaaaccaacactatcgcccatttcaatctgaaataacataatctgaaataacattttctgaaagcccaattccgagaaaggccgagcttataacacctgaggcccaaagtttcaatttctgtttgctgattctagaaaatttacaaaaatgtatacattgtgatcatcctacatataaagtagcttaccaacaattcacaaaagactaagctatattgcgtgtaaagcagaaataagtaaaaagaatattacagttttctgaaaaaaacatataggatataacattgaaagctaactattgcctacaaaatacttgttgtacaaagtatcaaataatatatgtaaatgtactttgaaaccggcaaatgatatatatatatatattttttaaatgatatttacatctcttaattttgattgaaaatatatagatagggatatagtaaagagaaataaagggataatatgacatctgtattattattttctttttgatataaaggacagatctgtttcaattgattgcttctgatttaagcatgacacgaggcaatactgactgaaatgtcatcgagtgacagatgcaccgattcgaaccaccttccttccacagttgttaccattcgcaattgttctttctgacaccacaatcttaatttattagttactacctcttttgctcctattatttgtttctttaattgtgtttattttattaatctggatttgcctttttagcataagcaaatacaaaaaaaagttattcctttaagatctaatcctgtttagtaatgttctctagatattattggttatgcaacttgtgcttggaaaatttttaaagtataatagttgaaagtgactttcttttgtagattttgaacttatttgaatagtcatgagatgagaacaaaacaacatacttccaaactgactatgttttgtagatttttaatatagtatcattgtcatattggttttgaaaattgactaacgttggaaatatttctacaaaataatttgtcttttctggtcttaaaagtgagttgattgtgtttaaccaagtaattcatttacaagtaagtgatcattgtgtaactaatgtaacttgagagaaatatactcaaacaaacttcagtagtaagaaagaaaaaaaagagtaaagctaaaagccaaaagtgaatgaattaattattaatatttgtcacaccaatttcgaccgatcttacttgttttcaaagagatgcttcaactgttttgtttgtttctgttaaaccaaaatcaattaacgagaataaaaaggaattaacgaataaaaagtggtagaaagctcatgtttcaagagaaggttttgattcatcaaccaagttgcaccaactccatatatattaccaaaaccaaaataaatttacatatttggaaagaacataaattggacagaacatatcaagcatgtaatatacagaagccgacaaattgcaaaatttacctaaaccccatcttacaccaccgtcagattctgatgtaagtattatcaaagctcaagaacaatcacatcatcagaatctaacttatatatcaaaggtccagaattttctccattgaagctggattctaaggtcagttcttacttctttatctcaatctgatgattccatatcgaaagtcttactttttcacttcaatttcaatctgatgattctaagatctttgattcgaggtcgatctctgatagttactacatgtttctgggtttatttatttttaatccatatagtaattaaaaactcttatgaggtttaattatggttacttgagaatttgcaatcgtcatctttctttgactcctatccattttttggtttttcctttgtttaatttctgtttcataattgtaattgtaaattaaccaaaacaaattgatcagaaacctttttcctatggaatatttatcacacgcaagcctgtgagttgtgactctgtaatcacttccttgttctggtaatttcagtggttaaggctctccttttttctgatgttgtcagcaaaagttagtttttcttcttctttaatgggttaattacacctaaatctctggttattaaacaatccagaaagaaaaaaagtttattccttcctctatgtatatagtttcacatgcaagcatcacttgtttgttctgacaaattgcagagttttgagttctgtttttttttttttctaatgttttgtctttaagaaagttctgtttttttttctgcaggaaagttatcaaaagttttgagagctttggatagtgaagctcaaagaactaaacaatgggcttcagagtttgtgttattgtcgtcttcttgggttgtcttcttctagtccctgagaaaacaatggctcaagaaatgaaacgtgcatcgatcgttatccaaggagctcgacgagtttgtgagaccgatgagaactttgtctgtgcgacattggactggtggcctcatgacaagtgcaactatgaccaatgtccttggggttactcttcagttatcaatatggtaatagcaaaatagtaaaggattcacctttcagtctcttcataataacaatgtccgcagttgcgataattttctgatctttccaatgttttacaggatttaacgcgtccccttcttactaaagctattaaaggtttgcacctggcataccaaaaatgttcatgccattgctttgtgtgttcttgaattctgaaatttttaaggatttggatttttgtatttgcttagctttcaagccgttgaggataagaattggtggttcgctgcaagatcaagttatttacgacgtaggaaatctcaaaactccttgccgtccattccaaaaaatgaacagcggtttgtttggattctctaaaggatgcttgcacatgaaacgatgggacgagctcaacagtttcctaaccgcaaccgggtaagctaattcactttcggtttagtttcattaacgttcacattttcctcttttgaagaatcttgagttagttgtgtttgcttgtttttatcgagcagagcggtagtgacattcggtttaaacgctttgcgtgggagacacaaactccgcggaaaggcgtggggtggtgcatgggatcacataaacactcaagatttcttaaactacacagtctcgaagggttacgttattgattcttgggaattcggtaacaacaaacatttaaaaagtcgccttcttttactcggtcttttttcttagctttccttgttctcggtataggaaacgagctgagtggaagcggagttggtgcgagcgtgagcgcagagctttacgggaaagacttgattgtacttaaagatgtaatcaacaaagtttataaaaattcttggttacacaagcctatacttgtcgctcctggagggttctatgaacaacaatggtacaccaaacttcttgaaatttccggtcctagtgttgtcgacgttgtgactcatcatatatacaatcttggttcaggtctggttttgtataatataatcaaaataaactcaaaaccattacttatatatatcatatctgaggaatcatctgccttctctgtttgagtcttgcaggaaatgatcccgcgctggtgaagaagataatggatccgagttatttaagccaggtatcaaaaacattcaaggacgtgaaccagacgattcaagaacatggaccgtgggcttctccttgggttggagaatctggtggagcttacaatagtggtggccgtcatgtttctgacacattcatagatagcttctggtaaaacaaaacaaatatccatttcggatatcttgattttagcccctgatttctattactgaatgaactaaaagaggcatctttggatccaatctttttgaaggtatctagatcagcttggaatgtcagcgagacacaacactaaagtttactgcagacagactttggttggagggttttacggcttgctcgaaaagggaacgtttgttccaaatcctgattactataggtgagagtcccaaacaaaatccggactttgaaattttatggttgattgatcttgaagttttatctgactttttccgccaatctttctctttcggtcgggtttcgggacagcgcgctgctttggcatcgtttaatgggaaaaggggttcttgcggtgcagacagatggaccgccacagctacgggtttacgcacattgttcaaaaggaagagtgagttgctcatatcatcttttatatcgcagtttccaaacgtctttttcggttagagtttgctttaaatgctttggttttttcttggttttaggccggtgtgacattgctactgataaatctaagcaatcaatcggattttacggttagtgtcagcaatggcataaacgtggttttgaatgcggaatcaaggaagaagaagtcattgttggatactttaaaaagaccattttcttggattggaagcaaagcttctgatggatatttgaatagagaagagtatcatctgacaccagaaaacggtgtgttgcgcagcaaaacaatggtcttgaatggtaaatcgttaaaaccgacggcaacaggagatatcccgagccttgaaccggtcctccgtagtgtgaactctccgcttaatgtcttgccattgtcgatgtcgttcattgtgttacctaattttgatgcttctgcttgttcatgatgttaatggggtctctctttgcttattgggaaaaaataaataaaaataaagaatagttgtaatttttttggtaattgtatctaatgctggtgataaatgtatcatttcatatttcaatacaacatgattacaaacctttggttttgtgtctcttcgacttatgagccattgcaagaaagataacaaaagacaagaatcaattcgcagaactgcaagaagtgtctccacaagataaagaagtatcttcactgagtttcttcctctcttcataagcccattccaagccgtgacagtactgaaccggcgggttgaacctactgtcggttatatcatcaggtaagaaagcaccgttccccacaagaaacttgacagcttctcttttccgttctttagctgcagcatggagaggagtccagccacaagcaccagaggttctagcttccatgttggctccacgttcaagaagcaagtccataacttcgatgtgacctcctttggcagcaaggtgaagaggagtcattccttttgatttaggtccacaagctagagcgttcacgtctgctccttggtcaaggagctctttaacagctttgagatcgccttcacgagctttgatgtgaagctgagtccaccccctgtcatctctgtcaacacccgtttccatggaccggcgcctaaatgagttaggccgaaaggacaacgcaaccggctgctcttggagcatcttgcagataaaccagaactgactagaattcacagatgaaagactcaaaggatatttcctaagggaaacttactagacaaggagattctaggagtgactcagatttacataattttggttacaatcttatacaagaatgtctaaagcaggaacactacttgtgggtagaaatcatcaaccaatatcactcagaataagaacttatgggagaggcagattgagatgattcagttggaatggagcaactcaatcaagggaagtgattagcaatgcagtaagggaaagagggattcaaaccagggccaaagacacggagattttgagggatcacaactggagtcatagacagtgaagagaacacgagcatcaactagaaagaggtaggagcttaatggtttctaggaacaaagagaaatcagaaaaagcctggatcaatgggtaaagagagcatcgggccagagtctctatctgcgtgatttttaccagccagatctgccaacaagacaaggatggaaaaaaaaacttagtggattcagataatacaaataagcaaagtgttcattcaaaaaaaaaaaaaaaagcgaagtgctacagaacaagccataaatctctctgcaaagatcgccagaaatattttcagagatcaaaattttaggttaggtaacgaacaataaaaactttagtaacaagtcccaatctttagaatcgaaaactctggcaaatgaacagtatactaagagaattcccaaaataagctgaaattcagaaccacccaaaattcatctaaaaaattctaaagcagcaaagaaactaagataataaaagcttagtgatgaatccaaacaacataaagaccaaatcaatttcacagtaagacgacgacaacgtaatagaattgaatcggggaaagatagaaacctgtaggcgtcgtagcttagcgcggagggagaagaaagagatatggtgaatcaaacacagatttatccttgacggaggatatgaatcaattagtgttttttcgcgggtagagagtgagaatcgtatatcgatttccagatgaagaagaagaagaagaagaagaaaggcgcgtgagtgtgtgtcagagacaaatatcgtttttttttgtttgttactatacttgatccactttaaaatcgaatttgccacctcatattagcttaattaatcaaggcttcttactgttgggcctacaataaaaggcctgaatttggcccagatagattaaaccatatctaatatctttatcaactaatttaatttcaaaaagattttattctattttatcgtacatagtttgcataatatggttagatttcaaattttatatggaagtaactaattttggcagataattggattcataagaatagaataaaatctctatatatttatctatactattaaaagacatcctagaaaatagtataatacaatgtatttcacccattatgcacatcattttgcaatattaccttaaacaaaggctaaaaattacaacaacccccaaaatgataaaacttatataagaatctcatgattgatgctgtaggagaagaagaaaaacaaagaaacagaaccaaagtagagacactcttgttctttatatggattctacttcatcggaagtaaaaatcgtttctcaatgctttgttaaacccaaaaccatccctgaaaaatggaaagagccataccatttatcaccgttggatcttgtgatgctctctatgcattacctccaaaatggtcttctctttctcaaatctgatgatgcaaccaaaacaaaagatttcatggagacttggctacaaaagcttagagattctctagctgaaacccttgtccatttttatccgctcgcgggtcgtctctcgactttaaaaaccgataatccgagatcctactctgtgtttgtggattgtaatgacagtcccggagctggatttatccatgccaaatcggatctaagtgtaagagatattgttggatccaactatgttcctttggttgttcaatctttctttgaccaccataaagccgtgagccatgatggtcacaccatgagtctcttctcagtcaaggtacattaatttattcttgtaatctcaaaatcatataattcacttagcctagaagtttagtctgaacgatagtaatacacatatagtactaggtttacttaacttcttgccatttgatttagagatacatcgaagtattgtgtatctatgtagtcttagttgtttgtatatcacgcaactatgcatgcaataccctaaagagatgaatcttttcaggtaacagaattggtagatggagtgttcattggattttcattgaatcacgctgtgggagatggaggttccttgtggcattttttcaactctttgtcggagattttcaatgcacaagaaaccgataacttgcttctcaagaatcctccagtcctttcacgttggtttcctaaagggtacggtcctgtgtacaaccttcctttcactcactctgatgaattcattagccgattcgaatcaccggtcttgaaggagagaatattccatttctcgtctgaaacaataacatcattgaaatcaaaggctaatgaagaaagcagaacaacaacaatttcttcttttcaagcgttagccgcatttatgtggagatgcattacaagagcaagaaacttaccttatgatcatgaaattcgttgtagccttgccgctaacaatggaacaaaattggatccaccattgtctttgagctatcttggtaattgtctttctgctgtaaagtccaagaccgttacatccggtgagctactagaaaatgatttgggatgggctgctttgaaaatgcatgaagctgtgattggaaacactagtgaagtggtctcggagacaatcaaaaactggttgaaatcatcttatgttttccatttagaaaaacttttgggagcgatggtggttcacattggaagctctccgaggtttaagatgtatgaatgcgagtttgggatgggaaaagcggttgcggttagaagcggttatggcggtaagtttgatgggaagatatcagcatatgcaggaagagaaggaggaggaaccatagatttggaagtatgtcttcttccagagtttatggaagctttggaatcagatcaagaattcatgtccgttgtctcttcttcttcttgatcttattcatataagtttgattgattgtttgtgttgctgttaaagtccaattaatattatgtgacaatgtgttattcaactgataatgactgttatttattaaagattagtacaaactaaaatgtgaggtttagagatgataaagttgatgtctttgtggattactcccactcactctcttgattctacactctacttgtaagaacttagataggaaacctgaaaacagaaccatgaaacagagaaaattgcagagaagtaaatgtgtaagatcaagacttttacgttttcaggtttcagtgtgaaagcgcctactcatgccttgacattgttactcggaatccactattaacaaggtttataatatcaagctctttcttgagcttatacaacaaccatacaagaagtcatctcctcccaaaacacaccctccattcaactactctctgaaccatttgtcccttttgtctcctgatatgttctaacactaagaccagatccaaaacgacacagttctacttttggcaagaatcacgtgacgtccttgtgattgggcttcagaatttgcttgcttcttcttcaaaccctctgtgggaatagtgtttagtgaagttagtagaaacatgcatgtgttatttgattaaagattaatacaaactcctaagactaatgttattcaattagaataaagatcatatatatgatgacatcattgatgatgaccagcatatcaaattgtgcaggaacatacatatagatatgatgacatcattgatgatgatagctatctataatcatattatatgaatatattatttggattgtttatgtaagcgagtataaaccaaagtaacaagataaaagggaagcaaagggaccattgaaagaaacaaaagagtcatattatacacattttttctctttttttttttcttcttgagaaaaatggattcctctccatcagaagtaaagattatctcaaaatgcttcgtcaaacccaaaaccatacctgaaaaatggaaagagccataccatttttcaccaatggatcatgtaatactctcaatccattacatccaaaagggtcttctctttctcaaaccatcgttttctgaatctgtcacaccaaaagagttcatggagactttgctgcagaagcttaaagactctctagccatagcacttgtccatttctatccgcttgcaggtcgcatctcgactttgaaaaccaacgactcaagatctcactcggtgtttgtggattgtaataacagtcctgctggatttatccatgctgaatcagatctaagtgtatcagacattcttggttccaaatatgttcctttggttgttcaatctttctttgaccatcacaaagcattgagtcgtgatggtgacaccatgactctcttatcagtcaaggtacatttcttcattcttgctatatcatattattcaaatatgtcagcagatttgtagtaataaaagttaaattgcttttactaatgatttattgtagtagtgttttactgtgtcatagtgaaaaaaagatgctgaatctttttctggttatacaatgtaacaggtaacagaattggtagatggagtgttcataggattgtctatgaatcattcgcttggagatggaagttccttctggcacttcttcaactctttgtccgagattttcaattctcaagaagataacaacaagtttctctgtctgaagaatcctccaatctttcgtgaagtgtccggtcctatgtacagccttcccttcagtgaacctgatgagtccattagtcaatcagaacgtccggttttgaaggagagaatgttccatttctcatcagaaacagtgagatcactaaaatcaaaggcgaatgaagaatgcggaacaacaaagatatcttctttgcagtcgctgactgcattgatatggagaagcattacaagagcaagaaaactaccaaatgatcaagaaactacttgcaggcttgctgctggcaatagatcaagaatgaatccaccattgccgatgaatcactttggaaattacatctctcttgtgatagctactactacaactggtgatctattggagaatgagtttggatgtgctgctttgaaactgcatcaagctgtaaccgaacacactggcgaaaagatctctgccgacatggaccgttggttgaaggctcatttgaaactagatggatttttcagtccaaatattgttcacatgggaagctctccgaggtttaacaagtacggaagcgagtttgggatggggaaagcagtggcggttagaagcggttatggtggtaagtatgacgggaaggtatcagcttatccagggagagaaggaggagcaagcatagatttggaagtatgtctacctccagagtgtatggaagctttggaattagatcaagagtttatgtctcttgtctcttcttcttcttcttcttgatctaatattcttattcatatgtgctcccatcatatctctatctaaactggatttgttagattggagtattttgtgttgctgttaaaactcaatcaatattatgtgacaatgtgttattcaactgataatgattcatgtttatgaaaatattaatacaaactagtatgtgaggtttagagacgataatgttgaaatctttggggatttattctcactcactctcttgatacaacactttattttataacaacttaaaaatgaaacttgaaaacagaaccataaaacagagtaatcgcagagaagttaattagcaagatcgagagttagtaaagctctttcttgagcttatacaacaacaatacaagacttcatctgctcacaaacacagcctcaattcaactcctctctgaaccttttgtcccctttgtttcctaacatgttctagcactagaaaccatatccaaaacgacacggtttactttaaccaagaatcacgtgacgtccttgtgcttatcacatatgagataggcttgggcttcagaatttgcttgcttcttcttctaaccctctgtgtggaaacagtgtttagtgaacttagttgaaatcatgcatctgttatttgatattgatataaattaaactaagattaatgctattcaatatgacatcattgatgatgaccagcagatcaaattatgcaggaacatacatgttcatgtgatgacatcattaatgatgatagctatctataatcatatgaatattttatttggattgttctataaaagagagaataaacgaaagtaagaagataaaagaagaccaaagaaacattgaaagacacaaaagagtcatattatacacattttttttcttcttggaaaaaaatggattcttcttcatctgaagtaaggataatctcaaaatgcttcgtcaaacccaaaaccatccctcaaaaatggaaagaaccttaccatttttcaccaacggatcatataatgctctcaatccattacatccaaaagggtcttctttttctcaaaccatcattttctgaatctgtcaaaccaaaagagttcatggagactttgctgcagaagcttaaagactcactagccatagcacttgtccatttctatcctcttgcaggtcgtctctctactttgaaaaccgacaattcaagatctcactctgtgtttgtggattgtaataatagtcctggtgctagatttatccatgctgaatcagatctaagtgtgtcagacattcttggatccacatatgttcctttggttgttcaatctctctttgatcatcacaaagcattgaatcgtgatggttacaccatgagtctcttatcaatcaaggtacatttcttcattcttgctatatagaggtctcttatacgtgtgtgagttatagtataagaaagatgctgaatcctttttctggttctgtaggtaacagaactggtagatggagtgttcataggattgtctatgaatcattcccttggagatggaagttccttctggcagttcttcaactctttgtctgagatcttcaattcacaagaagaaaccattgggaataacaacaacaacaacaacaacgcattgctctgtctcaagaatcctccaatcattcgtgaagcgaccggtcctatgtacagccttccctttagtgaacctaatgagtcccttagtcaatccgaacctccggttttgaaggagaggatgttccatttctcatcagaaacagtgagatcgctgaaatcaaaggcgaatcaagaatgcggaacaacaatgatctcttcttttcaggctctgaccgcattgatatggagaagcattacaagagcaagaaaactaccaaatgatcaagaaactacttgcaggtttgctgctggaaacagatcaagaatgaatccaccattgccgacgaatcaatttggagtttacatctctcttgtgaaaacgactactaaaatcggtaatctactggagaatgagtttggatggattgctttgaaactgcatcaagctgttaccgaacacactggcgaaaagatctcttacgaaatagatcaaatgttgaagtctcctttaccgttgcaagcatatcgactttccaatttgaacatagttcacatgggaagttctccaaggtttaacaagtacggaagcgagtttgggatggggaaagcggtggcggttagaagcggttatggcggtaagtatgacgggaaggtatcagcttatccaggaagacaaggaggagcaagtatagatttggaagtatgtctacttccagagtttatggaagctttggaatcagatcaagagttcatgtctcttgtctcttcttccacctgatcctattcatattttccagacacaaaactcaagttattctttatttcaaacacaaatctttggaaccaaatgtttgcttgttactctaactgtattctgcagttgttaaatgtttccacttcattaagaaaagaactaatatattgaaaatctatgtttgactttaagcaacaaattcatcagaagaatggggagaagcggacgagcttggttatgaacagagttctggctacttttacttccggagtaaatagcgagcccgttggttcgattgcttaactctgtagttgagctcatcagcattatcttgaagatgatccagttcattggtttgcctgcgattacagtgttgccttcagaaacgagaaagctcttagagaatatgtatacatatagagagacttgatggaaaacctttcgattgctgttcccatgtccactgccatatttttcaactcgccaagaagagcgcttaagtcggtaagggcttcatcttgctttgcaatctccatttgttaacacagcatgatatttagaatcttggttaacaaacaaaaagagacgacttttgaaaccccagaaggaacataagagagaatccgaacctgtgttttctgataagcatcaacggcttcaggaagtgtttttgattttggtttgagtgaagggttcagtcccagcttttccctagtctttaagtcgataacttttctcttaggtgaatcacctgctcaggaaatatgaatagctagataaattaataagcaaaagactcattccttagaagtaaagatcatcaaccaaagaagaataaacctttggttatgacagggccagttatagaacgagacttctttggcttccaagtccttgaaaaaacacctccgaggcgtccaagaatcttctcaccctgaaaccaaacaaaaaaaacatacaataaagatcatccccaagaaagagattgcaaaacacctctctggtcgtatgtgactcacccgagaaagatgatgatcgagatcaaccgtcttctggtgtgttctagtaatttgatctccttgttcattcaacataaccaaagttttagaagcatcacatctaatctcttcagcaactttcaaacacccttgtacggttttcgttgtttcctcagagttatacacagcgtagctctcaagttcttgaaccgtctggttctctttacctcccgagggcttcaaggatgaagtgaatcttttctcaacctccttgtcatcatcatcatcatcaaaagggttcaaactgaaactcttagcagcctccttctcatcatcaaaagggttccagctggaattcttaggagccatagaaggttcaggggaaattctactgtatcagagaatccaaaactaagaaaacaacttctcctgcagaaatccaaaactaagattgctattgatccttgattcgaaatttaccagaagatactgaactttgaagttgaaaaaaagcaagaacaagtatttataactgctatctcttttgatcaacgatcgattcctaaaagatcaattttccaacaatcaaagtagacctaaatcgacttggaagattacgagaagaaagaaaaaaacgaattagtacctggaaattgaagtaggattgagaggttccgagagagaaaggttgataggaagaagaggctttaacgagttcaaatattggagtccgttatagaggaaactggtgagaaaccttagcaaaaaaacacaattgttgaaaaagagttttcttttgttcctatttatttactttcttgtattaaactatttatcaataaaatctaccaagagtaattatttttgttttcttttagataaaagtacaggtatcgttaaagaaaaagaaaatgtatacagattttatcaaagcaacttgataagaaaaatgtttgagatttcaatttataaagaggaaaagaacataaggtatggaagaattggttggagatcaattttcaatttgctgcagagtaaatatttagagacttgttaagacatcaaagaaaatgcaattatgtattaccttagaacgacttttatttctaatgtttgttccaagcaatttttatgtacactcagaataaagaaaacatcaatctctaaagctaaactcttaacccaaacttcttttgtttgcgtctccaaacctcttccaagtctctggatttcttctgactaccctaccatttgatttctatacaaatcaacatccaaacttgcaatccgtctttcaatcactcgagcactttccacactcagtttcaacagaaaacccatggatgagactcagaaatgtgtgtaaaggtaaacatcaaagctcaagacttttcataacccaggaagaggcagcatttcattggaagcaggcttttttacatctctcttgatcttaacaacagaggaaagaaaagagagattagattccattttcacatattcgaccaaaaacaaggaagcattacataagtagtacctgtgcttctagctcggatattctctgtaatgatgcttgttctatgcacacacggcgattgcgttcctcatcaagcaaacatgtcatcttataccttaattcagccatttcttgtgtaaggtcttctgcttcttccttcgccttcagtttctcctgtttcagttcttcctgcacaaaccaacaaccgcaggtataactagttggattctgtaatggtaacaaaggaaggaaatagagttcttcagtttttcaaaagtactttgagttgctttacaacatcttcgtgctgatgtatctgtttccccataccctccactttatcaatcaaattcacattctgagaaagttctagtttcttcatgatagcatcaaaacaattgctgtgagacacaaaaccaacattattagggacggggataactcaatttgatgacttaataaattagccttaaactggagcttaccgaacttcattagacactggaagcacatggctcagttcagcgaagaagcacattgcatttagaggctgttcatcttcactttctaaccgttctttagtactttgaaagaaatctttgatactcttttcagaggcagtaaatttctccctcaggtcttcgttttgcttttcgatgtacttgacattctcttttgccctttgagactgaaactgggactcttcgattattccttttaattgatctttttcttggatgctttcttcttggattttcatagcgtcaaagagtgcttgctccaacgctgttatatcaagcttcatgctttctatttcgcacaaggactctaatgttaaggacgagatggtctcttccagtttctccaatgtaagagacgaacactgtagttctatttccttgctctcgagttcttgcaacaacaacaaatgctcggatttagacatacacaactcatctcttaaagagttaacttcttcttccagattccttgattcagccaatttgaactcaagatcgtgcagatgttcattgagataattcacttccttgcttctgaaaattagttgatcccgcaagtaatctacaaggcgaagattaatatatgctgaaacatattattattagttcagaaaaatcaagactggttggcttaaatagaaaattaccaatttccttatagcaattcaataattctttctccatcatctgaattcttgctgtgtcttctaagcgagattcagataatgacttcgtgtgaagttccaacctctgcggtgaagagaagattaaggtccgaaaactcaaccaacagaatgagaaaatactttccctgaattgctcatattaaacaaggagaagaagactactctgactagttcaatactatggggctgtgattctctcagcaagtccttttgtttccttagctgccaataacaaatcaaagagcacaaaacaaaacagaaatcaacttcagcaatctaagagtcagaaactaccttataatgagcatagcaatgaagtgtttacctccctgcgtgtagtcccaatctgcaaaagatcttcaacatcaaacgagttctcacaatcacttctggaactacacgccgagctactgcttcccgagaaactccccgagctactcgacatttagagacaaaaatcaccactgcaaaggcaatgaatcattagcaccaataacctatagaaacactttctacaactaacttcaaacgaatccaagttttcattccctaaatcaaatcagatttttctttcagtttatctttccacggaaatcaaattaggctataaaaacacttacaacaactaaatgaagaactagagaagacgtcaacttcacaggtccaattattcataaaattagatgaaagccttgatgcttctactcgattcctttgaagtaattggggaaaacagtactacacacaccactagatagccaatttcaacaacgaaggataaaaattgcaaccacaaaagaaaaagcgaacacgagaataaaattgatgagcgtacacacgaatacaagcccaggaaacgtttaccttcgcagctcaatccctctctgagataattccgacggcgaatttgccggagaaatgatgtttgaatttgatgatcctccaaaaaaaaaaaatgtctctcggtttcttcgaagcgatgccagcccagataagtaaaaatgactctctgctttgtttaaaaaacaaaacccggtcaattccggtcgggtcggttcgggtcaaactagttattatttcggatttggtttatgtactgtgagagtgagagatttttagtaagcaatccctctctagtaatggcggtcgcaatacctcaagccacttctcttacgaacctcgtcttcctcacgaaattaatcccacgaggaagcttcaccaccatactacctaagcatcatcggaaaccaatcttcgtattctctctccagactcaattttcttctccagtaaccacactcacctccaaaaaccctaaagatgatgagcaacagcaaaaactctccttcaccctcaactaccttatcgactcatgtggactatctccagattccgccaccgtagcctctcgtaagctcttactagattcaccagaacgacccaacacagttctcaaccttcttcgtgaccatggattcaccacagctcaaatctcatctctcgtcaagaaacgtcctgttctcttattagccaatgctgaatctgtcctcctcccgaaactcagcttctttctctcaattggtgtctcaaaatctttacttgctcgaactttagcttctgatccaaccattttgactagatcccttgttaatcagcttatcccttcttacaatttccttaaaagcgttcttgattccgatgagaagattgtggcggcgttgcggaggacgacttgggttttccttgaggatcacactaagaaccttgtcccaaacatcaactatatggcggagactggtgttcctgagaaatgtatcaagctgcttctcacgcattttcctgaagctgtgatgcagaagaaccatgagttccaagcaattgctaagcaagctcaagagatggggttcaatcctcaaaaatcaacatttgtgttggccattcatgctctctctgggaaaggaaacaaatcgatatgggacaaatgttttgaggtttatcagagatggggatggtcggaagatgatatcatgtgtgcgttcaagaagcaccctcattgtatgatgttgtctgagaggaagattaacagaacgatggaatattttgtgaatgagatgaatatggcgcctagatcgatcgcacagtgtccagtggtgctcttcttcagccttgagaagaggattatcccgaggtgttcggttactaaggttttggtatcgaacgggcttgtgaaagaggattggagcttgacgtctttgttggttccagtggagaaagtgttcttggagaagctcgtgatcaagtacgaagaggagttgcctgagttgatgaatctgtatctaggatgcaccaaactctgagcttttgtttttgactgttttcattatcaaatgtcagatgctgagagacatgaatctttgtgaaaagagtctagtgtgtaatccaattttggtagtgaaaggaaagctgattagcaagcccaacgtgtgttttaaagacagaacaattgaagacttgcatgtagaagtagaatcgtcatctcaatataagggccaaagccaagaatcggtctgcctatatgatttgtatacacacacgcacatatacatatacagacacgccttgatagagtatacaaacgtacatatgtatgtgttcataagaattggtgtgacagtaacagagattctaaatcttgcagacgagagaaagagagagagagagttttacaacaatatttcttacacgaaacgatgatcctcattcaccgaaccgacctgcaaaaaacgaatattttatcatcagtgaggaataatacatagagactaataccaaatctatctgcactagtctaaatgaacttacaaagtaaggagatgtgaagacagttttcatttatcaacgcctacatcaagtgctttagagcccatcatcacattcgaatcgatttgcttatcaaatttcttctttctcctctcttcaaagtcttggtatccttccatctatccatttttatataaatgtatgttacacaaaacccaattcaaacaaacaactttaaaaagtgttctttcgaggttatggattattgaattaccagctgaaactgatccatggaaataggattgttatgcaaagaaaggttttgcagactcttgcaatgtatcagcaatccatctggaatctggaaaacaacaagtgttacagatttcaaaggaagaagatagtgattcaataaacccaaaaacaaaaaaaaacacatttcaatctgtttacctggttcacttgattattgtctaaggaaagcgactttaactgaatcagattgcagagtgatgcaggaagctcttcaacaacgttatctgcaaggctatcccgaatcacgattaagctttggagaagaaacaaccagaggaatgtccagaacaaaatgtcaatagaaaaaaacataacacttgtttcctaaagagttttgatgtttctgaatcacctaacaaaaatgggggataaaaagaaacagaatctaaagagcgaaactagaaacataccattagcctgtacttcttctaaagaagcacagctccctactgattcaggaagggatttcaatctgttatttgagacattcaacagcagtagctgcatttgattagagaaagcttgttaattatttcagggagatcctagagctatgctttggtaaatgaagtcacttacattgcggagactaccaatagtatcgggcaagtatatgagcatatttcttgagattgatagttgctcaagccttaccaactggcccactggaaagcaagaaaaatatatgaatacgaaccgtaataggacacaagttgttttaaaattaacaaatagtgtacttgtatcaaagagcatcttacattcatcaggcaaacagctgatgcggtttccatcaagcatcaaaactttgagagattgaagcttccctagattccccggaaggcgctcaactagattatcagctattaactgccaaaagtcagcatgatgggaaagagtcaaaatccacagagaaagtaccaactagcattccattgagtcaaatactgtgatcatagctaatacaagatacgacgaaatatgcagataatgtacacagagaggcaaagtttcctcaccagacgctgcatattgattaacttgctgatttctccaggaacatcagctgcataaatatggtcaaatacaaagtccctcagctattactcttaacacgtcaatgaagaaagaaatcaaaatgaagcagaaggcataccaatcttattgtgtgttagatcaagtgttcgcactgctctctccatttcaatcacttcatcaggaaatgtctactcaacaaaacaaatcaaaaaaacagaaaattcaccaatcaagagataatcagccaatccagtcttaacaaaaccctagaacaaattcgtatgctgcattgatgacacaatcacaaagttcagtgcttttcgtctctatcaatcattcaaacaagagacaataacaacaacacacatagaataaacatctctacaaagtcatatagacagatagaaacaagtttgtcaatcaattccaagtggagacaagtataccttcaatttggagtcgcggagaccaacaatgcctgtagatcgccagcgtgagatccgattagcctttgaaccaccagctgtattgctcgcgcaacaccccatttttgtgtttccgattcttcgccgatcgtcgcagtagatttcgattagatgatttatataaataatgaagaaatctcagatacccagagaaagtttcaaagtaatctgattgctaaaagagatggcttttggggtcaaaatttggtttttgaggtttaggtgagggtcaaggtctctgtctcgctcgcgggttatatagaaagaaagccaaattcgtccccaaaaacagaaaaatataatttggaaaagtaaaaagaccctaaatttgataaaagtgcttagctttggaaactcgaagatcggtaagaaatcaaaatcaaaatcatttcgagccccaagactcaaatactattgagtcaatgaactaaacttcagattttatcttggtattggtgatcccactaatcaaatcgagggaaatttcagatatctatgttaccaaagactcatttttgaagtacttaaacttgtcttctgaccacattacctgtcttgtttcttacataacctcttacctttcaatcatacctaaacattttgtttgcaaaatctttcttttagtggttctatttttaaaactttcgttgttaaacgtctttttcttggttctaaacttctaactaatgatagtgttgttaaaccaacgtatatatgatattaaccagaaaaatggcttgttttattacaagaaaacgaggtttcttttgatatatagccccttcctcaagcaacagcatggtcggactaatttttttttttcttttccatttattttattctcatacccatctcgttaaatttcaaaccaaaaacactaataactcaaattcgaaaccgaccagtcaaccaagttatgaagttgatgtgaaaagccaaaatgtgaagtcttttgacttgatatcgtttgtattatatactgaatatcaaagaactcagcccataatttcaaaagttttatgaatggtaaacattaggaacaaacacgcagcaaaaagaacaggaagtaagaagcctaataatactatttctagaaaataatcacaaattaagaacatggttcatctatatgtacatacatgattcttctcaaaattctatttgatatagaaaaggaacccataataataaaatatgagaaagacagagataattaaacacgttttgctttcattcactatgagaacagccaaaaatctaggaaccagattccaatttttggttcctttttcctacttccacacagaacccgctttgtcaatcagcggatttcgatcttcaagactttttaacattcccttcattaggcagaggtacaagatatgtaaaatacacgcatttgtaaatatttgtaactaaccagtgatgattgattggttgttgaagagggaaggttttgtcttctgtcttttctttttttttcccctgttttaagttagccgtagagccatttcttgaagcagcgttcgtttctgagaagcgtttatcacttgattggtttctgcattctctagaacatctgtgattatagctgctgcgtgacccagtggctcttccgcggctctctttagcatgaaagcctggtgcaagtgaaggtaagtgagaaaactaaaaacagtttcacaaaaaatggttcgagcttttagaggagttaagaaaaaacagaagaccacaaacttttacaatctagtgcaactttttctcagtagaaaacttgatttgaatccagaatctaagttagggaaatggagagaagaacctggccatggtgcgatatggttaaggtacatggttgctgattccaaggctctccatcaatttgcactggtaaaggcgcacaaagttgtatcttgactgctgacccttgagctagccttctcgcacgagacaacccgacctgaagatgtgaaaacaaaacaaaaatcaatttatgttagtttttaggttaccagtcaaatgtatacaaataagacataagagtacaaatataacctgaagtttcccaaggtgccatgtcccagatatactcacaacttcaactatcttgtcgtgcatcgattgcggatcaaagttttcatatgtttcatcttcattctgccataaatccacccctcccatgtaacttccaatgtttgcaaccagtattccttccgcatccttcagagatttagcatagagaagttagagcattaattatcatgcgggtcgtatctgtaaggtatctgtgactcacctcaggaacctcgatgtcaacaccatccacctcaactcgaacttgccaagggaaatcttcgaatgttctgtccattatactccttgcaccttctctggcatagaggactttgttcataaactgcacatggagaccattcaaatatcagtttcatggactaaaggattaaccatacagcttctctacaatatatgccagttatatcatgattgtgaaatatagaaatacagttttcctgaggttatatcaaaattttatcaattaatgttcatttggttacctggctataaaatctctctggattctcctcccgtagattgtgaatctcaagggcaaccttagcatcacacccaacccctgttaagattagcaaagttagcaacaatttataggctatgggttcaagatagcagtcatatcatttacaagggtaatatacacaacgggaatggttcaaaccattcttcatgaatttatttaaagaatctatcattatacaattttaatttatatagactttaaatgcaaactgccgtgttaaattgtaaataattttaaccccgagataagtcttgataagagtaatatatacgggacaaaagttgcaaacagaactaaaggactctggatacaaatgaaactgccccactacttcgacgattagcaacctcacatataattgaaattatatcgaaagcaaagctgtgaaggttttcacctagaggttttgaatttaactgacctatataattgttcatatattttggcggctggagttgctttccttgttgattcagaatcgatactttccaacgatcaaggacagtgactgcagcatgctctatgttctgtaatactgtcgacaagcctccttgtctctcaacagaacccaaaccaccaccccaatttaatactcgggatagatcattcccggttccagcaggcagtatagcaactgcaggaggagaaataaaattctgtttctctatggcatctaatacccaaccagcggtgccatctccaccacaaacaagaactctaaagtgaggaaccttcctgaagagaaaaagtcccacttctggtccctgcactgaactcaattcaaatacctgcaagaaacggctcgcgtcaataaactttaaagactacagattaagaaaatgcattgaaaatgtccacagaatcagatttaagtctgtgacgagttttcaaggcagtatactctacctgcacaggatttagatgaagatgaagacgttgacgaagggaatcacctcgttgagcaccactctttttgttaataaaaaccaacaacggtcttgcatctgaaggcaaatcagctagttcatacttaagtttcgaccttagtgcatgatattccttctgaccaaaagacccggttcttttaacactcggcttcttttccagcttgccattgctgtcactgtccccgttagaagaatccccattcataacgctgatagaattttccagtacggcatgagcgccattaacagttggacctgtatcagctgtgctttctgtggattcatcgcaattgctaccactattaccagtgtcagctgaagtttcattagtttgcttgtattttttgctttgaatcctgatactggcaagggcggtagatgcaagttcgttagcaccatgagtgattgagctcagaaatcctccagagggattccgcgtcaattccttaacgtagagtgggcacaatattaaccttctaagcgggcctaaatcacaaatgtcaccagtttcatttgacatgttactgtgacagtcaacgtgcacaagacgttgacaccacaagcagcaccatataggagaacccccaagaaaggagctactacatgactcgtcacagtagctacaaaacgaggagtcatcagtctgatcagccccttctgtccaccgcactgcccactggtgcaccacatgctcaaatccaaccatggagacacatttgcaatcttttggcgcacttgaagaacagttaaaatgtgctgctgctccacagattgtgcacctgtggaaaaaactttctgaagctacaattgcctgagatggcgacatggacttcaagcaaacacaacagttcaagtttttcgcacgagctatagggtcgagttcccagctatgtggggcaacaggaaccttatgtcgtgcctttggatttttctttgacctggctatggctttcgtccaacttaaattaatatttcttcgccattgaaaagcagtgtaggcgatggtcaatataccaacaagggcagcaacaaaacaagagaacattaaaccacgagattcaaccgtgtcaataggattcttgctggtccagctaggaaagaacatccccaattctccatcgtcgtccatttgtctatgttgcaactctactacaagtgtgaaaatccctgaaatccgagccaataagaagccccaaaaagattattgtattggtcaggtccacacacagatcatcaaaaattcttcctcaaactccatatcatcatcatccatcaaaccagtttatgctcagaaaaagcgatatcgcagaggacaacaaacacaattcaactaaagaaaaacaaactcttcttccctgacagtaagaaaaaaaaacatgtcatccaaccgcataacacgatagaaacaatcgttttcataagaaacactgcagcccaaattacaaaggccctgaacaatgtaaacaaaaacaaatttactacaagaaaattaattgtttggtcattttcttcctcggattcagacttcaatcaaacaatcgtaatcatgcttggacaacacattcttaaaatcaaaatgaaaccttgctctcaagttcctaagtttgatacatattgatgaaaacttactctgctcatttccaacaatactataagaggcaaaacaaaacctttaagcttcgactttaataaacaaaaaaaaaaaaaaaactcgagctctagtgaaaaataaactcagatcacaaagttccaaaaatctcctattaaaaaaaaaggggcaaaaactgcagctttctctctgtccacgaagatccaatgtaaattacaccaacaaataaataaaaaaactaacctgaagaagcgagagggagaagtagaagagatgatcaaatcagaagcctaagagagatctagaaagcgacccgaaaagcgaaagaagaagagaaacccacaatcgatgatgcaccaagcacgaagcttttttactccaacgaaaattcccaaatccaaaaattttgattttgaaaaagcagagatgctctctctttcagttttcttataataattaaaatctttcgtttgattaattcgatcggactatatacaatatgatttgtgaaaggagaaagattctgggcgaaaaagagggttaatctatcgtatccgttttacacggcttggccacgtaggatatatgaatctcacagttcctagttgccacgtgcccatacattttttgtcggcaaagggcccaggcccattactttcatgacacggttcctaaattacttgtactatgtgacattgacccaatcaaaacagaagaaaacatatagaattattcttttgggatttattaattcaatacactaaagggaaaatgtccaaatctggtttttgacatccaaatgtttttgattgtatgcttttgtctaaaatacatttggcaaaaaaaaaaggaaatgcgattgtgatgttgatttaagtaacaaaaaaaagtgttgatgtgtaagacatgattctctctaccactgcatttaatgttaagaaattttttttaaaaatgatatatatctacgcaaaaatattaatattttatatactaatattctttacgagcaacctgcagatacatattgatcaaattcttaacttaatatgtaaatgttgactataaatcttatccaagtactccccatcgaccatacggcattactagcaagaaatccttttgcagcatgggactttactctttgaagtatatgtcactatatattctcctatatatgctcgatccttggactaaatctgtggtactcgacccgatcgatctactccactgcagttaagttcaaaaatacaacacctaaacatgtgttttttgatgatattggtaatttaccttgtatcacttggtacggtgttaccaatctgcttttttagatcatacctttagtagataacaaatatgagaactacataatatgtatgggaatcttaagtaattgtttatgatatgaacatcttcagtttcgactaaacttttgattgctactaaatacgtatagaacaaatcttcttaattatatcttataactaccgtttcttaattattacaacaatatgtcatatgatccaagtctaaactataaatgtccctttgaaaacggacacttcaagtacagctatatcacaaaagatttggcaaatctaagtacacatttagatttggtaaatttgtacagaatcagtgtgttccatttcaacacctaaaaatatagtcacttttaaaaccaaaaataaagaaaaaaatagtcatatcaccgatgcttagcttgatcatcataagcttagcttgatcatcataaggtactgagcctcacggatctcgaggttagaaataagaagagagaaaaaaaacaccaaatcggacggttaacaagttactgacaaaacgaaattatgaacctgagagagtagacactagtcttcggatcttctagactaagatatcaaatctgtttgttattagaagataatatatataatgaaccaaacacaaaatcatttctgctctccataactagaacacctccaatggcttcttccgatgatccagctccggagaacaaccacgtctccgtcttagctagacaagctcgaaacccaccgacacattttttctttcctcacaatccttctcctcgtacttactacttctcggcgccaccacagatttatttcatctccgacatatatctccctcctcctccatcaatatgggtgtattatcctctttggtatattaaccctaaccctaatgtatatgagtctacacaagaacttcctcaacgttactctccaaaccctagccaagagatgactcttccaccgactagtagtagaagagtttttggccggagaagttacgaactatgtgagaaggtgacatggaggacaagtatcaagccggaagttgaatccaacggtgatcacatcacaaccgtcatgcttcgcaatataccgaaccgatacacgtgcgtatataattccttcattttaaattcataaccactagattatacagtatatgttagtatttaaacaaggtgtgatttaatttatttattttgttgtggtggtgaaatgatgaggcatatattgaagctaatgattaacaatatttgcaggagagagatgatgattcagttcatggataagcattgcgaagaagccaataaaagtgggaaaaatgaagagtttacaatctctgcttatgattttatttaccttccgatagactttaggtaagttttaatctttattattattcgttaattagtttcatctttgtttatatacaacgaaatgatgctatatatacaaatcataatcgataatcattgaatatctgcatgttacaacttacaaatttttattttgtgcattaatgtatttgtaatataagtatatataacaatgttactattcatcttgatattattaacttgatcatatataaattacctaaatgaattaaacaggactacaatgaacaaagggtatgctttcgtgaacttcacaaatgcaaaagcagtgtccaagtttaaggctgcttgcaacaacaagccgtggtgccatttctactcaaaaaaagaacttgagattacttatgctagaattcaggctagttccactcctttacatatatatatacacatctttgatctgtgtatcttatcttattcaatcttattgtaacacttgtcggggaaaacaacaatacttttgtgtagggcaaagatgagctggtgaaacgtttccagcatatgacatatccggaggaggcctacagtgcggtatgtttcagcccagctcgtagcggagggaaagatacagttcaaaccacaatggtcggtaaatgcaatgaaccagtgtgctcggtttagtctttccatatatgtaattaggattatgaataataaaagtgtatgcgatggtgaacatgggtctaggatggaaaagaaaagactcagacaccgaaccaaatccaagtaaaattctgaaatgtttagttttggatttggtttttgatgtgtgtgagttttgacttttcataattagtgttatgtttaagcgtctactactctacctgtttctctgatctatatataattttctatgttgttgaactgttgtctggcgatgtttatatacaaaaatatagctatggttttctctttttttttttttgttaatgattattctgatattcaaaaatttggttgaaagttcttttttttggtgaaaatcaagtcatacttcattccagttatagagaagacaaaaaaatctttctacaatgaggattgtttttgcaccaattaattttttaaaggaagtaagccacgaactcttagcttagaaggtgatcgcatgaaaaactagctaacaacataaaaaaaaaaaaaaatgagttggccaaatatcgccggtggatattattagactacgttttcttgtcaacggtggatattttagatataagactttttggaacgtaccaaaaagtttctcttattcctttgaactcgcattatgttacaaaatataactagagaatcttgcatagaaaggtttgcggttttgtcactattttgtatgtgtactactgtactgtacattgaactgttgtgatcttttcaatcatgtaaaaacctactatagaccttagcctattctggcgttacctttacacattccagtttttattgagccgaaaccatcattgttagtttgggtgacgatagattctgcagtaccttgacacaaatcttcgtttcttggggaatggagcgacaagtgtgacgtagatgtgcatcgtaggctcctacaaataatgaccaaaaaggcctttttccatcaacaattgcttctttttcttttctctctttttttgccacttttttccccactatggtcatgagtcatgaccggcttcacataaacgatgttgaatcaaatagctttttgggcggggactgagtggaattaaagatgatggattcagttagggttttgaggtagttcttggcccataatatggcccaatatatgaattttgacttttttcgaattatcgttgaagttcatctcttaacaataataagcaacaactttatgagataatgaattattgcaatacaatgatgtagaaacggaccaatacagtgtcgtgtttgacgtttaggtgggtttggttataattgtcttatcactggcccacactacaacaacaactctcgtctaaaaccaaaccctctgacatggaaagagagttttgatctacgagccaattgctttggacccgagcctcgtatttgcctccggacccgaacctctgtttggctcctccgctcgccgttgaaaaatttccgcactgatatcgatcactttatctctctcccttctctctctctttctcttcttctcctggtttcgttaattcttgaattcgaaaaccctaaacaacttgttcctagaaattgagcaagcaaaggaaagctttttttcatcttcaggtttccatttgttgtaaagctaaacgtgacacaagtgtgtaagttcacatctctgtttccctctgtggaaaccctaattcttgctatatatcctaaaaagaaatgatttttttttttacccaattattgtaccgtgtcgataggtagtgttattgtttgaggttgaattctcggttactgtaatgttcatgttattattaaccatagcttcgatttgcagtgagattgtgtttgcggcaattttgatctcaagtgtgttctcgagttttccaatcaaattctgtatttttttcgaaattagcttaattttcagctgccataagagtgtttatagctgtgaaatcggaaattttcagctggtttttgtttaatgaagttgatgctgtttactgaaatgagctctccaagtttacttgattaggtgttaagagtttctgatgttgactggaacttaggcgtcagtgtaccctaagttccaatctaaggaaacaatgcttattctgtttccttgtaccatgtgggctctgcatcaattctctagtgtctcactttgctgccctgtggtttttgtttcctctttgcagaaacaacacttgtattggctttcttctgtctagtgtttttgtttcacttgttgtgttcaactctaaattttgcagtatctgttttgtttgtttagcaggagaacctatgagtattcaaagcatgccaattggaggtagctcatgaattctggggaaagaggtgtttatatgttcccttttttcttacacattcggaatttagatcaacgaaggcgcaatgttgaacttgtttctgtgtttttttcaaaggctcagataattacaaataatttagaggagctgaatctatgcctggaaacgaatttggggagaagatccacaatttttttggacaagaaggcctatcccaagaccagcaacatcagtctcaggttgttgacagaagctggtccagttttaataatggtctagtcggtaaccagaggcagattgacccatccctcattgccaatctgaagagttataacacacaacaatctggtactgattttgtctccttttgacactgaattccacaacttgcaatcattaatagctacatatattgctagttttctaaatggagcttttttttttttcttatgtcagttgatcatgagagaggtcatcaatcttcaaattcacagcatggtttaaactatactcagcagcctataaggtccgagttctcaagaagtttattgcaagaacaccagcaactcccaaatggttacatgcatgggaaccttgggttgcagacaatgccgaatggggcaaatgttttgggaggtgatgtagaatctagtagggataagttatcagcaaggggatttactccagaacttcataatgttcctatgaggcttgagatgggagaatctccggttaattatgatttctttggtggtcaacaacaatcaaacacacagctctctggcatgctccagcctttgccaaggcagcagatgacattcaatgatatgcaactactgaagcagcaagttatggttaagcaaatgcatgaatatcaaatgcaacaacaacttcaaaagcaacagctagaggccaggcagctcaattctttgaatagaaatgcagtcaatggaagttgcgcaagtgatacccaatcacgtatgattaatggcatccctcttcagaatgcgtctagtaactggtttcagccagatctcatgacaggaaatacaaactggatgcatcgcggcatctcaccagctgttcaaggttcatccagtgggctcatgattacccctgagcatgggcagtcgaacttaatggctcaacagtttggaccttccttgtacggtatgcctgttagtgggacaaatgcacctcaaaatgctttttcttccgttcagatgaacagattagctgcaccgcatggttctgcaaacaggagttactctctgaccaatcagccaacttcatttcttaaccaaggtgatgttcaggatagtcaaatgcaccctcgatccacataccaggagaaagcgttgttctcccagacatcagtgccagattcaaataataggcccaattttgaaaatttccagcaagatgattcccgtgagaggaacatttcagcgcaggataaattttgtcagatggaggattctggtccagcagaaaaatcatttatgaaagtgcctgaaaatatgaatgcattgcagaagtcgtcagcattagatcctactgaagaaaagattttgtttggttctgatgacaatttgtgggatgcatttggaagcagcactgatatgagcttgcaaggaaatcttatgtccagtaattctgacctattcgatgcatgcccctctttgcaaagtgggagttggagtgcccttatgcaatctgctgtagcagaaacaaccagcgatgacgccggtgtacatggatgggttaacagcaatactgtcccacatgcgaatttgcacactgatagtagagcccaggatttgggtgcaaaggcttcaaatccactaagtgagagattccacagtgattccactggggcagctgttcaacatttgcctgacaaggtaaataaagtttcagatcatggcctgtttgagaagcctatggctcaacttagtcaaatggctggtaatataattcattcttcaagtattgatgaacagaataatttgtgttctattcgacagaatgagggcattgaagatagatttggtatttggaaggctgcttccaatccaaatgtagctgctctgattgaacagaagaatcatttcacacaaaatccacaaagggcaagctatggatttggaatagccagtgcaggaaacgattctagtgcttctcgggatgtccagggcaatatccaacagcatttggataataactctgtggagaaggctatccctcaactgaaatcgagagacggcagtcagattcttgagtcatatgcgaggaataatgctggaacaaatgaaatggtaaatgcccgcgatttttctatgttgcctggtggaaaagagacacaatctggtcatgtcggtagtaggccctcgacaagtcgcaaatttcagtatcatcccatgggtaatattgatgtcactaatgaatcttgtcaagaaaaagtttctcatttgccaaccacattggagcaggttcctgtcggaaaccaagggtattttgggcaatcaaagtttcttggtcagtcggctatgaacatgccaattgacagggtaaatgtttccttagattttgaacatgtatttttaaaaatctgaatcccaatgaatattcttttggcttctccatggtagggacatgtctcacaaaacgacttgaattgcacaaatgaggcttttaatggcatgggttcagaaaactcacctagtacatctgcttcagctgacagaaatgttgataggtgtaatcaagtgaagagcgcttcgtcaaggtacttgttctttaatatgtgtgcttaaactattctctctttgaatgcgtttgtgaagttatttagctagtgtggccttttatagatttgtttttcaagtaactgacagagttaccaaactatgtaactattaaactatatgttctcatcacttttcatcgatatgtaattctgactgtggtcgttacgtagctcatattccctaattggttgcattcgtgctctccaatagcctttctgaatctttttcctgtgcagacaaactatgcttgagcttcttcacaaggtggaccagtcaccagataattcctcggaaacaaatgtttctgggattcctgaagcaaatgcctctgctgaatatggtggtcaatttcggcataatcagtcatctgcttctcaggggtttaatctacagttggcacctccatcccagctagctccctcacctgataacgtgcagttttctcggaattctttgcagccattgaattcatttcatactggccctgaaaaaggaggaacaagtcagtctaggtttgctccatgggcatctaatcaatcttatcagcaatccactcatcaaggaccatttcctggaatcttaggaggatccaacatgacctctggtttcccttattccagagggtatcaccaaaatcaacagatggctgttgctacccgacaatcagctgctaacaattcagtcgattcatcttctgagttgtctacccctcaagtgaaagaaagagatgaaagtagtgactttgatcaacgtatgctgtctgcttctcagcctctggtggcatccagctcgcctcagcagagttcctcttctggtatgatgtctgactcaccatccggtatttcagctccgcaacatcagttttggaaccagccatctaagcctcagccagttattttacgcccgcatccattgcccagcaacaacatggcagctagcttctcaaggcaggagaagacaaaccaattgtcctcccaaaatggtgacatgtcattaagtgggagggacatggtgaatatgcatgggttacagagtaaagatatgggtgcaaaacgaacatctaatgttgcttcaatgttctccaaaatggtgcagagcaatcatcaatcctttgatcgctctcttccttcaaacaacgttccaaaggatagcttacatcacgaggaacaaatggttggaagtggggagggcgatacatccaaggtgactgttgaaaatggtgattttgatcctcaagaggtagctcacaaaggggaacaacaatcaccttcaagatctgatggtttagttagaggtgggttaaataacaaggagtcagcgaatcacttgccgcatttaggccatactgtttctcagagtttctcctctaaaaatcatgcagcctcggttagagcagatcatcaacaaattagtcctcagatggctccatcctggtatagtcaatatggaactttcaagaatggactggtgcagcccatgaatgatacagggagatttacccccttgaaaataggagaacaatcgtctaatgttgagagttcggttgatggtacacatactgttcaatcatgcaagcagtgtcttatggagcaaatgtcgggctccgcaccaggagttgagactccctcatccgattcattgcttcatggtgctactgacaagcttctgaaggttgataaaccgaagaagcgcaaaactgccacatcagaacttcaatcttggaataaagaagtcatgcaggattcccaaaggctcaagacgctcaggtgtgtggcttatgcacactaatattcctaaaacaaatttcatatccgttaccgtattaaactttatatttttacagcgaggccgagattaactgggccagggaaactaatcgatttgctgaaaaagtgagtatcctcagtacatgttttctctatgctctttgtacaatgttgttgaatacgctgatggcttatgttctcacaggtggaatttgagactttacttgaggatagcccaccaattagatcaaagagaaggcttatacatacaacacaactcatgcaacaactatttagcccacctccggctagggtgatatctttggttgctagctcaaattatgatgttgttgcatatactgctggaagagctgcactaggagatgcatgtagctccagtagtaccgacaggagtgagggcttttcgcccccaaacaactcaaacccgtaaggatactttctgtttatctaagtgttggagcttttctagagtttgtggttctctattgacatgaagcgacccactcttgtgtaggttgtctgagagaacggaaaatgaaaaaatcagtgaccagtacatctccaaagctgctgaagatttcattagtagaacacggaaactggagactgactttgcagggtaaaaacctagctctctattataatcgattccagtttgaatggctactcatttgggctggttgatctcatgaacatctctggtcattcttgcaggctagaaaatggaactacaattccagacttgagagtcgaagtccaggatctagagaagtttgcagtgatcaatcgttttgcgaagttccacccgccatcttcatctatgaaccggaccgtgaattcacttaagttaaacctacaaagatatgttaccatagctccaatgcctcagaatattccagacagggtacaatgtctctctctctaactattcatggatccatataattcactttttggccaatcttccccattctttgctttcatatctatttccccaaatctttctatttttgggtgggtatgagttagttggtcggaatcctgagtatagtaaaggcctccgttgtcaaaaagcgggagatcctctactaaatatgtagcattactgtatgcatcatcagaaacattgtaagttaaatccatttgtatactttagtaaagaaatatcgctcagtacagtgccccagtaagaaatccagtaaacaagctaaaatatagcagtaagtggcaatttttgtttacacagctacggttctaaccacctctctctctctcaagtccttgagtacttttgtagaatcagttgtgctttgtataaaagtcactgaaacttaaccagaagctgaacttgtgaacacctttcgagatttagaaggtgactctaatttcttccccaaccaaagctaatatctcatccaccctgtaacaaatacgcaacaccaggttaatcagaatacactttgttcccagaattcgggaatgacgatggtgaaaatattttacctatgagtgtcgatgtttacttctgcaagccaagttgtcaagtaaatctgtggaacgagaagaattgaagttttacgatataatgctaacagacaattttacttgtgcggaatcaaaatccacatacctgcaaaatttctgcggttggctggttggtatgtgatatagaagaactaccgatattataatctttcactctggggagaactggcttagctacttccatagaatataaagaacatttggtgagatgatcaaattctccatggtaaagctcatctgaccaactgttgttgatgggttgaggaacttcagtgcttaaagagatcagttccattatgagcaatctctgttaatttccccgaaaaaaaagatcagaagctgatctagagtttaagatacatgcaggagttaggagtagacaatacctttagcattacttcgcgtttgaacatctccacaagctcctcagccatcttctctgggatcatttcaacatggcaagtaccaaactttagagacaacatggtaagtagttaataactattgaacattggttttatgggtctcttaccaaatgcagagacattccaaaaattaaacacaggaatgccaccgcaatctccagcatcatttgaatcttccttagtgccagagaactgtataagtgacccggtactcagcttcgtgtaacatctcagagatctgcttgcatttaccatctcaacaacaacagctacctgcatttttctacagttttgtttatagattccaaattacaccagaataaaatttctcaaattcacaagattttagcattgtcacacttaccatttccttgtacgaagataaaagcttgattcgataggaactctgaacataataagacttaatatgagaattaaaaacagagagaatgaatagaagacaaaaaatagatttgaaatgcaaattttcacctgttgcgtaaacagcttcttcaaagctttcttgtcgatatcaaacatgtcactcaacacaccaagctccatcattggcatatacctattgccatggaaacacaaaagcagtaagaatcaccagggacatcaaagtgaaacagagtaagttgcaaatacaaattaagaaaattccacacttttgtgacagatacgaattgactagcaaagtagcgtgagatcttcccgcagaacaagcgacgatccactgttgccgacaattcgacaggttagaccactggttcctaagattccgctgagcagctggtctccatagcctcatcgatgacgaaaaactccccggagatggagatgaagaagccagcgatcgcgaagaagacgccggagatggagaagcaggcggcggaaactgcgagatgctcatcgaatacaaaacgagttttttgagcttgagtcacactcctaaactctgttacgtcgccgggaattgaacggccggcgatagtttgttttctatttccacccagcttagggctttatgaagaaatacgaaaaggttacaattgtaattttcataaacttctgaacttgtttaaattaattttaattgtaattagcaattatgtctatataatagatcaatagaatctctaagaagaattacagtagatcagatatatatttaccaatcggagcttcagagagatccaaagagagagattgaggatgtctcacagtcacgggaacgcttcgtcggtgaacgatccacggcagccttcggcggcaaagccttacattccacggcctgtagcgccggaggatcttcccgttgactactccggattcatcgccgttatcctcggcgtctccggcgttatgttcagggtaaattttcatttctcctcttctgatcgttgctctgttagaaatcaattcagtcgtagaaactagtactccggttggtgacttagatcgtcggattttataagttgaactcaccgatttagcaacatcaatctctagctagttcgtgatgttttgagactggatctttccaatactcgctagtgattttgaatgttgaattgatttaaagcttacttccccaaataggcagattcatgactgtgtgattgcatcatattataagactagagaaaatgttagatcttgttgaaatttgagctcgagagattgagatagtcagtgtgaaagtggattaaaagatcatcatatgtggagtgagaaattcatcctctttatttatgtggcttgtgtatctctcagtacaagatatgctcgtggcttgcaattatattctgtgcacaatctctggccaacatgaggaacttggaaaatgatttaaagcagatctccatggctatgatgtatgttccttttcactcattctttcttcttatttttaagttaagagtgccaaaagcattgaatagtgaaatgaacctctctattcctgttaaaatccaacatggatcagatttaagctgattgtttctactcaataaattgttgactctgaatctggttttcttgtattaaaaacaggtttgctataatgggattggttacaaactacttagggcctaacagacccgcgacaaagaaataatcctcatgtcttaagagtagtatgcttttttttgataaaccttgtatggctcttgtttccgcaccagagattgctagtggtttgtctttgtgttttcgactctctaatccttgagtagcaaactagaaccttgagctcttgctcatttgtggagttcaaagacttttcagtccagatgcaaaaaatgtgaaatccgactttttctcttttgatctccctgatttttggaccctgcttcttacaacactgttacgcggactaacatcaaaaacactcctcaaaccaaacaaactcctcaatcattgtcactagttcgaatgtctctagtttcttgtttcaatcttttatatgaaactaatcaagaacaagagatttcatgttggcttatgtttttaacttccttatcaaatatttaaatcttctttgcggaataatacatatggaataatgatgtcgacttggcttccggaggtaaaatattgacactcattaaattagagaccttgtaatactctgaagcaaaggaagttaagtttcaatgactgattctaaacagcactcaacgacttgatagagagagttcttcagaatcttcgctgagtaaaaacaaaattagattcactggagttgttaccttgtggaatttctgttatggggcaaattctttactaagtatacaaatggatttgacatccaatattcgtgattaagcatacagtaatgctacatgtctactacgaaatctccggccttctgacgatggaggccttcactgttctcagaagtccgaccaactaactcttacccacccataaacacaaacattttcgggaggattggccaaaaagttaattatatggatctatcaatagttagaaagagagacattgtaccctatctggaatatgccgaggcactggagctacggtaacatatctctgtgggtttaacctaagtgaactcacggaccggtccatagatgaggacgattggtggaaacttgcaaaacgattgatcactgcaaacctctctagatcctggacttcgactctcaagtctgtaattgtagttcctttttctagtctgcaagaagaaccagattttcatgagatcaaactagcccaactgtgaaaccatttcaaactggaatcaaatacaagaagagagatctacagtttttaccctgcaaagtcagtctctagtttctttgttctactaatgaaatcttcagctgctttggagatgtattggtcactcattttttcagtttccgttctctcagacaacctacacaagagtggatccattcgagtcaatacgaaacctcgaagtctagacatttcccagtatttcagggataaacagaagatatccttacgggtttaaattgttctgaagcaaaaagccctcaatcctgtcagtagaagtggagctacatgcatctcctagcgcagctctagcagcagaatatgccacaaactcatagctagtaactaaagatttcaccctaccaggaaggggacgaaacagttgttgcatgagttgtgttgtatatataagccttctctttgatctgattggtgggccatcctcaagtaaagtcgcaaattccacctgtgagaacataaagccatcagcgtattcaacaacattgtacaaagagaccctgcaagaaaatgtgtaatgaggaaactcactttttcagcaaatcgattagttgctctggcccaatcaacctcggcctcactgtaaagaatacagaaaggttaaaatagtaatggatatgaaatcttttctaacaatagaactcataagccacacacccgagagtcttaagcctctggggacgttgcataacttctttactccaagataaaagttctgatgtgacgtttttgcgcttctttggtttataaacctttagaagttggtcagtagcaccacaaggcaatgaggcagatgagagagtctccactcctggtgtggagcctgatatttgctgcatatgaacaatgtaaccaggatccgcagtatttaattgctttgacgattgaacagaatgtaaaccatcatcagaattcccaaggttagaatatcgttctcctatcttcaagagagtgaatctccctgtatcattcacgggttgcaccagtccgttcttaaaagcctcatattgactaaacctggatggagctatttgaggactgatttgttgatgatctgatccagccgagactgcatgattcttgttgaagaaactctgagaaatagttgggccaaactgcagcatgcaattcgctgaatctttgtgattcaatccatccctaattaaaccatcagatcttgaaggtgattgtgtttctttcccaccaggcaacacagacaaatcacgggcattcacttgagtaagagactctggtgagaattttgatcgaaaactgtcacttgaattttcctttcctgagttccccatttcatttgattcagtcatgactttactaacgttattactcgcatatgactcaagaatctgactgctgtccccagaattcagttgatgaatagctttctccacagagttattatccaaatgatgttggatattttgctggatatccctcgaagctctagaatcatctcctgcaccatagcttgccctttgcatttgtagattttgagtaaaatgattcttccgttccatcagagcagctgagtttggattggaagcacccctccagttaccaagtctatcatcaatgtcctcattctttccaatagaacacgaattattctgcacatcaataccagaacttaaagattgaaacatatttccagccatttgactctgcggagtcattggcttctccaacaggccatgatctgaaacaatatttcctttgtcttgcaaatgttgaacagttgaacgggttgaatcagtatggccaccagaaacctgggccctattaccaatacgagaatctggatgtggggcattaatgttgttagcccatacagattgctgtttactaccccattcatgtacacctgcgtcatcactggctgtttctgctacagcagattgcataagagcactccaactcccactttgcaaagaggggcatgcatcaaaaaggtcagaactactggacataagatttcctgtcaagctcatatcagtactgtttccaaatgcctcccacaaattgtcatccgaaccaaacaaaatcttttcctctgttggatctaatgttgtcgacttctgcaatgtatttatattttcaggcactttcataaatgatttttcagatagaccagaaccatccatctgaccaaattcttcctgccctgaaatattctgctgaccagaattatcttgctgaaaactttcaaaattaggcctatcatttgaacctggaactgatatatgggagtacagattctcctggtatgtggatctagggagcatatgactgtcactttgattcagaaatgatgttggctgattagtgagagaggaactcatgtttgcagaaccatgctgtgcagctaacattttcatctgaaaggaagaaaaggcattttgaggagcatctgtcccaccaacaggcataccgtacaaggaagtttcaaattgttgtgccattaagtttgcatgtccatgctcaggggtaatcacgagcccactggatgaactttgaacaattggcgagatgccgcgatgcatccagtttgtatttcctgtcataagatctggttgcaaccaattattagacgcatcctgtagagggacaccactaatcgaaggatgtgattggttatcacttgagagacttccattgactgcgtttgaatgcaaagaattgagctgcctggcttctagctgttgcttttgaagttgttgttgaatttgatattcatgcatttgcttagccatagcgtgttgctttagtagttgcatatcattgaatgtcatctgctgccttggaaaaggttggatcatgccagggagctgattgtttaattgttgttgaccaccaaagaaatcatagttaaccggagattctcccatatcaaacctcataggagttttatgacggtctagagtgaatccactccctgataacctatccctactagattctacatccactcccacaaaacttccctcatttggagatgcctgcaacataaggtttccatgcatgtaaccagttgtggattgctggtgttctcgcaatacacttctggagtaatcggacctcattggctgctgggcaaaatttaaaccatgctgtgaatttgaagattgtcctctctcaggatcaactggaataagcaaaaaggctatgttcaaactcggaaaaccaaagcataatccagcatactaggctctaagctatgaatggaacataaatgatatatgtagagcataagttggggaagccccagtcacaaaggaaacaaaatgcataccggattgttgagtgctatacgtcttcagattggcaataagtgatgggtcaatctgcctctggttgctgactagaccatttctaaaaccggaccagcttccatctcctgcctgaggctgatggctgtcttgggataggccctcctgtccaaagaaattgtggatcctctctccatattcgtttccaggcatagattcagctccgataaattattataaatatctggacctcgagaagaaacagaaaagagttcaatattgtctctccttcgatcttatattcgaatgtaaaaaaaacaaaaaggaacatttttaacacctttttcccccgagaattcatgagctacttccaactaagatgctccgaaatccgaatgctcaagattttcctgttaaacaagcaaagcagatactgtacatttaaagttgaacacacaaagtgaaacaaaaacagtagatactattggttcacaagaaagctaaaacccctacgtctaagaaacactcagacaaagtctacgctccaatcagcttctgaaactatatcacactcaatatccacctgatctagtaaactcgagagctcatttgcagtaaatgaaatcaattaacaaaaaataccagctaaaattcccatttctccgcaataaaccagctgaaattaagctcatatattagaaatttacagaatttattggaaatctcgtgaacctacttgagatcaaaactgctgcaatacaatttcaccccaaatcgaagctctggttaaaatgaacattaccataacctagaattcaaccacacaggagaacgttccagactttaatcctaccgacaggctccaccaattggggaatttaaagaaaaaaaagatagggtttcaacaatgggaaagagagatgtgaacttacacttgtataacgtttggccgtaaaacaactggaaatttgcttctccgacctcaatttctaagaacaagttagggttttttctgaatccaagaattaacgaaatcaggggaagagagagataaagtgatcgaaactccaggttcgggtccgagaggttcgggtccacagcagatggctcgtagatccaaaactctctagtagagacggaggatttagatgagagttgttgtagtgtgggccagtgataagacaattataactaaacaaatacgacgccgtatcgatacgtttcaccatacgattaaattgcaataattcatgaatcattgttatttagatagtcagattaagatatggattcacattttttcaacgaattcatgttttgcatttcaatattatcttctttacataaactagggttgggcatatgcataatataatgcattacaaaagtcagatacgctttgttaaccgaaagtaggataccagaggtgatgatgtaatactatcaggccatcagggtttttgtactaaacaacttttctttactaaagtactgtttacagatgggtttaacttacaatgttatggtgatgcatacgataatgctacatatttagaggaaaatctccggcttttcaacaaatggaggccttcactgatctcagggttccgaccaactaactcgtgcccacccaaaaaaaaaatgaaagatttggggcaagagattatatgaaagcaatgaatggggaagattggccaaaaactgaattctatggggattcatcattggttagagcgagagacattgtaccctgtctggaatattctgaggcattggagctaccgtaacatatctttgtgggtttatcctaactgaattcaaggtcctgtccatagatggtgggtggaatttcgcaaaacgattgatcactgcaaacttctctagatcctggacttcgactctcaagtctggaattgtagttccattttctagcctgcaagaagaaccagagatgttcatgaatgaggtcaaaccagcacagatgagtggccatgccaaaatggaatcagttagctacggttaataccttgcaaagtcagtctctagtttccgtgttctactaatgaaatcttcagctgctttggagatgtattggtcactgattttttcagttttcgttctctcagacaacctacacaagagtgcgtctcttcgtgtcaatagagaaccacaaactctagaaaatctacaacacttcaaggataaactgaaaatatccttacgggtttgaaatgttggggggccaaaagccctcactcctgtcggtactactggagctacatgcatctcctagtgcacctcttgcggcagtatatgcaacaaactcataatttgagctagcaaccaaagatatcaccctagccggaggcgggctacatagttgttgcatgagttgtgttgtatatacaagccttctctttgatttaattggtgggctatcctcaagtaaagtctcaaattccacctgggagaacaaaagccatcaacgtattaacaagattgtacaaagagactcgtgagaaaacatgtaatgaggaaacttactttttcagcaaatcgattggttgctctggcccaatcaacttcggcctcactgaaaataatgtagaaagttaattacggtaaaggatattgaaagaaaaaaagggactattagtgctaatgccacatacccgagagtcttaagcctctggtgcccctgcatgacttctttattccaaggtataagttctgatgtggcggttttgcgcttctttggtttattaaccttcagaagttgttcggttgcaccatgaggcaatgactcagatgagggaatctctgctcctagtgtggagcctgacatttgctgcattttaaagtgctgtgacaattgaacagagtgtgtgccatcaactgaacttccaacattagacgattgttctcctatctttaagggggtgaatctcccagtatcattcacgggttgcaccagtccattcttaaaagtcccatattgactataccaggatggggccatctgaggactgatttgttgatgatctgctccaaccgaggctgaatgattcttagtcgagaaactctgagttacattttggccaaaatacggcatgtggttcactgattccctgtgattcaatccatctctaactaaactatcagattttgaaggtgactgttgctcccctttgggagctaccttttgaggatcaatagcactattctcaactctcttcacagtcatcttgggtgcatcgccctccccacttccagccatttgttcatcatgacgtaagctatcctttggaaagttgtttgaaggaagagagcgaccaaaggattgattattgctctgcaccattttggagaacattgaagcaacattagatgtttgttttgcacccatatctttactctgtaactcatgcatattcactatgtccctcccacttaatgacacgtctccattttgggaggataattgatttgtcttctcctgccttgagaagctaactgccatgttgttgccgggcgatggatgcggccgtaaaatatctgactgaggcaagggctggttccaaaaccgaagttgtggtgctgaaataccggctggtgggtcagacatcataccagaagaggaattctgctgaggcgagctggatgccaccagaggctgagaagcagacagcatacgaaatccttcagctgaatgtccacgttgatcaaagtcactactttcatctctttctttcactgcaggggtagacaactcagaagatgaattgactgaattaatagcagctgattgtcgggtaccaacagccatctgttgattttggtgataccctctggaataagggaaaccagaagtcatgttggatccccctaggattccaggaaatggtccttgatgagtggattgatgaaaagattgattagatccccacggagcaaacctggactgacttgttcctcctttttcagggccagtatgaaatgaattcaatggctgcaaagaattccgaaaaaactgcatgttatcaggtgagggagctagttgagatggaggtgccaactgtagattaaacccctgcgaagcagatgcctgattatgccggaattgaccaccatagtctgcaaaggcatttgcttcatggatcccagtaacatttgtttccgaggaattttccggcgacgggtccaccttgtgaagaagctcaagcctgcacaggaaatttctttcagaaagacaattgcaaagcacaaattacaaatattcgtagcaattaccacgagtgagaaattacatctcaatgagaaaatttgagttttaggtaactttgccagttgattacacctatcaacactaaataaattaagttacaaatgaacagtaccttgacgaagcactattcacttgattacacctatcaacactcctgtcggctgacgcagaagtactcggtgaattttctggacccatgcctttaaaagccttatttgtgcgatttaagtcattttgtgaaacatgtccctatcataatgaaagccaaaataatgttcagatggattcaaatttctaaaccacaatgaaaaccaaaggataaaatttaccttgtcagttagagtgttcatagcaggctgacctagagactgtgactgcccaaaacgagaaacttttcctcgacaaggttcatcagtgacatcaatattacccatggggtgatactgaaatttgcgaggtattgacggcctaacaccaacatgaccagattgtgtttctttcccaccaggtaacgtagacaaatcacgggtatttaccatttcatttgatccagcattattactcgaatatgactcaagaatctgactgccgtctctagaattcagatgagggatagccttctccaaagagttattatccaaatgcctagaatcgtttcctgcaccagcaatgccaaatccatagcttgtcctttgcattgaaggattttgttccttcagagcaactaaatttggatttgacgcagccttccagataccaagtctatcctcaacaccctcattctttctaatagaacacgaattgttctgcccatcgacaccagaacttgaagaatggaaaatattttcagccattagattgcgttgagccattgaattttccagcaggccattatctgcaacactatttcctctgtcttgcaaatgttgaacagctgtccgagtagaatcactgtggactctcccgcttagtgtatttgaagtctttgcacccaaatcctgggccatattaccacgatgaaaatttgcatgtgggccagtactgttattagcccattcatgtacgcctgcgtcatcactggatgtttctgctacagcagattgcataagagcactccaactcccactttgcaaagaggggcatccatcaaaaaggtcagaactactggacataaggtttcctgtcaagctcatatcagtgctgtttccaaatgcctcccacaaattgtcatccgaaccaaacaaaatcttttcctctgttggatctaatgctgttgacttctgcaatgcatttatattttcaggcgctttaataaatgattgttctgatggaccagaaccctccatctgaccaaatttcgcctggactgaaatgttcctttcacgggaatcatcttcctgtaaactttcaaaattgggcatactatttgaacttggaactgatgtctgggagaacaataatttctccgggtatgtggatctagggagcatatgactatcctgtacatcgccttgattcagaaatgaagtaggttgattagtgacagaggaagtcctgtttgcagaaccatgctgtgcagctaatctgttcatctggctggaagaaaaggcattgtgaggtgcatttgtcccactaacaggcataccgtacaaggaaggttcaaattgttgagccattaagttcgcctgcccatggtcaggggtaatcatgagcccactggatgaaccttgaacagctggcgagatgccgcgatgcatccagtttgtatttcctgtcatgagatctggctgcaaccagttactagacgcattctgaagagggatgccattaatcatatgtgattggttatcacttacgcaacttccattgactgcatttctattcaaagaattgagctgccttgcctctagccgttgcttttgaagttgttgttgcatttgatattcatgcatttgcttaaccataacttgctgcttcagtagttgcatatcattgaatgacacctgctgccttggcaaaggctggagcatgccagggagctgtgtgtttgattgttgttgaccaccaaagaaatcataattaactggagattctcccatttcaaacctcgtaggaattttatgaagatctggagtgaatcctctctctgacaacttatccctactcgactctacatccattcccaaaacatttgcctcattcggcatcgtctgcaacccaagattcccatgcatgtaaccatttgtgggttgctggggttcttgtaatacacttctggagtactccgacctcataggctgctgagtaaaatttaaaccatgctgtgaatttgaagattgccctctttcaggatcaactgaaataagcaaaaaaatctatgtttaaaaagcaagcaaccagcatactaagctctaactcttaagccatgaatgaaagatatatgtagcgcataagttgggaattccccgtcataaggagacaaaatccataccaggttgttgtgttctataactcttcagatcggcagtaagggatgggtctatctgcctctggttgccgactagaccattactaaaactggaccaacttccgtcaacaacctgagactgatgctggtcttgggataggccctcctgtccaaagaaattgtgggtcctctctccaaattcgtttccaggcatagattcagcttctagaaattatttttaaatatctggacctcgaaaagaaacgaaaaatatttcaatcttgtgtctcctttgatctaaaacaatcgttgttttctgcaaattaggaaacaaaagtgagtcaaatgaaaatcatcggacaagatcctcaaccctgattcagtttaagacaagaaagtttaaatcttcacgcaggaaaaccctcagaccaacgaagcgagacaacgccgaccaggtgataaggaaagctgaatcagcattgtttccttaaatgaaaaccgtacattgacatccaaggtccactaagccaaagcctaaactccaactcaacttctgaaactataacaaactcaaatgcacctaatccagtaatctcgagtattcatttgcagtaaatatcatcaagatccttatacaaaaaataaacagtggaactctcgcatttcacagctataaacactctatggcagctgaaaaataagctaatttcgaccaatttctagactttatcggaaatctcgtgaacctactctgagatcaaaattgccgcaacacaatttcacccaaaatcgaagctctggctaacacgaacattaccataacctagaattcaacctcaaacgagaacctatcttacttcaattttaccaacacgctccaaagaattgggaattcacacatcattttcctattgggacattacacaaaactagggtttctactaagagtaagagagatgtatgcagacttacacttgttctgtcgcgtcgacaacaattggaaagcctgacaagctttcttctccgacctcaatttctaagaataagttagggttttcgaatccgataattaacgaaaccaggagaagagagaaagagagataagtgatcgaagggagtacgaaaattttcaacggcggacgcaggagcaaatccgaggctcgggtccggaagataaatttcaggctcgggtacgaaggagatgggtcgtagatcagaactctctttcaaagacagaaggttagactagttggttttggggcaagtgacggaccatttaattaactagggaaccacctaagatgttaaaacagcatcgtattgatgtgtttccacatgacaatcttttcattacattattaaaaaaggtagatccgatttttataatcttttcataagactttcctagtcaaattatagatactctttgactaactttaagtaagattatggcatcttttataacttactgccacattatcacatacttttgaattgttataagggaaatttgtctttcttggaaactaataaaccgaatattgttgctgataaactgtaaatttcaggtcaacactctcttatcatagtataatataaatactttttaatataaattagaatataactactttcatccaaaaaaaactgaaaagtagaatataattactttcatccgaaagattttgctttataagcctaattgcaaccgtttctgtttcttgggtttataacggtcctgctcggctgctcattcatcttccagcgtttgaagtatcaagtatggagagagtttcccttaaactttgtattcttttggtggtttacgcataatgagatatctcatattgttttcaacatcgtttgttcatgagtgacgagtcatgacattagttgcaacagtttttttatgaacgttttgtatattttctataagaaggtgaaatttatttacatgcaaaagtatccgacagtcacattttgatatcttagcactatgtttatttattttgagcgaaaagtatttttacaagatttgcttggttcgatttccatgatatagatttggaactttagtttaaccgacaattggttgttaatagtgcttgttttattcttctacatataaccatgttcgaggtctacaaaaggcatcgagaaacaacaattttcaattgtcaaatgagaataaggttcaggatcatagggtttcgtggttattacatagggtttatatgatagcttagacgtttcgtggatgatgatgacgatcaagcttcgtatataagtctccatgatatgagaaagaactcgtctgatattattaaaaatcttcgtaaatattcgattatgctaaaagaaatttcatatgaaccaactggtaactgtcggtcctaaaaaaaggctatctcgacgtacattttttggctccttggtaggtagttttgctcaaacaattgacatctttgtggtaaatcttgagcctcattagtttgtgttttgacttttgtggtagctttctttaacctgatattttgtcttcccctttgtacgtaatcaagttaattgaaatgaactgcagagttttgagaattacgaattcttgaatcattgaatgacgttgtttccgtgttgttcaatattgatagtcgttgtctatagcagtaaatccagaggtttgagtttctataaaactaaaatttatgtgatttgcctaaaacctgaaaccgaaccgaaaaagaaaaccaaactttaccttcttgttctggtttaacccatttacttacggtacctcgacaaatatggcaagtcattcttcttgtttttctctgacgtattagtttgattccacatcttcccacatgcaaattattttaatttttagagatacttttaatttgtaataggaattaatatattgacatgtcacatgatacatttattagtccatgaagatatttccatctcctagtatactgtcatcattggtcatctttacctaaccatcctattactcaactttcaaactcatctgcgagcctcctgcttacacgaagctgcaagcctgcaattcatatatattatccttgctattttgatattttcttaagacaatttaattacattaatatatatatgcatatttattgtttttgtcagctccttgagtacctttttgggggccctcttttcgttatggaaaacaaaacaaaaaagttgtttatgatatcaaatgcggtgtatagtccacaaacgtggcctacttacccaaatcccatccgtcgccatctcttgcttttcaatatataattacgattggaactgtgacaaatatgcggttctctcctttggcatatatgctgtgtttacatgcatttattttttacatgcatatttatcatataaatccgggatagatttcgaacgacattgagattaaccttcgagagttgttaatattcaaaagtttgatattcttttacatgcatgatgttgcttaaatctgatagttaataatacagggcccatagttgacagttatgtgctaggttgaataattgccagttggcagttgccactttatgtttatgtacgtgtacatcatgcagttcaaaaccttcgagaaaaataactgtgcgtaattaaaggacaaaactaataaagaacatacaaactataataagctaaaattctggaacaagtataaacttaccaaaattgtattctactgaccataacatatcatccaacattatcaaccacatatcttacctaccattctcgagtttactagctaccacgattaacgaaaatatatggcccagattttccgaatgatcagctagtactacttgtcatttgtcaagtatagctgagtttctaaatggtgatttgtattataaaggattataattaattatataataattaaattactaatttagttgaagctgtaaagctcgcctaggttgtattgtaagtatccgatccttacgaaatttgcttaaactagattacactatattacataacggtacaagattcaaaaattattactttcaccaaacaatgtgcttgttggttggagtgaatttttgtgattaaaaagtttataatttctttgttgaaaaatcttatcataagattatttatgtttacgcttgtgaaatcatggaatttataccccttaattatttatatgcgtgttgacaaaataattggagtgtaaattttaatgattatctacgtacagtattattacaacaaaaaagcatatgtgattttggattaatcatgttatgtatatgtatgtatcttcacatatataatattataacttataagttttatttatttatttattacaacttataagatgttctaccttatgttagtgacttggcttaaccggaaaatgttcatactcaactcacgttctctagaagatagcgctacctttcacagcttatcattcaaatcttacgaacccaaaatctcacttaccagtcgactctctccctttcgcttgctactttttctacataaataaatgcaatgataaatttgtgcacacattcgtatgtttgaaacatggtaggatccacaatttatactttatagactcaaaatggaaaagaaacgtacattataaatttatctgcaatttgttttctcttgctaaactagactgtataataacctctgtatatgctattactcgattgtaaacgtaccccgcaagtcgcaagcaaggtaaataaagtataattatattttcacacacgaaactttaattattatttttatcacttgcagattaacagtaaaaaaaaaaaaaaattgtgactttaacggcgacaaaaactactgatctttctccaatatttaaataatataattaataaacgtcttttcatacttgtattttccgacccgagttctgaaagtgaaaacatatggtactagatattctcgatttgttttgtagccactagactctaaacagaaaaaagaagccaaaaggacaacgttaaaaaagagacactgttattaaaagttagaaaccaaacggtgaaaatccagctacatacataaaataaagccaaggtaccaaactaatgaactgtaacctcttttttcttttcttttttgttaaaggatttatgaactgtaacttagaatgcttggtttgtgggcagtgtaatatatgacacacatgcattttttttgtttgtcaaataggaagacttcttttttctttatcaacttccttattttcataaaacaaaacactgaaaaaagtacagatgttctcacgtacgtcacgtgtacatacatatatattagaccactatataataagatatgaagtgttaggtttaaatcaattaacgaatcccatccaaatgatgaaacagttaacaagaaatcaaaatagtttattagggttacaatgattttatacttttaagaaatcttagaacctatcacttacaaatgagtaaatgaccattactcctcgagaatctaaggcgcttaaggaagcattgcgaatcgggtgtgaaaaagatctatttttgaattatttcacacaatttcttaatgtcaattttcgatgctcccatattctccacggtttaaagcaagattggtgggaaagggatattctcgcatcgattacaatgaaatatgggttgaaaaaaaataaaaaaattactcaatgttgcaccaaaaaccagaaaactctaagttgcgctaataaaaaaaaaagttataaacccaacatcaaaccaaaaccgtactaaactgtcccatatgagatttagctttaaataaattagtacttctcataacgataactaaattaaatttccctagccaagacatacatatagttttgattgacaaaaaaaaaaaaactcctctatttatagcttgtgttttgtttcctcatttttcacttaccattcaaacccaacactatggcaactctatttctcacaatcctcctagccactgtcctcttcctcatcctccgtatcttctctcaccgtcgcaaccgcagccacaacaaccgtcttccaccggggccaaacccatggcccatcatcggaaacctccctcacatgggcactaagcctcatcgaaccctttccgccatggttactacttacggccctatcctccacctccgactagggttcgtagacgtcgtggtcgccgcttctaaatccgtggccgagcagttcttgaaaatacacgacgccaatttcgctagccgaccaccaaactcaggagctaaacacatggcatataactatcaagatcttgtctttgcaccttacggacaccgatggagactgttgagaaagattagttctgttcatctattttcagctaaagctctcgaagatttcaaacatgttcgacaggtaaaacaattataaacggtattctcattttctaacgctatagctcactggcctgtaatcatgtcatttcaatgttttgactttttctttatatatacataattataatttataattgggatttcaaaccctatctctcactatttcaagactagaccggattggaatttgaacttttgtaatgaatattagtatctgcacataaattttatgttaaagttgggttttcttaaagtgaatttatatattaaaaatatataaacgattgggttttactcaaatgaatttacataagagctaggtataagtgcaaatatgcaatactgtcattgtcgtggatgtataaaagtatgatctaactttgatgatgccatggaaaaattggaaagttcagatc

SEQ ID NO: 704 - DNA, 80970 bp, Arabidopsis thaliana
gatccagaatcctcgtgagggtattttgctactgatgaagaagaagatggatgagtaacaccctcttcgtgagatctctttggaacaccactcatcactcccaaattcaataacccagaaattcactgctgcaacagatagaattgcacttaattcatacacaacctagagcaaaacacagaatttgaatcaccagactaaacattgaatccctaaaatgaacacagagccgaagatttttttaaaaaggatatttcttttaccaattgaaactgaagcagagcacgaagaagcaaacccttttggattttgccgccgggaagtaataaatggcaaactggattcggacttttgcctctctctgagtttctctgatgagtctaatttattttccgttctccttggtttgctactttattttggacaaatgtttatttttcgcgttaatatttgcttcttgtcacagaccgtcgtgctcttacaagtctccacaatttaggttttatttattgccgttatgccctcatacttattcaatctctcactttttccataaaactttctattaattgaattgttcataggatatagattttgtcgtttttaattttttttatacagtacaataaaaagtcaacggaaaacagagctcattaaattcactgagacgaaataaaataataaataaataaatcgaaggaaggagtcatatcaccttggtatttatatatctcaagcgaccatgcatgatagtgaaatattcaagtttaaagacatgatgatgatgtcttgcacagttcaaacattagtacttgttccatggtttctagtagtatttgtactcgccggtggagaagactcatccgagacgacggcaatgtttccggcgatgtttgtgttcggagactctttggtggataacggaaacaataaccacttgaactcactggctaggtccaactatctcccttacggcatcgatttcgctggaaatcaaccaaccggtcgcttctctaacggcaaaactatcgtcgatttcattggtacatattttacatatcggtctctacatgcatttggttttgaaatcagtgcatgcataaatttaatttgcacaagagattcacccttttactttttttttttgttttgttaattttttagtttgttttgggttagcaattaattaattaacatgatcatggggatggatgtggatggttgcaggagagttgctagggctgccggagataccggcgtttatggacacggttgacggaggagtggatattctccatggtgtgaactatgcctcagctgccggaggaatcttagaggaaaccggtcgccatctggtacttcttcttttttttctttctaaatgtctatttttattgttcaaaacattttttggttatataggatatgtttctttttttttaccatgttagttcatatcaaaaactttgtttaacgaaattggtctaatcgattgcttatgttcatataaagaatccaagttcgaaatatccaaaactgaaaccgaaaattgaattgtactatgcttttttgttaataagcatacggttttcgatattgaaaattgaaagttatctttcgctaagtaaaaaaaataaaaaaataaaaaagtgaatttggggtgcataaagtccgccggaacagtcgtcctttaaccaatagaagtagccacatttgaatcacgggaggttatttaatgtcgagtgactttgatagggtgcatgaaaaacttttgcctacgagacatgagtatttaataaccccaaaaaaaagactataataaatggggttgcattcttgcatgcatgcatggatgaagggagagagatttagcatgggaagacaagtggagaacttcgagaagacattaatggagataagtaggagcatgaggaaagagtcagtgaaggaatatatggcaaagtcattggtggtggtgtcattgggtaacaatgactacattaacaattatctgaaaccaaggctattcctctcaagctctatttacgaccctacttctttcgccgacctccttctctccaacttcaccactcatctccttgtaagtcttatttacgaatcactatcagtaatatcattaaccatatatgtgtgtgtgtgtgaagtcatcgagtgcctaaaatccgtatagataattacgaatttttattttataacaataatactcatgtcaaactaaaattcgagtgttgtacaaaattttgttaggaattgtatggaaaggggtttaggaaatttgtaatagccggtgtgggtccattgggttgcataccagaccaactagccgcccaagcggctctgccaggtgaatgtgtcgaggctgtaaacgagatggctgaacttttcaacaaccgtcttgtatcgctggtggatcgtctcaattccgataacaaaaccgctagtgaagccatctttgtttacggtaatacctatggagccgccgtggatattctcaccaacccatttaattacggttaagtatctaacttatcccttgttttacattttttttaatcaaatgtttcgttttagcttagttgagagcatttttaacttgaaatggtttgattttgttttcttttattgtttgtaggattcgaagtgacggatagagggtgttgtggagtagggagaaatagaggagaaataacgtgtctgccattagcggtaccatgcgctttcagagaccgacatgtgttctgggatgcatttcatccaacacaagcttttaatctcataattgctctcagagcctttaatggttccaaatccgattgttaccccattaatctttctcaactttctcgtctctaaaccctcaacaaatccttctctttttgtttatgtatttttgttactttaattttgtagacttgtagtagtactattgcatatttcttcgcattatctttttggttgtgatttggttccaatttgaatgtggacctctaatgattacattatcgttaactgcaaacatatacgtagaaaatgagtcgatcgagaaattgtagaatctttttctattattcttggtttcacaaattaatggtagagactttcatgcatagtgatgacataagatgttgcatattgatatggcggattgttcatagtttttttttgtttttttttatgacataaaatgttgcatgttggcatgttgcggactaattcatagattattattagtccatagatgtattatgtactgtatatacatcatttctcttttttgttacatgtttgaacttaaacaaaaataagtaactaactataggtttaaaaggcccaattaggaaattagacaggcccaaatataattattgaagcccaaaatgaggctagcaattcgaacaaaaaagataagcttaggaaattgtaccaatgtctcgcaatcggcaaatcatcatccccgacgacgtgatggaaacagaagcggtggttaataccgtcgccggcgtcgactgtttcgtctcactccctcgtcaattactacacgcgcttcaatccaccagctcctctcctctccctccgcttctccctgtcgagctacgctccggtgaccgccgttggtcagttgcttggtccggctctagctcctcctcttctgcgatcgaggtttctatccctctctatatttgatccagtttattcaaatccagtaatcgactactttggttttggaattctgattactcttacattcccctgtttttgattttgattcttctaataagatcgctcgagtgtttgcggaaagcatttcgttgccggatggtacagttgttaaagttcgtgttcttcctaatgtgcccaaggctactttagtaacagtcgaaccagagactgaagatgactgggaagttcttgagctcaatgctgaacttgccgaggcagctatacttagtcaggttagtgcctctagtttgtgacattggcctaatcagtttgcgaatgttctgctgatcgaaacatgtgtgttcaggtgaggatactacatgagaccatgaaattccctttgtggttgcatgaccgaactgtgataagattttctgtggtttcaacatttccatcaaaaggggtgggtaagaccatctttaatccgcacttgtgttgtattcccgttgtctataccatacttttcaagtttcttcttcttattcttcaacttatgttccctgggatacaacaaggggttaccattatgacttgtctcttatacttacaatcattataagttgattaatgacagagttttcttgactggtggctcgttttcagtacaacttgtgccaggaactgaagtggctgtggctccaaagagacgtgacagaaatctcaaagcaaaaaagagtcaggaaaaagaatgtaacaatgtgaaggctctactacgtgtacaagagactgatagatcagcctttcatgaagctgatgtcaaaggatttgagctaagggtagccctcacgtctattgcctatattcatccagaaactgccaagaaacactctctagaatctcttcagttgatttctgtatcccctagaatacctttgaaaggtagtgcaaagaaggatgaagccttaaatatgaaaaacagtgaagcttcaaaggtggccgagaatggtacttcaagcgccaagaaagagcctcgtcaagcaattcttcgtcttgtcttttcagatttagctgctaaaggacatctaatgatggtcgagtctcttcgtctctatctaggagcaggcctacactcatgtgagtaatttttgcttaaacattcagatgcttttgttttatgtacctccagtattttgatgtttgtgtaaaaatatctgttcagcaatatcattgaaatgtatggagagactgagctgaagttaatttgactggttatttgcagtatgcgacactaggatttttttattttatttttattgttgtgaccatcaggaagtaaacttgtaaggtattttggaagttatcgtgcaggttgaataaaaagcatcattttgcattttccattctcaatcgagcattgttaccacagaaaaataaatgtctgagcaagagttatcacttgtatgtaggggtttacttaaggggatgcaatgtgaatgaagacaaagaaattcctgctctttcactttctccttgtgtcttcaagatttctgaaaatgaaaaggtgctggataagggtacggataggcttggtaataacaattctgttagaaaaagcagtcatccaccgtctggcttgagcacctatgtggatgttgtcgactggtctgtgcacgataaggttgttacagctctttcatctgagggtttgcatgacgaaggaaatcatgataagaataagaaaggattggaataccttactcgcctgtggtcattggcacagcttgatgctatggcgtcagtcacaggagttgatgttagttcgttaattgtgggaagagaaacgtttttccatttcgaagtaagagggctcgaatcttataaatccatagacgggcagccttctgttaatgatcgttgggaaagtgggaagaaggataaacacactcctttagaaattttgtacgtcatgacggtctctgatgagtctttgcttggtgataaattcgctgggtatgatcttagcctggatagaagtgagaagagcgacaatgtggtgcatattgagccagtgcttgagaagatgaatcttggcgagcctatatatttaaagtcggctaaagagacacactgcaataaaggtgtttccccagatatatcctccttgacgtggatgggcccaatcgtgtcggatgttatcaagagtaggtttactctcttagcttcatcttgcttgagtcgtataattatgaggccgcacacacgaacatatatatctgataacatagattttgcttaacctttgttcttttatgtattagcttttgttatagcatgtgttctagttgcatatcacatgtctttgaagcaattgtttgacctcaactaaaattgcttgataatgttcatatacggttgatcttaacctgcgtcttttaatgcatctggagaatgtttatgaacggatctgttcctaaagccaacaatgctattatgcaggaatgaccgtgttgttgtctcctgcagctggaatgtggtttagcaagttcaagattccatcacctggacatattctcatatatgggcctcctgtgagttctcattttagttgttccatttagtatttctcgaatatgaatttagttctttttattttggctcctggatttacttgggtttaaattcccaattgattccttctctcgcaacgttagtatgctacccattcaaaggctacccctttggccaggcattagtatcagactgtttatcttgaatctttagatttgttcttccttacaaccgtgaaacattatttctctggcttgcagtcgtttcttaatttcccatttttcttactggttgagacgacctggttgtttactggttcagcttctggttgatagggttcaggaaagacaatattggcaagagctgctgcaaagtatttcgaagaacagaaagacttgttggcacatgtgtgagtcattttggtttggtttatgtttgtctgcactgatctactccaaccaactccatttatttttaagagactaattctggtacagatgtggtcttaagtattggtttccttgtgcaggattttagtatcctgttctacacttgccttggagaaggttcaacacatccatcatgtcctttctagtgtaatagctgaggggttggaacatgcaccatctgtcatcattttggatgatcttgatagcattatctcatcgtcttctgatactgaaggaacacaagcttcggttggggttacaatgcttacaaaattcctaacagatgttatagatgattatggggtatgaactcttgaaaaatataaggtccaacagttcactattttcaaatatgcacgtttatgatcacaattatctatgcatcacgagttactttccgaagtgtggtgaatttaattatctaaatgcaagacttcctccatgcgaagacaaatgtcatttctcttgatagtccggataactgctttcacctttcttattaacgcatacaacattaagtggttgttcttggaacttcttgaatccactcatctccatatgcatttagcctcatttctagatgatatatttatatatctgactcacgtttatttaaccagttatatttttgttcactcaacaggaatacaggaattcctcttgtggaattggcccacttgcattcgttgcttctgtccagtctctagagcaaattccacagacattgagctcatcaggtacaaacgtgttatataccactacttctacctgttttaacaatattagttctaccagaatcagttcatgtgattattcatttgacattttcaggaaggtttgacttccatgtgcaactggctgctcctgctacctcggaacgtggggccatactgaagcatgagatacagaaacgccttttagactgttcagaagacattttacttaacttagctgctaaatgtgaaggatatgatgcatatgacctggtatttaaatttttctatatgcttttaaatttgccgttgtgctaagaccagaaaagacatttgacagaaatgttgacagactttggaagctgatactatctgtgattttcatgttataaattttattgttcaagcttgctatttcgttttaacttgattatcattctgtccgcagatctacagtgtgctctctttgaattctctttttttttttttttttttccaggaaatattggttgatagagctgttcatgctgccattggccggcatctacctttagaatcaaatatatccaaatataatttggtcaaagaagactttactcgagctatgcatgattttgtgcctgttgccatgcgtgacatcacaaaatctgcctctgaaggtggtcgtttggggtgggaagatgtgggaggtgtgactgatattaaaaatgctatcaaagaggtatatgactatgcttactgccatatctgattttgttgccctcattaaaatctaaattagtgtggggtaggaaatcttgccaataaatgttatccttttataattgcaaccaggaagcatctgtttcctgcctctttgtctgttggcttttacttactgaagttaggtcgtgttcagtgggaaacaatatttctgtaagacctgagttgatataagttgaaatatcttggaatgaatctcacggaaataattccactgggctatataagagctactagttatgctaacaactacagtttgaaccagttcttatttagagatataattctagatatgcaactttattgctctttgccatgtccagatgattgagctgccatcaaaatttccaaaaatctttgcaaaatctcctctgcgtttgagatcgaatgttctcttgtatggcccacccggttgtgggaagactcacattgttggtgcagctgctgcagcgtgttccctacggtttatatcggtgaaggggcctgagctgttaaacaaatacattggtgcatctgaacaagcggtaagaatgacaacctttctttgttttccatcttcaagaacctttgagatggttatcaacctattcagttctttagtgacgcatgctattatctatactgttgaatttattttgatttttctgggtttcttgcctagtctttaccttgtattaaacaatagaatgataaagaaacctctgaaaatgtttctagagaaaagttttcagacagctttgttcctttttaattgttattcctgctagtctctttacataaaaatctgaaaatgttatcctaatggttccgcatatacaataatggaaaacacacttctctcaggtccgtgatatattttcgaaagcagcagctgcagctccatgcatactctttttcgatgaattcgattcaattgctcccaaaagaggacatgataatactggtgtaactgatcgagttgttaatcaagtaagttacttcaaagtctgagcaaattctatccaagtcaaagttcaaacatctcatgtcatatttttcttttgcgtagtttttgacagaactggatggagttgaagttctaacaggggtctttgtatttgctgcaaccaggtattcacacccgaataagtctatcttgcatatcatattttgtgttcgatgtatcatataatcaactgcaaacggtggattcttctgagttgatagttaataataaatcttaaatatgataatcttgaagcctgtgctcagtcctcaatttatgtttttcattacatacaaaagagggataatgactttataatggatacatgactcaattaacagtagaccagatttacttgatcctgccctcctaaggcctggccggcttgatcgtcttcttttgtgcgactttccttccccaccagaacgattagagattcttacagttctttctagaaaggttagtactctcagttacatcatttctgctaatcatttttgtcctcaagtctcatgtaaagtatgtatgctacatatctgaacgaccattaactagaatcttctatggctaagcgatttccattggattctgacattcaattgatggtctccctagacaatatgtagataagatttatctatatatattacaagtagttaagatgacaaaaaatctttctgcatttttacagcttctgatggctgatgatattgacctagagcctatagctttgatgactgaaggcttcagtggagctgatcttcaagctcttctctcagatgcgcaacttgcagctgtacacgagtatctgaacagagaagataaacccgagaccggaactacaccaataataactgatcctcttctgaagtcgattgcttctaaaactaaaccatcggtttccgaaaccgagaaacaaaagctctatgacatatatagccagtttctggattcaagaaaatcggtatctctctcatctccactctaattcctcttcccttttatacaaacccagttgttgattactaacaacatcaaaatcttattttgcttgtagtcaagagaagcaaagggcaaaagagcaaccttagcataatcaaaggtattacaaagacacaaaaaggaatggttacattgtagaaatcacatcatgttgtaaaatttgctttatgatagatatgcccagttgttagcattagagtaaaagtggttgaagtttggaataaagatagttagatactagagagacacatggtaagttctacaagattcaaacgactatagacatctctacagtaataagattaatacatttcttttggcaattttagaattttaaaagctgtaatatttttggtcaaaacaagataaaaatggtattcaagttccgtaattttgtgtatgaaatgaaataaaaacgcatagaaaagagtcaactattatcgtgcaacaaaatttatcagtccaaagcaaaaaaggaaaagaaacgacaacgtattcgtaactcacaggtaaaggttgttgcctcctatctttgacaatgccagtgaataatgttgttaattgttatggccataacttgaaatgagtcaacaaaattatccacagaggacgaatagagtcagttaagaaactgtcatgagtacagttaataatatctcatcacattcaacagagacagccaaaaaaaaaaaaacgattggtttataaattgggcgggggagagaggttgctgtgacgtctctctctacccatctccttaaccgaaacggcatgcatttcttccttctttaacttcctttctccattccttcacgacaacaatgaaataaactcatcacaaattatgtcattttgatgtttgaccaaacaaacttagttctataaacaaaataatttattatcttttttgtgtgacaaaaacccaaacccaaaaacggttaagaacaaagggataaaagagtccttttcctctttcctctccatattcttctcctgattttcctcttttcattttcttctcttttctggtaatatgaacaagttctgagctgtgaccattagaccaacaacagtctttatatcttcttttagttctttctctctctttttatttccttcttctgttttaagttctatttcttcagaaaaaaatccggcattctcattcgattttacctccacttgttgcctcggcttgctcttcaggtatgccttttgacctttttatcattctctctgactcctgtagggttatcaaatcgtaaattgaatgctacatagaaacttttattaacagttctctcatcatatgaactagtaaccaccataaagatgatgattatgacgatgaagatagatttaggacatgaaaagccctcttcattgtcattcctacaattagtaagagcaccaaactttgatatagatatttgagtatacaacaagtcaaagcaaatttaggagaagccaattttttattatttttccccacataagaatctagtgctcttgtaaaagtggtgaggtttgagtacacgactacctcatcttttgtatctgtagctatttatgttttgagttgcttgtttttgaaaaattatgacgaaggaaatctttaacaaatacctaattttggattacaagaagacttctgagtatttctaaccttccatcaatctaatctctgaactcacatgaagttgacattcctcggttctcttgataggacctttcatgtttgaatattttttcatcttctcatcaactgcataaacggtagttttgttgcaggtcagagaccaaaataggtgtaaatcaaaggttgttttgtcagagaaacacttacatatgaatagcaaagggagtcaaaacgttgcaacaacctgcaagcctgtcactacatttgtccaaactgacaccaacactttcagagaaattgtgcagcgcttgacaggtccaacagagaacaacgctgcagcagcaacaccagaagcaacagtgataaaaaccgccatacaaaagaggccaacttcaaagctccatgagagaaggcaatgtatgaggccaaagcttgaaattgtcaaacctcctctgagctttaagcccactggtacgacaccatcatctaaatctggtaataccaaccttttaacaagtccagtgggcaccccttcttcattgttctctaacttgtccttgatagaaggggaaccagatagttgtacaacaaacatcgaagaagaggagaaagccattaaagaaagacgcttttacttgcatccatcgccaaggtctaaaccggggtatacagaaccagaattgcttactttgtttcctttaacatctcccaattcgagtggcaaaccataaacccgacagattaatcataagtttgttctctgcctactatcccaaagattatgtacatgtagagtttcacaacaatatcattggaagaggaagattgttctcttacattgttcactcaagatttgtctgtgtcatatgtgcaattgctttgtgtagaccatcatgatctagcttcgcagcgttttaacaattttcatcgattaaaacaccacaggctctttcatctgaagatataaagcatttactaagtcaaaaatactgtctctacgagggtgagaacaatctccagacacaaagacattcctttgcccatccacttctagccagctacatcccgctggctttttcatttcctttttcttcattaggtttctcaactccatcacgccttcccatttagcatctgcagcatacatattcgatattagaacgtggtttccggtgtcgtcagattcagcttgcaagagatgatttgcaactgagtgccccagatccatcctattataggttgtacacgcccttaacagtgttccccatatatttgcattaggttcaactggcatctgtgtgacaaaagaatatgcatcatcaagtcgaccccctcgagcaattagatctacagcacaagcatattgttccattgtaggtttcataccgtgaactgtccttattgagtcatatatttgcaatccatcctgtattaaccctgcatgacagcatgcagtcaacatagtagttatgaaaacatgatcgggctttatgtttgattcagtcatatgagagtagatcataagtgcttccttgcccctaccatgtacagcatacccagctaccatagcagtgaacataaccagatctctacgagcatctgactggaagacagaatatgcatgcttcaagctgccacatttagcatatacatctagtagagtccccttcaggcggatatcaccaagtccgcctctaataatatatccatgacattgtcttactagatgcagagaggctagctgcgcacaaacaggaaggagattcatgatagtcacagtgttaggcctcattcctcgagcttgaatctcacggaaaacaccaatggcttcattagggcaacaactttcagcatagatacgaaccatcaaactccaagtggtgagatcagtagtagacatctcagtgaagagcatctgagcatcatcatgacttccactattaacatatcctgataacaatgagttataggaaaccaaagttctcctctctgataaacccagaaaaatcttatgagcgtattcaacattaccacatttggcatatgcatcaagcaatgcattgccaagcttgggttcctcttcatcgtgtaaaagaccagccttaactgagtacccatgaacttcttttactttaccaattccctgtacatttatgcaaaactttagtaggcttaaaatagtaacagagtcaagagtgattgcttcattaagtaagtggtgcaagagattcaaaaattgaaactgctttggactgtctgcaaaggcatcaagtatagcattccaagatattatatccttcgtggacatcagtgaaaaggcccaatatgctgcacttgtgtcaccaaatcttgcatagaaactaatgagagcattcccaactgatgtatcctccaaaaggtaagaatggcgcaatatataactgtggatctctttcccagaggccaagtcagttaattgcgcacagacaggaaggatactgataatagttaccgaatcaggagaaacatcccccttatgcaccaagttgtgaaataactgaaatgctttaaaccactcacaatttgatgcataaccagctatgacaacattccatgaaactagatctttagaacccatcctggtaaacaatgaggctgcttcttctatccttccgactctcaaatagaaactaacaagtgaattacatacaaaaacatgggtttgcagccaagacctctgcacaacataactgtgaatctgtctaccacttcgacatgcaatgttcttgtccatagaagcgcaaacaggcaaaacatttgcaattgttgcataatttggctctgtaggttccttcagcattagacaaaacgatctaaatgcatcagccatcatattattctcagaaaacccagcaataatcgcattccaagagacaacatctttatcagctataccatcaaatgcagtataagcatcgggaaaaataaaaccaaatttggcatacatggaaaccaaagcattccccacaagtgtatctttctccaaaccggctttaataatataagaatgcatactcttcccattgtatgaatccccaaggcgaacacacaaaggaagaacaatcgcaaaggtaacagagctcggcttaggttcatctgcaaagtgcattgctttgaaaaacctcatcgtttcacgaccgcaagaaacagaaagtccagtcagaacaatattccaaacaacaggatcaagactgtccatttgcctaaacatcttctggcaatcatccattctcctgcatttcgcatacatgttaagaactgacttcgaaacctcagagcaggctatatgaccaagcttgaacacgcaaccgtgcagagccctccctgatgtgagatcagacactgaagcacaagctttgacaacatccagaaaaaccctgtgatcagttccaaaaccagacaaaagtctgaaattctgaacaaattgccgtaaagggcccatctttcccctgaatatcccaacaacggccctttattagcaaaaaatctacgttacattgggtcagacattttcacaaacacctgatatgcaagaacagtttctctagatataagcgttgtcgagatgtaacagacatagagaaactgaaaaagcaatatctttatcaagctcctcaatttatcaagcaatgaaggtgtctctcagtctccatctcctccacatacaagcgacagtttttgtcttgagtgaattgaaaattatgaatatatatggactattccgatttaattaaaactgaagggctaaaaaagaatatattaatttacttaggtccttacatgaaaatttactatttctattcttattcgaataattagaagaaaaaaaacaaattccataaatatatatatctttcgtcgactctgcttttacacatctctcacacggtaaagttacaataatctcagcttgaatcacactgacgaaggcatcttcctgcgattatggcgtcgccggcaggtgaaacagcagcggttgttgagggcggagatgggcagcagcaacgacaagctggtgggtttgggcagacaattaccggaatcataagaatcgccgtcttctgttactttgcttctaagttcttttctcccaaacaaaaacctgcggatccttccaagcctactcatctcatgtccaatctatttcagaggggcgagcccatagtaatcttctggttaattgtgttgattacttgcttattcgttaatatatgcaatttcattcgtttctctcttcttccaaaacaaaaaaaaaaacgtttctttttggttcgaaacttcgaatcagagtttttcaacttctgggtggtttagggtttttccgttttgtgtttttgtttgtcaggatatgtggttttatctttcggagcatgagaaattcaatgacttcggcaatgaaggtgcgcttatttggcatgagacaaacataccttatgctgtgtggaaaccagagagcactaggaccttgtcaatgacgtactatccttccgaggtaatagaagtttggttttttttcatatgcttccttcgagattaatatatttgctgcattgaattaaagatgtttgttgttccaggcactgaagaataatggaagtctgtatgctcatgtcttctttgctctatctggttatcctatagatcttagtgatcctgaataccagcctctcaactgctttggcaggactcaccgtaagacttccctttccttagacaaacaacctttttgatagttgttggtagtgaaattcttgtatccgctaaaattgtatgactcttttcactatttcagctgttgcaacttacttaccaaagcgaaaagcagataagaagaagagtctgttgggaaatcccaaagactctgatgaatcccatgtggaagttgaggtatgtctctacagaaatttttgtatgttgttatgttaatgtttggcctgtgatggagccagtgtgatggcaatcattcttatgaactaacacaaagcaaacttcgcaggaggttgatggtaaggactcggatctcaaggatgagggccctgtggaatgggtatcctactggaaaccaaatgtcacaattaacctagtcgatgactttactcggtaagttagttagtactgataattggtagatgaataatggatttatggcatgcttggttttcttgggttcactcttaacaatgaacttcataagacgtttgctgattgtttcgatttccatacagctatccacagcatggtgtaccaccaaacatttatccttgtatccttttattttatgatgttcctattattatttgagtttttgacaactctctatgcacatctttttctaacaatcgaaggcagtagcatgtgtatcatctggaatgccatttttgaattacttggattaaacttgtttgaaaatttcaaattctcaaggaccaaaactttagttctgggttcgtggaagtagtgccacatctccttactttatatatgtgcacaaatgctcaaagaacctatgcttcctttttctttttggcttttctgttaatctttggaatgggaatttatgaggatttcactttgccatgctaaaggtgtgatggtccatatctgctctttcctttacttaaatattggcagacttactggtggaacctagtacaataaactactaccctacagttttcttcaatgagttttggttgctaagggacaagttgattttaatcaatgagacggtctcagagctgccacttaatctggaagtaagccccataagcatgacaaagtggcagctgtttcagcagattgatcagtctttccagattcaccgtagctatggaagcatgcttgatggtgaatctgacgaactaaaggtaattctggtccttccagttggcttcatttttcaataatatactaggatgtgcatctaacgactcttaactatgaattctaaaagtaggtagagagatgtgattattattttttcctattaattggagctgaggtgatcatgtgttttgttaataatttacttgcagagggtgtttttggaaggaaatccctatctgttgggcgtcactatgtttgtttcgatgcttcattctgtattcgacttccttgcattcaaaaatggtaaagacctgaaagaacatctactttcgtaaaatgcctcttgaaactagctctttagttacctgttacttttcctgcagatatccagttttggaacaagaacaaatctatggaaggactgtctgcgaagtctgtcgtactaaactttatctgtcagtttatcatcttcctctacctgcttgacaacgacacttcatggatgatactggctagctctggagttggtgtctgcatcgagttctggaaaattgggaaagccatgcgcattgaggtaccatctgatatgacacacaatctgataactgagtcaactattttcgtgcatgtgtaacatcattcaaaaatcagtgacacgttcatcagatgttttttgcttttgtgtgttaatccatggtaaacatttaaaattcccaggttgatcgaagtgggatgattccaagattgaggttccacgaccgtgaatcctatgcaagcaacaagaccaaggagtatgacgacattgccatcaaattcttatcctatgtgctcctccttcttgttgtgggtttctccatatattcacttgcctatgaacgccacaagagctggtactcatggatcctatcttcactaacgagctgcgtctacatgtttggtaaaaatccttcaaaattaccttagaccagttcaaaactctcgtgtggttgattcaattgagtcgaaatcaatgtgttttgtgtttttacaggtttcataatgatgtgtcctcaattgttcatcaactataagctgaagtcagtagcacatttaccatggaggcaaatgacatataagttcctcaacacaatcatcgacgatctctttgcttttgtcatcaaaatgccaatgttgcatcgcctttctgtcttccgagatggtgaatacaaatccatcttccctgagtttattgacacatgtctctaggatagttttggaattcacaaaaatcgatgatgatctaaatttggtgttgttgttgcagatgtgatattcttaatatacttgtaccagagatgggtttatcctgtggacaaaacacgtgtcaacgagtttggttttggaggtgaggatgagtctgtggatacaaagaagatctctgaccaagaagatgacaagaaaacaaactaattagctttgtgcttttgtttttccctaacaattttgagtttttttgggtctgctttagtaagttttgttaatgctacttatatccaaaagtaatttcgttttagggtaatataaaaaaaaaagtgttaaagaatatcacttagttataattttgttttgtttatatgtaactttagttctcaatgtttttctagacactcttcttcatctggtaccagatatagagacagatgatttgctagataaagattttgtagatcggcaaatgtcataattgagtaatttgttgttttggatagaataacaattaattaaggtagataaatgaccttttgaactcaaatctcttccatcaaatcaagtgatcaatagtttttcacacaagtgtcaaaagcataaatgtttgaaacaataattatgcattcatccatgtgtcattcatgtgtgcaacaacataggttttcattattacattgtccatcggcagtccccattgagctacagaattcaatgcatttcaacatcccttgcagacatggtcttgtgtcgaaacactgagtcaatttttctccaaacactagacaaaaaggtaccaaaaattcaaaactgaaagactaagaaaacagataagaattaccaaaagaagaaacataataaacaaaatcttacaagggatgggtttgaaacttggacggcaatgaacagaagagatccccaacataatggtgaaagcaaatactactaatattttcttagtgaaatccatagttatatgatgcgaaatgcgaatgttcatcatcaaagtacacaagagaccatttatatatagatgaattattttaaattatgttattattttaatatttcattagttttagtatagaatcatagtatatatatttgtttagaggatactttgtatataaaactattttaattactgaacaatattatgagtttcttatgtttaaactggactttaaaaatatctaaaacataatttacatatatgagatccaataacaccaccatatttagatgcatgatttaaaatcaagtcttgaataacaataaattatccatatatatatatatatatatatatatatatgtcttataaaatctatgattgaataacattaatatattagattttttaatatactttgtgaattaatgaggatatatcctacaaattcatttttatcattttccaattttatcataaattctcctatctattttagatatcataaaagcttttatattaaactataaatttgtaattttctagttttgtaagaaataagatatatgggccgtagtaaggtgggtcagttgatacggcgtcgtgttagctgctgacttatatgggccgtagtctcaaatcttttagcaatgcaattattgaaaatttgagtccaatacacataattaatgctaataaacgtcgtgtatatggcagattttggcgcattcgtagcacgtgcgaaaggtggggattgtgaatgaatgggatcaagcaactccacgcgcactgtctgagaacaggcgtagacgaaaccaaagatctcttacaacgattgcttctgataccaaaccttgtttatgcccgaaaactcttcgatcatcatcaaaattcttgtactttcctctacaacaagctcattcaagcttactatgttcatcaccagccccatgaatctatcgtcctctataatctcctctccttcgatggtctccgtccaagtcaccacactttcaatttcattttcgcagcttctgcttcgttttcttccgctcgacctttacggttgcttcattctcagttttttagatctgggtttgagtccgattcgttctgctgcactaccctaatcactgcctatgcgaagctaggagctttgtgttgtgcgcgcagagtgttcgacgaaatgtctaagagagatgtacccgtgtggaatgcaatgatcacgggctaccaacgacgaggtgatatgaaggcggcgatggagttgtttgattcaatgcctcgtaagaacgtaacctcgtggaccaccgtcatttctgggttttctcagaacgggaattactctgaagctttaaagatgtttttgtgtatggagaaagacaagtccgtgaaaccaaaccatattactgtagttagtgtactccccgcttgtgcgaatctgggggaattggagattggccgaagattagaaggctatgctagagagaacgggttctttgataacatttacgtgtgtaatgccacaatagagatgtactcaaaatgtggaatgattgatgtagcgaaacgcttattcgaggaacttggaaaccagagaaatttgtgctcatggaactccatgattggtagtctagctactcacgggaaacatgacgaagctcttacgctttttgcccaaatgttggtgagctgcatttttgtttgttccttcaattcaagcatgttgattccttggattgtaagagtttttaaccccctatggttttctgttgattcttcagcgagaaggtgagaaacccgatgcagtgacatttgttggattgttgctagcttgtgttcatggtgggatggtggtgaagggccaagaattgttcaagtccatggaggaagttcacaagatttccccaaagctagagcattatggatgcatgatcgatctcttggggcgtgttggaaagctgcaagaagcctatgatctcatcaaaacaatgccaatgaaaccagatgctgtcgtatggggaacccttctgggtgcttgtagtttccacggaaatgttgagatagcagagatagcaagtgaggcactgttcaagcttgaacctacaaatccaggtaactgtgtgatcatgtcaaatatctacgccgccaatgagaagtgggatggagttttgaggatgcggaagttgatgaagaaggaaacgatgacaaaggctgctggatatagctattttgtggaagttggagttgatgttcataaatttactgtggaagataaatcacacccaagatcttatgagatctatcaggttcttgaggagattttcaggagaatgaaactggaaaagagtcgctttgattctttgcttcagcctgaacaactatgcatatgaaagtagatgttttgttcactttgccaataacaatgactgaatcttttgaaactgtatgtgattttggtgtctttacattcctatgttcaatcaaatgaacgttggtacacattgagtaagaagactagttggatatcgaggtagatcgaacacgaagagatgagacggaatagttgaagaaagctgacatggattgagacgatattatcactggttttcactattccttttgaaattccatgtcaggtgcatatcatatgtgtcctaaatgtgattaatagagggtgtgcttgctataaaatatctgtgtatttcttatgttattctttgtaatctgcttctgtttttcttcaactacgaattttctgtcacagtatatatcattatacaagatccaaaatgagttacaacttcaaaataaggaattgcacgttgcagttgataattcaaagagattgttgaatgtgagaacaagatatacaatgttgctttgttgtaagtctcataacagaggctttattgtgttcacatacaaacaggagtatttttgcttctcgagtctggaaactaatcatgtcatcttcatatcttattcggacctcatacaaaatccccacaaactaagtaataaaaaaaactcactcaaggaacaagcttgaatattcactaaatcctttacacatcttctttcttacacctaaaaacaaagtgcactatgacagcaaaggtgctttcgagttacctatgagccgttggtgtacgcggcatggtgtacggcatttgaccaatgttcattgctgcaccaggaaccactgagccagggactggagccgcatgaactccataagccatgtgaggtggagctgggaggttcactggtgttccaactgctggctgacctatggcgggtgttccatacataggaggtccaggtggtgcttgagagacggcttgcttggctgatttgtttcctcctccagcaacagcaggagaactgttgttgttgttgttgttgttgttgttattgctgttgttctgaccagtgattggtccttgtggcgttgagacatctgcgttgccaacactagtgatgtcgtgaatgcttgatcgccttctgtctttgttcattgaatttagacgaatgaaatacttttgagcatggctcgcaacttgggtcggtgttcttgttactacaaagttgcgagaaatgctacgccaatcacctttcccgtacttatccaaaccaagaagaaataacctgtaacatagaaaagacagacaacagctcattagaatcgctgcataaccaaaagggcagaaacttccaggccatagtctcaaagatgaaaacacacaaaccactgctaaacggaaacagtctaaaaccaattgcaggtaacacagtaaggtcttgtcttgcatctacctcaacagctaatctgcagatagaatgccacacaagtatacagaaccctacttctaaattgcttctccactggattttaatctcctaactaagcaggaaagacatttctaaacacccgtacaacgtatttgaaaatgaacctcgtgatttcttgtccaggaggttcttctatcaccgccaaaatccaatttctcgaaaaagcacatgtaaaccaccaaattatcaagatgacacgggagtagatcaagataatggcgaaaacacaagtttataaaaatggtgtaagaatctcttttaaaggtttcaatcagacagataagcattttttttaactctcccagcaaaacattcaatcaacaaagatagattttactgttacatcagtttcccatatctttggcaagtgagaaaacagtccagtaactaattatatgccactaatataaccattatatacttaactctagtttttacgccttatctaccctaataaggtcccaaaaccacttgcatcttcaagagagaaaaatgaagactaaacttcaaagtaagatttttttgtctctttctaaaaggaaggtggggttcctccaataacagaggttggatggactgtttcaccatgtaaaacagcatctagcttcaacaagtggtggaaaaagatggtcaaaatggtcccgggggttagatagcatctctccatcatctctaacatggtggatgtaatgatatagcaactaggacagggaggtaaagcgaatttatgagaacagctttctctgtcccatgccaagttataattccaataacatctgagacttttaaaacaatcacgaaactaaaaccacttcaagaaatctctacttttctttcaagcatcctctagagtaacctcgggtcagtgccccctaaaaaaaactcaattcatccttttttaatttaaagtatcagataggagaccaaggacctaaaagttccagtgaaggtattgcttctaactacagtatgactttgaaaactcttgatgtcttaaaggttcacagaattagacacccaagagtaccaaaattgtcacttaagagaaataatattaatgttctagaacacaatgaagacatggagcacagaacaaacataatttggaaagaatcataaaagaataagaagaatcagaaactgattagcagcaaaaataaacaaagttcacctgtgctcatcttctgtccacgcgataccctttcgtcgttcttgatcggactttgatttacctgcttggttagactctcccgcatgactgttacctcctttcttactacttgctccttcatcaccagcatggccattcgatccttcaggagacccataggcaggaagaggcacacatcctgattcaatcctagtaacatcttcaactaaaagctcgtaatgttctttaatctgttcaacacttttgcctggaacgtctgcagcaatcttctcccaccgttcctctgattcatcggtattattggctagagctctctcaaaggcaatatcatcctccctactccacacagaaccatcactaacttcctccaccgtcataattccaatcaaacccgcctcaaattctatagaatctaccctaatccctctaaaagtctgggatatcaaccagatttctacaaatttcgtgtcttttagatctccacaaacttaacagaatcccaaagaactcagatcttccaagtatcagtgaacctagctaaaaactaccccttgatattccaatcaaaacccaaccatacaactaaactagggatataaagagaatcttggggactcgaatagagattctcacctccaacaaaatgaaattccctaaaaataagcggaaaaaaccctactctctctactgatgaactaagacgcaaagattaattcaacttatcgttatgagatagaaaggaaagcaagaagaaatttatctgataggcaaagcaaaacggagattgaaacgagggaatcagagaattggcagaagaagaagaaggaaaaatgtgaactttatgagaaatggaaaattgggggtttattgggttttcaagggattgcagcaacttgaaggagagagagagaaagaggaataggaaaaacccagaagactgagagagagagagagagagatagggaggggtcaaaacgccattgttaaaggaaggggaagttcaaaacaaagaaacagtgaataaaaaccataagcaacagttttcacagctcaagtccgctgttgttatttttggtattgttgactcttttattatttgttacacttccaattcatattggaatttccttgttgaccaaattatgccatatgtattttattactgctactcctcatcgttggtaatttcatatcagttttttcttttttcactttcataatgctttcgcatgtgactagatttttcttttggtgacatttggggaggcaatcattgatgaataataattatttgtacggtgattataaaaggcaatgaaatactatatcaaactatttgtaaacattgttcaaacttaagctcatatcgaaaatcgaaaacaacaaagatgctaattgcctatatgacgactttccgagttatgcaaatatgtgattatgtaatttcatcatacaacaacttgttgattcagtagttctatcgattaagtaaagaaattggaaaaggggggaaaaaggtgggagaggtggacaaagaagttagggaagatgttgacgtcttatccataaatatcctccaaaaataatatccaatcagaccggtccccatcaccctcacaggtcttccttgccttcatttatctcttttcctttttctctctttctccatttcaatgcgaatatatatatcacttccatttcattttattctttaagttattccatttagaaatttctagtttatagttttaagatgatttctactttgtttgattttacgaaatcaagttgggactaatcacattttggttatacattatccaaaaaaactaattttggactatcatatcaagttgtatacagaacaatgatataccaatttatatcctagagatatttttcagaaaatgccaaaaagaaacattgatttataatttatttgctatgtgaactacttataaacccaaaaaggagcattctttatttcaaacatgaaaagggtttctttggttgttcccaaaatgtgctttcatactcgaataaacataacaagcaaacaataaagaaagtagagtaatgcaaaagagcaaatcgcgctctttctgatacaactttaagagagttttaacattaaccattcaaacaaattacattaccttcttctccttctgaagtagctttgcatcccaaaaccgttactagttgttcattcagattttatttccatggagaataatagcaaactccctgcaaaaacatcaattttgtaagacagggatagagcagaaagatagttacggaaactaactgttcattacggctcaagttcttgaaatgcccaaagaaattagatacagagcagtctaccttgtcacaaatacattctaaaaggctgcgtaaactctagacctcagcttttaagtttgcaacagaagattaaaagagcaaggactggagatgcaaacctctggttaacaaggtacttaagcagcagcctgtagcaactccctttcagcgcgttccctgatccttctctcgagctctggcctaaagtgtcttatcagaccttgcacaggccatgcagctgcatcacccaatgcacagattgtgtgtccttcgatctgtttggttacctcctgcagcatatcaatctcttccagctttgcattgccaactttcattctctccatgatcatccaaagccaacctgttccctctctgcaaggagtgcactgcccacagctttcatgcttgtagaagtaagagagccttgcaattgcatccacaacatcggttgatttatccatcacaatgactgctgcagttcctaaccctgattggacagccttgagcgcatcgaaatccatcagcacatcctcgcaaatgttcttagggatcagaggaacagatgaaccaccagggatgatagcaagtagattgtcccatccacccctaacacctccacaatgcctctcaatcagttccttgagaggtatactcatctcctcttccaccgtgcatggcttgtttacatggcctgatatacaaaagagctttgtcccagcgttattcttcctaccgaaactagaaaaccactcaggtccacgccttaaaatggtaggcgaaacagccactgtttccacattggtaacagttgtgggacaaccatataaaccagcattagcagggaacggaggcttcaacctaggttttccttgcttcccttcaaggctttcaagaagcgcagtctcttcaccacaaatgtacgcaccagcaccaaagtggatataaacttcaaaatcataaccagaaccacatgcattcttccccaagagaccagctgcatacgcttctcttctagccttctctagattcaaacgctcattcacatattcacccctgatgtaaatatacgcagcactagctctcattccaacaccagcaatcaaacacccttccaacaatttgtgagggtcatgacgcatgatctccctatctttacaagttccaggctcactctcatcagcattgacaaccaaataggagggacggccatcagaaactttaggcataaaggaccacttaagaccagaagggaaaccagcaccaccacgtccacgaagtccagatttcttcatttcattgacaatccaatcagtacccttgagcaccaaatctttggtcctatgccaatcacctctcttcatcgcgcctttgagaaatgggtcatgcagaccatagagattagtaaaaatccgatcttcatccttgagaccaccgaaatgagtcttttccggaggcggaggaggtggaggaggctgtggagtggtggaagtggatgcagcttgagtgctgaatgatctcaaagctggagtcagtctgttactttccttccaaatggacactgccctttgcaagccaagaatccccctcacgggtgcctatcatcaaatccatataacaaagacggtaaatggcaaattaactcaaagtaacacatgatctactttaaaagcatacaaaaaattgaagcacgaaatcagtaaaattgatgatacaggagttaagtgtcgcgtataaaatcgctgtttcaacattaggaaaccaaacaaaaccaacaaaagcaggtgaataaacccaatcgctctaaatcgataagctcgaccagatcaatcataacccgctagatctatgtataagaagatgccgcattttgaaattgttcagctgaattcaagataaatacactcaaagtcttaattttgaaaaccctaacaaatgcgatcgagaagaaaatcgtataacctagaaatgaaaacggagatcatcaaagtgagtgcgcgaaaagagattgcttaccatggagacgaaaatttccgagaagtagtctttcagagagatactggtctttgttcctgaagcgtgaaggccacaagaatgggagcttgaacagacacggagacgaagttataatcactgcccacctgagaccgacgaactcgagataagctgtttggtttagattactccgcgtcttcttgacgttaagcttctctctattttatgggcctctcttggtccaggcccaaatattctggtccggtatgaaactatcctaaacttcgataaacgtaaaatatgtgggtcgaatatgaaataattataaagtattgggaacaattagcatttagaaacataagaggcgtctttttataattttctcagttcccgtaagacgatccaactgctacaggccggcgattagcaaaggcggtggttcgatagagagaggaagagattgaagcgattttcactcagttttcatcagatcgtctcggtgattctagggttcattggtctcgttttgttcggtgactgcttgagtttcacgtttttggtgagttccgtctatctattattatcttaatattttgatgattcaggctcatggtttgtgaaatttgctctaatttattccaggaaataatcaacataagcgaattcttgtgtttggctttaattgaaccctgaatttagatgataacaatatttctgatggttggttcattgtatttaggtttcgatttcttatgggagattcctcggtttcgacaagttcatgggctgtcattgaatctgctaataggtttcaggtataactcatttctggatgcatctcttctattttgtgctgcatttaacctattaacattttgtttactgttcagtggtaggaaacttttgggtctgtttctagttgtgaattgaatagactacaagaagtaagcagaactgaatgtgcattccttttgtttttattgacaattgtgagttaacatgttcaggtgtcgagcgttatgggtgagtcctctggatcaagcagttcattggctgctataaattcgtccaacattgggtttcagctcctaaagaagcatggctggaaggaaggcactggtcttggaatcgctgaacagggtatattggtgcctctacaagcagagccaaaacataacaaacgaggagtgggagctaaacaaccagctaagagaaaagtggctcagcctcaggctaaggtcttgtttcttaaaacccttacatgcgatagcctttaaatctgaaaatagctaatgatgaagaagtgttcaggcattgataaagagtctcatctgattttattttttgaaagtctgcatcagcgacacttcatatctcaatagtgctggacttgatttttggcttatcacgttgccattagcttttatgtttcatttgttttcaagttaggcatcgaaacttatcttttctttactaaaattttcaggatgaagaagtctcaaagcagagtaagaaactttcgaagaaaatgcggaagatgatggagcacgaaaaacatttacaggaaaaagaatttgaacgagccttctttagggagttctggcccgataatgtataactaggttttattcttttacttcttattgacctgaatgttccaaaagcttctgtatttactgcaaatttagaataactctgttctattgccttatcaatgaagaaaaatagttatagaatcatgcgctcaaccttatacctttagaaaatgggaaaagaaaatgaagttaatgcagacacttcaagtaaaggtttttgttagcaagtttctaaagtgtatgttcatgtgccttgcattggtacccatgcatttagcatgaccaaatcactttatattgtgaactaaatttgggataataatccgatttaacatgggagtaacaaaaaattctagcttgtgtgggtaattaatccatttgttattatgtctgctgtctgctgaattcactttttcttcttgttaaaaaccatttgatgatcgtttatagttaaaataaatgggccgagtaaaaaaggcccattaatgaccccttcaaataaatagaaattgttatatcttcttccttcaccttccgtcgtagttccccgacaagctaactactgttgagccccgccgcatccgaagccgacttttcaaatcgtcgagcttcaacaatgacgtctcttctccttccttcatctcaatttctccagactcgaacccaaaacaatggccaaccattccttctccctctaacaccactgttcgcaccactaccttctctccgtcagttgagaccgaaacacatctctatttccgccgcagcgccgaagaaaaaatcggagactgtcacggcgccgacaccggcagcgaagaagaattcgagcgtggaggaggaaacagaagaggaagtagaggaagatatgccgtggattcaagagaaggcgttagacctagtcgagttcactggatcggtgagtcaggcgattcctggtcctcgagttggaagtagcaaattgccgtggatgctcgccgttccgttagcttacgccggcgtcactttcgtcactgctttcgtcaaaaccgttcagaagttctcttctcctaaagctcagcgcaagaaactggtctctgattccactctctcttttgtgatccttacttaaaaaaaaaaaaactaattcaattttggttttttgaatctcttcaggtgaatcagaatgctatgctttgcagatctatagatgagctattaaggaaagctggaacagtgcatagctctgagcttaaggcacttgaacaaaaggtgagaatatatataacatgtcactaatcttttggtttgatctcttaatcatttccagttcagaatttgacatgaggatgctgaattttgtttttctacaatccagacagagtttaacatggaggagatattgcggaaatacattcgttatgcgttgaatgagaaaccgtttaatcccgaccttgttgctgatctcattcatctaagaaaagcttctggtttgaatgattctcagattcctgagattttaaatgagatctctcgtcgtattgtcaaggaaaaaggtaaccaaaactttgttaaggttctctattgtggcagtctcttctttattgctcttgacatatttgattttggcaggtccggtagtgatgaaaatgcaaggctttaccgaaaaaggattcaagagaaaactcgccgtgcaagcgctttttggaaagatttactatctttctgaggtaatcaatgtggaaacattacttgtacttgagagaatctgcttactctttcaacattttcgttgatctaatcctgaagtcaaatatgcatacaatgttttcgatgtgtgatagattttctaactccattctctcttcaacagcttcctgacttctgctcaaaagacaactccttaatcgtcaaggaaatattcggcgttacagagtatgttaactttattcttatgcttttacaatgttccttttacttgaccatctctacaaaacatttcagtgaagacgcagagaagctgcggatacacgctcttgctgaagctggagacatagaggcacttgagaaaatggtggaatttgagaaaactgcggagtcttcttcggataaagaagaagattcaaatgaagaagatgactctaacaccacttcctaagatgtttgttcaacgaccaactttcaacagtagattctttccaaagggggttttcttcttctgttctttgacttataccccaagttgtgttgtttacagcagaagacgtctgattccaacagaaattgtcttttgcaaaaaaccatgacacagctcgtaatacaaattaactgcatctatagtgcagcacagcaatacaagttggggcttatattcatagaaataatattgtctttgctaaatctaaactcatacagatataaagggaaaaataaaagactcgagatactttagcttatatttattataaggttttctacaaccacaagaggttacacttacattaagccaaagtactaaaactcttctgtgtctgaaaatggattccggaaggttttggtgctagcctaataatcctagggaaaatcttgtaatcctcgatgttgaaatcgatgagcctttgctggtacagcccgaaaggtgagcctgataacctgaggctaaagatttctgtgttgactttccagtttcccatcaataaacttttggtcaaactgcctccttaagattgaatgttctgacaatttccctggcgtggtcatgttcatggagctcgactagtattctctttaatctgcgggcgagaccagtggtttccgcatcgtccagtcctgagccaagccttttctcgagaattcttctaagtgtcagagtacaatccacaagaggttgcagcggacgactgcaaagtcaaataaaatattttagtatgtatcaaggcaaaggttcaacataacgtccaaatatgagatgcagatatcatgtgaaccaaatgaagataaacaatgaaattgattggtctaagacgaatgagattcccaaaaaaaaaacataaagaccatagcctgaccaatactcctaatcttgaaagaattgcccagattttgcaagataaaattatgtaatttaaacatcttagtcccgattcgacagctttactttacttgctttcgtgcacttggaaaataagcttttaacttttcatgcagatggactgtaaattgtaaaggtaaacaatatgcaacatcacaagatgcaactacaatgcttcgttacaatgaaccatgagaaaccttcatgtgtgagaaagtaaaatttcagatttgattgttaaatcatttacctgtgggttcgtgtgacgcttggtcctgtccacactccagacaaagaagcaacgattctttcagttcttgtcacagcatcatggatatttgatgcaatgcttctgacatggggtagaacttttccaaacaaaaggtcactaagagccaagttctccaacactggaagcgccaggatgtctttccacatacatatatttctcataagacggactgatgtcccaaacctatatgcggcaacttgtggagtattaggtacagccttcaataccagaggatcccatgtcggaacctggagaataaagaacaaatcagaggatatcattagtccagagtctcatagcagactcattaggaaattagtaggagatgtaacgaattcaaattcatacactaatagctgcaatggcttcaacaaggcgagcacgaatagcagcaaatagttctgctaaggcctcactcgaagcagaaacataatttgtcaccaagcttgtagcagcaacagcatttcttgtctcccgggtgctaagtatatcccagcaacgaactatctgatggtgcaaaattggaattgcaaccttttctactagctcagggacaaggttggcatcagtatcatctggtgcaaaatcatccccatcttctggcttcccgtaatcaaaaagcaacccatgcctggagccacgaattacaagttagatcacttccaaaaatgcaaaaaaatctaaacaaattttttagctaaccctcttaagagactaatgcctactagatagtatatgtgaactgtgtttgacaatgtatgtttgtataattaggaaagttagaaactgcgagtaactcaccatttcatgtcaaagaaatccacatcttgatgaagaggatcccatttcaaaagctccagtcttacataaggtgaaaagatggaaggaacggtcaaagacatgtaagcatcacgataagttgatgaatagtctcgcttccacctctcaaatctcgccttcacctttgaaagctgggagtactcctcagatgcatcactaaagaccttatcagcacactgaagtaagctatctcttgtctccttataagctgaagtctcagtgtcactctcatcagtgcttgattctccttctattttcagagaaggtccatcaacctccatagctgatgcacgcttattttcaaatcgagctcgccttttctgccgggctgcagccctctgttccacttccctgcgcttctgcagattttcgtctctgccaaattcatcaagcttaactggttgattcatctgctgccttatagaagtagaggcagccaacgcagcacctgtggcagcagcaatcactgaactactgcttccatgtttgtttagaactgtcattgctgctttcactgcggcccccaactctatcatttcatcattgttatctgcaattctcctttctagaatagataaagcatgtttttcgttaagttccttcatttgatcttcaatttcttcaattaatgaacccttattctgcaaaacaaaattcacaacagtaattaggagttttattcttagaattacgttggcttccaactgtgcttacgaatatggcaatccaaaagcagtatagataaaaattatggtagggttcacaactggtcgttcgttttcatagttggacaacacttgaaagaatgaccagctagaagttccattctatgaaggtatacgttatgcataaagaatccatacagctctatatgggacaaatattttgttttatgtcaagtaaaactagtgtaaaaccagttttagtttcaatattacaaaaatcgtttgctttcataaagatgaaatccaactccaacatatgccatgagaacctagatttgccttaaaatatgggttgagctcatcttttctttgttttcttagagattaagatttaaaaaaacaaaaacaaatgcaacataacactaaatctaatctattccattttcccttggattcatgatcctatgcaggcaactgagatttactaagaaagcattaactattggtaccaaaaatagaataaaagtcgagcctgcaacataagcaacatgtataccagtacaaacacaacattaaattaagcatacctgcatgaagtcacagataacagaaatgaagtctctgagtttttgcatgaacacatacttatctccagctgcagatagcgaactttcaagagctgtgatactcatcaacgacgcagtcagattctcatctgtcttggtaagggaggataacgtttttgcatgagattcctggcaaatagttcaaaataaattcagttcgtaagatatataattctaagatatataagtcataaggaaaatcagtcaaatggcaaagagaactaggaaaacatctatggtgaattaagttttaaaaatccacctcaactaataatcaactagaatattattaacagcatacaaatacggagaatactaataaaaccctacgagaaggtagcagattcatagatatgaagaagccaagttcatagagcaataccttaagcttcttaacattgtctttcaatgccttcttggcaagctcggcttgttgtgacattggtaatgtatcaacactagtagctgggccaatggtaggagcgacagaaacattcggcattggtgtcccggcatgataagcatacatctgcggttgctgttgtggcagtgtctgctgtttagaatgcaaaggcacgccaatcccattactagttacagtcctatgcgacccttcgtccattcttttaccaatacccttcttaaattgctcctcctcccacaacttatcttcttcatcctcatcctcataaatactacttgtcgtggtttctttagcagtaggattttcatcaccgaaatcaaacacacctttcttatcatctttctgaggtctcggaccgacgaaaattccctgaaaatccgcatcctcgtcgctgactccttcaacagcagaatgatttacgataccaccatctagtgatatgtaatcaggcgccggtgctgaacgtgactgcctcatcctctctttcttggctctaataatcgctgcctgatcagcaaacgcatcttcatgctgctcttcttccccttcctcatcgaagtccaaatccgaaacctgtttaactacatccttcagactctgctgctcatgatcctgcggaggtttgattaaacccttaagcactaccttcggctcggcattggcactagagcgagaataaggaagcgtccgtgtgttcttctggagctcgagcagcgcctctttcgaataagagccggcctgaggaagcacgttagaagaagcgggacgacgttccttggttgaagagtgtctgtgagaagatcccgaaacgccgagacgggaagaggatttgacacggtctctgccgttcttaggctttatcgtcacacggggagctccatcttcttcctcctcctcgtcgtcggcgaaacttaggagtttcttcttcggggccgaggctgagagtgttttaggtttcgaggaggaaagagtcgaagtcggttttgacgagggggtagcaactttaccgtcaatttcatcgccgccgtcgtcccctcgccgccggaaattcttaggacggttacttcccattctctctctctctctctctctctctctctcgaattagggattttacagttagggatccaaactttgaattagagaattgcaattgaactaatcctttgctttgcttttatgatcctcttgtatgtcatagaaagaaaaaaagggacaaatttaagaaggaaaaatatataaatttcacaattgttttcttttttaattttaaataaaataggaattttttttcttgttcaacttcaaattcgtttgaggaaatatttttactgatcggtaaattacttgaataatcgcattaatgtgtgttaccgatcgaaaccattgtttcaaatgcaacttgctaccataaagcacaaacaaacaactaaatcgaaatctgcataatgcaggttattgatggaaaaaaggacacttcaaatttaagtagacatgcaatcagttaagtaggccaactataacaaatcaacgaatttagacatgaacattgaattgaaggttaaaacgccaatattagaactagtgagtaggaccagtgagcaatacaagtctgagataaacaaaggtaagtgcaattgcaaatgctaccattcaaactttatgtacaatgtaacatcaatagaagaattatgttgcaaattgcattttctttttcctttttgttccttccacttatgggttcagaatttgaaaaaaaaaaacagcttttaccttctttcgtttgctttccataccaaaggaagcaaacaaaaagaggctgatgaagaaagaagaaacaacataactgttaaatagttttaagaaggtcattccttttttttttatcataatcaattcccattgcatcggtgaatcacaccattactgctacttccttgcactagcttcttcttctggttttgttggttaatccggtcaagtccccatatccttattgttccatcatcgcttgctgaagccaacatgtgtagattcgtcgggctccagctcacgcagttaactgctcctgcatggcctggtagctcaactattaacttccctgtagatctgtgccatatatatacctgcacataacagaattgtggaccaatgtcaccaaaagccgcagagggatcaactaaataacaaagcaacttttcttcgatactgaaaaacagagtggatatttggtttatgctctgtctaaactgattacattttgtctagactgtaaatcctaaaactgcatagattaaacgaagaaagaaacaaacaaattccttgttctgcaaagattctgagaccagagacccgaatttcatcatttattaattatcatgttctgtctaaattgataaaatgtagaatgaagcagccactacccaattcacagaataattcagagaacagactggattatcaccatttgatttagctatttcctttcatgtgctattgtgatgatactatgcgaataaaagagtggattttacctgagagtcctcgcttccgctagcgatgaaagcttgtttatacccaccaaagcatgatctgatgatgaatcgtgaacgcttgtggcctttgtatctcgacacaatcttggggtcaccttcaatattccagagacggatttcctggttgaggaggtttaccaggatatatttgttgtcattcgaaagcgagaacgaggtaatcatgtcttcctcttctattaatctctcaactgtagcttctctatcaaatagtgatatcacggaatctttgcatacacttacgagccactttccatcatccgtcattgctatatctgataccttttgagtcctctgacctttccagcattccttctctctaccatctaaatcccacatgcagatgcttcggtctgtcatcccggcgattatcccctgcccatcaggataccatccgcaagaaatgggactgataccgcctttttcatacatgtgaacacagtctcctgaatcaacatcccagcgtctgataacctcttctgctccacatgtaagaacttgacgatcatcaggactccataagatggcaatcacgggtttgtggtggccaacaagtgtatgcttcaatgaaatgtgcccatctgcgctgatctgaaaagtacattctaagtgaatcagcaaacaggttgcctcaattggaataggtaacaaatcaaaacttgaacaggttaccaaaactcaattcaggcaagccttaattggtcagtcagaattacctcccatataattgcggtttgatccttggaagatgaagccaaatatttgccattatgtgaaaattgcaagaaccaaacttcatcggtatgtgactccaagatctgaaccattcacgtagagagaacttaacgaatgtgatttaagtcagtaagcacacatgcactgcaagtctgactaaactacaaccagaaaaagatgccacacaagtaattagttaatcagaggaacatgggtacaggtgacagcaaaaagaaaagaatgtactacatagccaatgatggaaaaggaataaccgaaaaagaaaataggcatcagattgagacaattatcatcttctatatctttctcaatgacctgtcaaggaagtggaaacgtttgcagaacattgtactgtaaacatctcagctaaagatatgtaaatctcttatagtaccgacaaactcatgaatcagatcaccaagaaacgatacaacaacaagaaggaaacggaagtaacattcacagcagagtgtttagtctaacctgagcagtctgagaaggaatttggtgcttcccgcattgatgatcagaatacaaagacaaatcactatccaaagtattatggaaaacacaagaatcccgctgaatatgaagtgaattctcaactaaacactccaacctcttttctgggattataacagaagcaggaagcaaggtttgcagttcctccaaaaccttagaccttgaattcacactttctttacctggagtcgaagtggtatgtgatataaagcttgaaggtgatataagggaggaagcgagctcatgaacacgctttgtattaatacgaagaggcgccatctcattccttaaggtgcgtagcgcatcagctatcttttcaactttgagaaactccaagaacttttgctctaggagcaagaaagacgcagccttgacagccttctcatcagggaaaccgattctgtgcaatgttttaacactttgatcccatttgccgtccttaacctgctgcagaaacagcttaatggtggaattgtgcagagagataccggattcttcctccaacatagccccggttttatcatatccaagagaataaagagccctagtgataatcctaacgaattcagattttctaatgacccctttggagccgatagtttcgtcatccccttgggagggcagaggccttgccatcaggtctcccaaagagttgctgttcacactactacctctaacagacgagttcgcggagaagccgttcggttcgtcagcaagcctcttagcacgtttcaaaggaggttcagtatcctccacaactcccatgaaattcctagttcagcccatataaatcttctgtaaacgagaaaaagcattaagtgactgcacattagatccatacaaaaaactgaaaaattcaaaattcacttcatttgaatgccaaaaacatgaactttagccttgaaataaagaatggattaacaaattcccatgtagatctagtagcaggagatagtgactatagtaaggagattagcattcaaacatcaaaaacaattagacaagtgaatcaaacccaattgatcaaaacgacaagttaaatgcaatcgaaacaatcacctctgaattgttacaccgacgaagcaaaaaaacaaaacagtgaatcgagatacgcacaatcatttcaatcaaattagtcagtagcaaaactactcaataaacacacaaaattgacacagtgcacctacaagaaggatccccaaataagattagcagtaacaaaaaaaacaaatcgtcaaaatcatcatcaaacttaaatagaagaaggatcacttggggatgaagatcaattaacacgatctaagaaggacaaaatcaaaagggagaaaaatccaatcttaccaaataagaagcaaaacccagataaggtttggcgatggcagaagaaagagaaagagatagtgattaaggaacagcccggaaacaaaggagggaaggaagaccgctatagagatttaggaagcggtgaggagatgatagaaagagagagagagagcaagttctggaaaagagaagcgttaaagaagatgaaaaggagagagagactcaataagaaaggcaaaacaaatattataaaagaaggcaatagaagaagcaaagggcagaggcgtggctgatcacaggctactctcgatctaatatatagtcccaacaaaatcttatgcattttcctttacatttactctattttcttttatcttcacattaatatttctgatacttacttaaaatacgttaaaacggtgtcgaatcagcagatcaaacggaacaagcggaataaatataagttttcgtttatagaaaactagttttgaaatgattgtagataaacaaaacagaaaaaagttaatttcaatgatatcggtaatgctattcttcgaggattatttggttgtgttcaacaagtaatttaatcatatatataggcggactagagaaaggaatgctttgaaaacaaatatttggtgcggaaggtatgtgatttggcagaattgtcttgtgtttttagattgtgttcaaatcttatgtaacataggccgcctttatacatcaatacgatgccaaagaaatgtcaaagcaaataatatatagaaatccaactaaaagcttggaagaaacaaatattaagggtttctttttaaaacctttatgcattgtatttggtaggtgaactttgaatgacaaaatatgtgacatggtaaaagatttttgatggcgatacacgtttgacgtttaccttagtccttaagctgcatgtattggtttaggctttagacgtttagtctcgtgttatcatacatatgttataatccgatgcgtggtgcaaaatccgcattaattgaccggaaataggagaaaatgagctagtaggaaaaaaaaatgttatcatcagaagtttgtatatgaaaacccggaaagaaaaaagcttctccaaagactggtccgccacgtatgacgtatcgtttgtgattccgttggtagaatcgtaatgcaaaattatccaaacacgacaaagacgatacacacgaatttgcttgaacaataataaacaaggttctttgaagaaaagaaagtaataaactatgcacggcactaggagtagaaatgattgaaaccctttaacaaattgaactcatcttgttgccgaagttatacagataacgtatggaatatgaatgggtttgcgattattagtttattggactttcaggccctttttagagaaaattagtttcctcctcccgaaatagtcctgcattatggaccacattatgggcccatattgaggcccaccttaatggtacttatatactattttgtacggaactgattgatagacattagacacggagacattgttgtcgttcttcgcagacatttcgattttgaagacaaatcacaatgggagaagcgcctgcccagattccgacgagtttcggccacgagcttagggcttgtcttcgatgccgcctcgtcaagacctacgatcaggtctggattctcttgtcacttgtgatttgcgtgtttcttctcttgcgaatattttttgcctaatctggtttctccaacagtttagggattctggatgcgagaactgtcctttcttcaaaatagaagacgatcatgaacgcatcgtcgatgttacaactcccaacttcaatgggtatggcttaaattcgaatccttactttgaaaatttacatggcactgttcataagtctgtctctcgtacttgtcgttacattgaaatttctgaacctagtctatacttatgattaaatcgtatagtctatacttattgagaagacttattgttggtcgctaatctctcgtttttttgttgaatgagtcgttgcaaattgtgaaatcactgtggtggatatgaccataaagtttgctgctttacgttaaaatgagttaatagtaacagagatgatgctagtgttgattatacttgtcatttgttgatgtcacgtccatgtaattatgtattgatataatgaatgtttttgcagtataatctctatgatggatccacgcagaagttgggcagcaagatggttaagaattggtatgtttcagctctgtttcctgatcatcctcattgtcttttagagtttactatactgtgtagcttcttctttccgtttcctgttattcttgtctcaccattatactttataaatggggatattagtgctgaatttaactgtgttgtctgcatccatttgagcggtagctgcattctgatttgctgtgtgtttatggcttgatgacctgatgttgtattccctaatattgccagctttgtttcagacagaagagaaataaatctaacacattgcaatatcttgtttccagggaagtttgctcctggttgctacactcttgctgtctcagaggcactcccagaggaaatgcaggtaaacatatttacttctcttagaaacctaagaagggattaataagcaaatccttagctctgttttcgtattgactgttcgtctttttcacatgtatgtggcggaaatccgctggcagttcatatgccaacaagcacgggtgcagtacgttccacccaaacgtatttgaaaccttttgcaggttgcagcaagtgtctccatattagcatctctgcaagtcgtcagtttcaagacaacttagtccgatggaggttatgaatggaagtagttaagttttatgtactttgtttctgatttcaactaatatagagagatttgatcctcttattgttatcaaaaactcttatttgatccggaagatagagatagattacattttttttttcaagtatggaatggatttcttttcctgtgatattcagtacattatttgaattacaaaatgaagaaactttaaattgagcacctagcagaaatgtgtggtaccaataattcacagaaaaaatgtcaactacgcagttgatagaagaagtggctccttaatcaggccaagagggaaacaaggagagatatttattggtttttggaatatgaccattgaaattcccaaagaaccgaagaaaactatgggaaaatgtataaaatgcctgtctttataccaaaaaaatataagacccacaaattcatggatacaaagtacaaacaaacaaattatacacaagaatcatcttccgatccaaggtatattcttctgctagagtaaatcatggacgtaacatgcataattaacaatggttacttaacaacaagtagtaatgaaaaattgaagacgttcagtctatttgggcaagaggcaaatattaattttcgttactatacgtttattttcttggcaatttagtttaattttgtttaggtcaaaggcaatttattttgttattaaaaagataaattagatttttttagaaaatagcctttctatattaattttaaattcgagttcacgtggcggtcgctaccaaacttcgctaaactttagtgctttactccaaaacccagagtccatcacacaagtccaagcccgaaaacaagggttcttgctccgacacgacaacaaatccagattttgagcttaggtaaactcctaactccccttatactctcttcttattcaatctaccttgtttctatgccttgaatccaattcccagacactctggttgcttgtaatctatgttcggttgagagtgaatctgtgttcgatcgtgtgtattaatacctccttctttggttcggacatggatctctgtctataaataacgggaaatctagactttaagtatacgaatttgagaaatttcgattctttcgcttgttttgttgatgggtgtgagtttttatgcttaaattctttttcgttgcagggaaacttgagaaggagaaaaaaatgtcgaacatagacatagaagggatcttgaaggagctacctaatgatgggaggatcccaaagacgaagatagtttgcacattaggaccagcttctcgcactgtttccatgatcgaaaagcttttgaaagccggtatgaatgtggctcgcttcaacttctcacatggaagccatgaataccatcaagagacactcgacaacctccgctctgctatgcataataccggcattctcgctgctgtcatgcttgatactaaggttaaacctcccatcttgtgtttccttttgcaagcctcttgtgaaatggattctcttgtcctgtgaaatgttaaatcttttttttcagtgtttggttattattgttgatgtgtgctgttagagtttatatgtatattcaagaccatggcttgatcatggattttgtactatctgaatttgttaaacaagcctagagaaaacattttagaggctaatcacttatgatttcgcttgttgaattcgcaggggcctgagattcgtactggtttcttgaaagatgggaaccctatacaactgaaggaaggtcaagagattactataaccactgattatgacattcaaggagacgaatcaacgatatccatgagctataaaaagctgcctttggatgtgaagcccggaaacaccatactctgtgcagatggaagcataagtctagctgtcttgtcatgtgatcctgagtctggaactgttaggtgccggtgtgaaaactcggcgatgcttggtgaaagaaagaatgtgaatcttcctggcgttgttgttgatcttcccactttgacagataaggatattgaagatattctcggttggggtgttccgaacagcattgatatgattgctctttcgtttgtccgtaaaggttcggatcttgttaatgtccgcaaggttcttggatctcatgctaaaagcataatgctcatgtcaaaggtacttcaaaattttcacgtatggcgattgcattttatgtatattgaggtataaatctgactcttttctctttgggtttgattttgtaggttgagaaccaggaaggtgtgattaactttgatgagatcttgcgtgaaacagatgcgttcatggttgcccgtggtgatctcgggatggagattccgatagagaagatcttcttggctcaaaagttgatgatctacaagtgtaaccttgcgggtaaaccggtggtcacagccactcagatgctggagtcaatgatcaaatcacctcggccaacccgagctgaagccacagatgttgcaaatgctgttcttgatggtactgactgtgtgatgcttagcggtgagagtgcagcaggagcttatccggaaatagctgtgaaagtcatggctaagatctgcattgaagccgaatcctcgcttgattacaacacaatctttaaagagatgatccgagcaactccacttccaatgagcccactcgagagtcttgcatcatccgctgtacggactgctaacaaagcgagggcaaaactcatcattgtgttgacacgtggaggttcaactgctaatctcgtggctaaatacagaccggctgttccgattctgtcagtggttgtcccggttatgaccactgattcctttgactggtcttgtagtgacgagtcacctgcaaggcatagtctgatatacagaggtctaatccctatgttggctgaaggatctgcaaaggcaacagatagtgaagccaccgaagttatcattgaagctgctctgaagtcggctactcagagaggactgtgcaaccgtggtgatgcaatcgtggcgctgcaccgtattggagctgcctcagttattaagatctgtgtggttaagtgagattacagacttctttcaatacctcaaatcttggattgttggtaatcgtaactgagattttgctttgtagcatgaaataaagaaaacaggtcacaatagttcctgaaactctgttacttttaagatatctctctctctttttttttctttctatttagtatttcaagtttatggatcaaaatctgcttcttatggctcagtgctgacctttgcatgcataacactgtttacttcataagctttgcttataaaagattaagcttcaaaggtgttaaattaaacatacagaaatggagaaagccatctataattgattgaacaagatccaaagaaaagtatgtttcttttagctgttcagaatcataaatactcttctaacttctaaatcaccagatgatctacgtgagagagattcgtgctggactctgcagtgtaagaaaagccgcaagtaagtcaataacgaaggtatagaagattaacaatggtgccagatattctcgagatcacctgttttgtgaggaatgttccttgaggatatattgaactgagcctgatgttgtttattcctctgtgttgtgtattgaagaataacgattagtgttataagttaagttgggacatatttcgacaaactgaataagaatagtttgtggcagatgcttacaaattataaaactagcggaattcatcgtggaaaccataatcatcatcagtgtcatcttcatcgaaaatggcactgtagaagacgtatggatgctcaatcatctctgccaaagtcaaacgtctatctttgtctgaatccgcctggacgattagaaaaagaagagataaatcataaatgtaacatggaacaattcagcagctaaatacaccatttatttggaaagttatgtacctgtgatattatataatcagcttgttgctttgcataataatgctcagtaggatggattttactgataatgggaagcaattcaacgtctgataagtacctgtagataagtggcaattatgttaagggatgtatggtattaatggaaatgctaatcatggtgtgtactcgtatattacgaacccgtcatcatttttgtcaagctgagaaaacaactgctttgctgggccttcaggcaagtcatggtaaggatgcgtagaattgtgattgtcttcttcgtagttccttacagtgtcaaagaggccgtggaaaaactcttcgaaactgatcttcccatctttatctgaatccctttctctgggagagggaaggaggggaatccgttgataaacattaagctaaaagaaaggttcctcggaaataatcatatgacaaccgtacattaccttacttcctccttgcataaccataacagtaactttgggttcttggtgtcagcaggatgcagaaagctaagggaattaaccagcaaaaacattgtgagaaatagaaagaaaaaataactgatagtactaaaaacctgaaatagctcggttgatttctatctacactagaagaaaacgcttactcgttaaactctgttaaattcagaagaccatcaccatttgcatctgatgcattaaaatgctcctccttccaccagcccatatcatagccaaacgaattattatctgttaaatttataaccaagtcagctagcagtcctaagagacaaaagtgagatcatttgcttaaaatcgcaatcaaactgtggtccagaataaggaaaggattattatataggtcataggcagaagagctagaagtgaaacacagattaaagcaaatctacttacaagactgtcatcaaatatttctacatggtcatattaagtagcaaacattttagtcaatgaaactcaaagacgaacaggaaacagcagctcacccgacttacggacccaagacggtggttcatattcagagaaagaaataaaaccatctttgtttctatcatgaacatccaggtctcgttgagttctgtgcacaacttccttggcagaagactgcatagtccactcagtcaattcactctccgtcataaacccatcagcaggagaaacatcaatcttcggaaacaacaatatcagcctgcaaagtaccatagcaatcaaactcattccttacaaaaatgacatctttagtaaatgctaaactaaaatcttcaaagatccaaactttgaaggaaattgaagtacacattgttgcaattagcgctcaaaatcaaagattgggaactgaagatatatataagtataaccaaacctatcagtgacattgaacttctcctcatcatttaagtaatcctcagcatccatgaattcttcccactcaggctgcgactcgtgaccaggtgcatgttcatgtccaccaccggttgtttctttctgagaatgagagacaagctccgggtgagaatgctcaatgtactgtcgctcccactccttatcctcgcggcggcgctccatgtcggcgacaagaggatcaaacggaactggatcgtgacgagtgggtttgaaattgaaagaagaccggagttttaagcggtgatgttgattgtgaccaccatggtggtgatcgtggtcacccttcttcttcggtgaataagagacgaggaagagcaccaggattcctaccgtaatgtataggatcaccgaagctttactcattgggtatttttgtgtaacagaagtagaaaatctcagcttgaaaccctaattttgttggctgaaagttgaggtttttacacttgggaagtgaagaagattagatctgttggaaagatggagtcttgcgaatatatatctatagaagattttgactctagatctgttacgaccaaattagtcaaatggtttgtagtatttaagagagagcccacaacacacatcaatattgtacatttatttctctaaacgcaatttaaatgattaaacgaatttctgctaattttgtcatttcgagaagaattgaaacaaccgttggattcactttcaatcaaagcttaataattgaaaaatctagcagattacactccacgtggtccagtccaccatcttcttcgtttactccttcctacatcgatattatacacacatgcgtgtgtattggatctcacgatttcttatcaatggaactcgcttctctttctcagatccccatccaaatcgttttataggtagattagatagataaactacggatatactcgaactctatccatttacggtattgatttggaaatatggacaagtatgacgttgtcaaggatctgggagctggaaatttcggtgtggctcgccttctcaggcacaaggacaccaaagagcttgttgccatgaaatacatcgagagaggtcgcaaggtttgtttttttcctttttgttcttactatttttgggttctttctgttttgaattggggtttaaagtttttacttttagctcagtgtgtatgttcaaattcattatttgaagtctccttgctatacatttgtaggaaaatttgagaaatttggggttttgataacaacagatcaaaatgatgatgataatttagttttggattgtttggtatatattgatcatggattgcagatagatgagaacgtggcgagagagattattaatcacagatcacttaaacatcctaatatcatccggttcaaggaggcaagtctcttttttgtgtggctctttatagtttatctaagagctgtcttgggatctgattttgattcggttctaggtgatcctgacacctactcatcttgctattgtgatggagtatgcttctggaggagagctctttgatcgaatctgtactgccggtagatttagtgaagctgaggttgctttctctttgtaaagtcatacactttgatccatatattttcttcaacattttctgtgatcttatttatgtgtgtgtataagtttttgcttttgatcttattcatttcaggctaggtacttctttcaacagctgatttgtggtgttgattactgccattccttggtatgtatatagtagttcttagaatatacattaagctgaaaaggaaagttatgtgctgcctaatgaggcattcgtggagtactattgatgtttttgttcccagagtctttgtttgagatttggaatttaatgcctctgtccttgtgtaaccttcccctctcttttgcttctgtgcagcaaatatgtcatagagacctgaagcttgagaacacactgctcgatgggagccctgctccgcttttgaaaatctgtgattttggttactctaaggtctgcacttatccatttcccttttcttttctttgctcagtttttctcaatcttcaatccaaaacagattagcatgttctttaatcaaaagtattatctattcactcctctcttgattcttatatctttgtcatgttttcaatttgatttctatggtgtagtcatctatactacattctaggcctaaatcaactgttggaactccagcttacatagcacctgaagttctttcacggagagaatatgatggcaaggtacagtatttttgtcttgttatacatacatatcagtttgtcattaacgcttgattggttgtcaaagtaagcaaataatgtcatcaagggaaaatatgaggatagaaagttatagactgctcaaagatccaggctatagagtccttctagtatatcttttttagtggcatggtctgtgtgaaacttttcaggttattgtacttctaataagatttaagtggggtcttaattaaaaaatttgacggggtgctaatcgatattttttccatgattgtcataagagcacatacactggttttggctctcatatatatgactgcgtttttgtagcacgcggatgtgtggtcatgtggagtaaccctttatgtgatgctggtgggagcttacccgtttgaggaccctaatgatccaaaaaacttcaggaaaacaatccaggtaactccaccattcaacaattctgatttacttctcatcttatttatcaagtgtctcaatgatatcacaattcaaatggtattctgcagcgcataatggctgtacaatacaagatcccggactatgttcacatatctcaggaatgcaaacatcttctctctcgcatattcgtcactaactctgctaaggtaacttaacaattccggtttcaaatttctagctatatcttgtgaggaagatatcttgcagttctgattgttgccggtaacactcttgccagagaatcacacttaaggagatcaagaatcatccgtggtacttgaagaatttgccaaaggagctgctagagtcggctcaagcggcgtattacaagagagacacaagcttctctcttcaaagcgtagaggacataatgaagatagttggagaagcaaggaatccagctccatcaactagtgctgtcaaaagctcgggctcaggagctgatgaagaagaggaagaggacgttgaagctgaagtggaagaggaagaagatgatgaagacgaatacgagaagcatgtcaaagaggcacagtcttgtcaagagtctgacaaagcttaaaaagaaaaatgctctctgtttctcttactttatttcttcttcaagaacactccttggtgagttggtgacttgcttctggtaaaaagaaaaacacatttgtcaaagccaaaggctgtaaactacgtgctggttgtttcacttttagattgatgtcgttgtactgagtaatgagcatgaaacagaaggtttatattattatatgatactatactataggttttcgtctttgtgatgatgatttcagttcacctataaaatccgaataaaccgaatctgaacaagatttataaaccgaaaatctgaaaaaccgaaaagaacgaaccggatactaaccgaaaccgggatttgaacacttaaggttaagggtcgagaaaccctacgaaagtgtatctctctcaatctcgacaggtttcaaaacagagacagtcatgggaggaggagagaagaggaaatctagtttcaaaaacctagctaatgcaaagaagaggagaacaggacctcacttacctagctcaatactcaagaccattgcgaatgagaaacgtcctttgaactctgacgaaggagacgatgagattgattctgcttacggtgatttttacgagtacgaagaaggtgtgcctgaagaggaatctaggaaaaacaaccgctacgaacgcgtcgttaactacgaattcgagcttgcagaggattgcgaggtttttccaagtcttactattgcaaattctttttcttttaagttgctgttaatcgacaagtaaagttgtttgggtaacacgtaataatctaggttaaaacttgttttaaattgtctctttttcaaccaaaggatgaaaacgtggagtcagaagatgatgatgatgatgatgatgatgatgatgatgataggcactcacgaatgttgaaaaatgtcactgaattgccaatttcagcctttcaaggtattgagacaagtaaaatttgagacagagttttgctttttttatcttctcttcagtgcatttttaagctcgatcttatactcttctttttttttttaaggagagagtaagaacaaacgtgtagtctttactgaaccatatccagagtctgaattcaatcctacccgtgatgttctggagggtaaatccctcaccacaattgatgactttatggagcctcttcaaggattacatggaaatagccaactaagcaatatgatctcccggatgcgaaaagatacgcagtctcttgttcatgctcctctgccaaagccagaacaagaaagactggaacgggatgtagcgaatgaactggtttacaaggggtttgatatttgggtgcctctggtaaaaaggaacagagaggcaccaactatttactttaaccaagatgtcaatgttggatactctaccgttggtgctatagcatcacaatttcatcccaggactgaatttgagatgaaaatggcttctctactcgatgatcatgagattttggaggctcacaaagaagatggagctaggcttcttgaattcaacgaggtaagttttgtgatctagttcataattccctgcacgcagagcttacttgacttgtatgaatatctgatgtaactgtttttttatgttgcaggtatctatggaagatcacatcaagagacgtaaccatgttgctaagatgcggagcatgctcttccgagttgacctgaaacataaacgaatcaagcagattaagtctaaaacatatcatcgccttaaaaacaaagacctgaatcaatcgggtgttggagcattcatggagccagcaatggctaaagaagaggctaagaagcaggaggcgaggcgagtaaaggtgagtctataatttcttcactgattttttcatcaagacagtgtaaacaaagtgataattgtcttatttgttcctatgttatgtgcttatatgtgcaggaacgtatgactttaaagcacaaaaacacaggacaatgggccaaacgcatgctaagccgtggactgaataggaaatacgatgtgactcaggcagctctatctaaacaacttcaaattcatgctactttgtccagaaagatgaactccacaaaagatgaaagtagtagtgatgaggaagatttgaatgatggttcagatcaggatacttctaaactgatagcggaagcaaaggagaagatactgaaaactgtggacgatgatgaagtccccatttctcgtcttatgtcattacctttcatggtaattcttgctttgttttctcaaaacacttttgaatgtttttattctggttttcttttcccgctcattcatgtttttggtttggttaggctcgtgctgtgaaaaagaaaaacgaggaagctaaagaagaaggtaaacgtgatattgaggagttggagaaatttggtggagcagaaacctctaaaaagtccactaatgttgttggtagaagagtatttggtgcagaagctccaaaagagtctgaaaaggaatcagacaacctttttgataacagtgatagtagtgacaatgatatggaagataatgagttagaggctgtaaaagataatgcttcacctgctagaaacactgaaaccattatggaagccgaggtacgttctccggttagtcattatggttctttcttctctccctttgaaaatctctgattaaaacatctgttgtttgatttcctgcagaagttggatgatattgctggaaacccagcatctaagacaacatttgatgtcgccttatatgcatcaggctcctggaagaaggttttgtgtggagaaaaatattaatcagaagacttgggtctctctttgttaactcttttttgtatgttatgcagatgacaggctgcaaaaacgcagaatccaaaaaagcttcaaagacgcatgtgcccatttcgcagtcccaagataaaaaggtttcttttcttcaaatcacaatggaatgatactactaatttcttccttaatttatccccgttccagttttagcctactcatgtgtttttctttgctcgctttgtgtatttactctttaaaatcatttaaggaatcgagtgattcagaaagtgatgattcagaaagtgatgattcagagagtgaagcagagcaaatggttgatgggattttgacatgcggttcaaaggaaacgtatgaaattccttgtcaagcagagcttgtaagccgtgcttttgctggtgatgacgttgaaggtgactttgagaaggataagcaagaggtactaaatcaggaagttcctgaacccgagaaaccggttcaagttgctggttggggacattggaccaataaccaaaacaagagaggtttaccatcaaggattgttagagaacacgaagaagccaagaaaacgagagagcaagctctcagaaaaaggaaagacgcttctttcaaacatgttatcatatcagaaaaagttgataaaaaggtcagttctgtctcacttaatatgctcatttataaccatccgatcgattctcatgctgacataatctatttttgacaggctgagaaacttcagacaaagagtctaccttacccttacacatcaaaggaagttttcgaacaaagtatgcgtatgcctataggacctgagtttaatcccacaactattgttggagttctaaaccgacctgaggtacccttttcattactttgttaaaactctcatcattagtagtatacccatttcgcaaaatgttgcattttcttaatcattttgtgtgcaggttgtgaagaaagctggagtgatcattaaacctgtcaagtttgaggaagtaaatccgaatgacgaacaccctcgtagccatcagaaacaaaaacccaagaaaaaaggtggtaagtaaaaccaatagaggtcagagcaaagtaaaggaccaatgattttgcattctcaaacttatttagacacaaaactttgatcccaacggtaccatttttctttgtattttttgtcttatttataaaagaaacatttaaaaaggttttatttcatagctcttcaaatccttgttcatcaccatttcttccactaagaaaaattgaaaactttttgtctccgggctttggtatgggccacttaggactgcactaagtattgagcctataaggcctttgtgtaactctgttaatattatccagctttaaaattgaacactcgacaaagggtaattcagtaattataaggtttttcaaaacacttgtcgttttgtttacaatttacattttaagcaatgggagcaaactacataccgtttcttatctgttgcacgaaacggcatcgtttactaccaattatctttgcttcatttcctatccctttaaaacccttatcgtgttttttgtttcatgtaaaacccctctcgacattttgcgactcttcttctccttatcctctaaatctctcaccggtcaccgacgacgggaacttggtagttacaggaacaagaaatgtcctcgaagttccctctcggtgtacgcttcatcactcattctcttccttgtactcgtctcgcttccatgaattctggcgcccttatctattcatttcgttccgttcctgttctatccaaagcctttccttttaggttaaagtacattggattaggttcccgggtcaacttttcaacccgaccagagagatctcaacccgaattcgcgcggcgaagtggagctggaggagagattcgcgcgtccaagagcttgattgaggatgaggcagagcttagtgattgggtgagcgatttgaggactagttcgttgcgcgggaagttcacgagcgacgaagataacgcggatccagaggtggttcgtagaaacgtagacagggacaccagtaggggtccaaggagaggaagggaaggccaatctgataggttcggtggtgcgaaaaggggaaaggaaggtgaaatggataggtttgggagtccgaacaggaggagaaccagcggcgagcctgctgattcgttcgggaacaagcggttaggtgatcgagaaggttcaaggaacggtcgtgttcaaggaaagagtagtgagtcgtcttttcgtggaaggagtgatagaaatgtagattcagggtcgtcttttcgtggaaggagtgacaaaaatgttgactcagggtcgtcttttcgtggtaggaatgatagaaatgtagattcagggtcgtcttttcgtggaaggagtgatagaaatgtagactcagggtcgtcttttcgtggaaggagtgatagaaatgtagactcagggtcgtcttttcgtggtaggaatgatagaaatgtagactcagggtcgtcttttcgtggtaggaatgatagaaatgtagaatcagggtttaggagagagccaggttccgaaaacaacaggggcttggggaaacagacaagaggcttaagcctggaagaggaagatagtagtgacgatgacgagaacagggttggattgggaaacatcgatgatttgcctagtgaagatagtagtgatgaggatgatgaaaatgatgagcctcttattaagaaagcggcttctgctaaggctgttcagactgataagccaactggtgaacatgtcaaaacttcagattcttacttgtctaagacaaggtacattatttttcactatgtgacttactttgaccatttagttctgtttgattgataatattctttatggtacatggtttacagatttgatcaattcccactctctcccttatcgctaaaagccatcaaggatgcgggatttgagacaatgactgttgtgcaggaggctactcttcctatcattctccaaggtgaacttttcttcatgagccttgtttacgatgcaaaaagaaaaaatgccatgatttagaaatgtagtgacaatttctaattgacgacatctcacaagcttttacaaatcacgttggcaatagccaataggtatttcaaagacaacttaagaatcttgagtatttctcttccggatcccctcaaatttgccatgactgccattttgtagcttgattgattgtttaaattcctcttaactccttggtttcttccatgctctgtttttccaggtaaagatgtcctagccaaggccaaaacaggcactggtaaaaccgttgcatttttggtgagacattgtactctctgggttcatggatatatgttggttggataggaattgattgggcctttgattgggatatgttcttacttcttatcgttgatgtttatttttcaagcttccagcaattgaagctgttatcaaatctcctcctgcaagccgggatagtaggcaacccccaattattgtgcttgtggtatgtcctactcgggaacttgccagtcaagctgcggcagaggcaaataccttactgaagtatcacccctctattggtgttcaagttgtgattggaggcacaaagcttcctacagagcaaaggcgtatgcaaacgaatccttgccaggtaataagaaatttcttccgtctctacaggtgttttaatttgaagttaattatgagcaaatcttgcacttcccttaaactgcgcttctaagatggctgcagataccgtgacctatatctatatattgttgaataatcacatatttgaacactctcagatccttgtggctacacctggaaggctcaaagaccatattgaaaacacttctggattcgcaacaagattgatgggtgtgaaagtccttgtgcttgacgaagctgatcatctcttggacatgggtttccgaagggacattgagaggataattgccgctgttcctaagcagagacaaacatttttattttctgccaccgtacctgaagaggttactgtcactttctagtacaaaggctctcattttttgggttggaatcttgaactgtgttttttggtgtcaaggtccgccaaatatgccatgttgctctgaaacgggatcatgagttcatcaattgtgtccaagagggctctggggagacacatcaaaaggtaaaagatttctctttagcttaatttgagtgaatggcctgccatatgattggatgttatcagtttcttatgtttgttttatctccaggtcacacaaatgtacatgattgcatcactggatagacatttttcgcttctacatgtgcttcttaaagaacacatcgcagataatgtggactataaggtaacattatctctctagtgccattatgaataaccaatgtctgtatttctgaactatcccgatttcgttgctgttgtaggttatcattttctgtacaactgctatggtgacaagattggtggctgatctgcttagtcagctaagcctgaacgtcagagagatccattctagaaaaccgcagagttacagaaccagagtttctgatgagttccgcaagtccaaggctattatcctagtcacatctgatgtatctgctcgtggtgtggattaccctgatgtgtcattggtcgtacaggtaaccatagttttctgacatggaattgttctgcgactacaaattttatctcttttgtttaactgaagttgtttgcttttgcagatgggattgccatcagacagggagcagtatatacatagacttggcagaaccgggcggaaagggaaggaaggggaaggagtcttattgttggcaccatgggaagagtactttatgtcatctgttaaagacttgcccatcaccaagtctccactaccgccaatagacccagaggctgtgaaaagggtaagcattttcatataagcgcactcacatgaatttgtgattctactgaacttggcaagcctttcttaactcatatttgctggcaatccagaatgagtagggaacttgaaactgaacctgaatctcataacacaactctttgaagttaaaagctatgatttttgaagggtgtgagtatgagtgagtattgctgggtataataaacttgttgaattcaggtgcagaaagggctgagccaagtggaaatgaagaacaaggaggcggcgtatcaggcgtggttgggttactacaaatctcagaagatgattgcaagagacacgaccagactggtggagctggccaatgagtttagccgcagcatgggacttgacagcccaccagctatccccaaaaatgttcttggcaagatgggtctcaaaaacgttcctggtcttagaaccaagtagattttcttttttcctagtgatctgctttggttttaaaactttaatgttttgtaagtgtagacgtgtagtctcttgtcattcttgctacactcttaagacttcctaactaaaaaatcctataaaagttgccttcttataaaggtcttttgtttgtaatggcttgttaacatgagtatttcgattttcactaaaaaaacaaaaaaagtattaagttggattatacgtgtttgaagatttaacaaaacttttttctgatataaaacaacacgtttcaaagcaaagggagcaactacatgccgttttgtatatttgttgacattttgggccactcgcatctgtacccttaagccctaaattgtgtttcctacaaaaccttttaaaccctaaaataaccgacggcgggaatttggtagttgcagagccttacagttaaaggcatacgcttcaccgttctcttccgtcttttctccactcgttggcatgaattccgatggacccaaatccggtaagaagagacgagagattcgtgctaaacttgtgaagaagttgacgagtgacgaagatggctcgggaaagctagtcaaggacaacaataagagtctaaagaggggaagagaaggcaaatctgatgttgatgagcctcttattaagaaaccagcttctactacgcctctagtgactcaaattgctaaaacttcagattcttatttgtcaaagacaaggtacattttttgcgtttctttcggagatagcttcagagctattcttagtggtgtttgattcagatttctctttatggtaaaatggttcttacagatttgatcagttcccactgtctcccttaacgttaaaaggaattgaggatgctggatttaagacaatgactgttgttcaggaggctactcttcctctcattctccaaggtgaacttgcctaaaaggcagaaacttttgcatctttcttcatgattccttatgttttgtcatgacttaaacattttgaagcttgactattcctctattaattattcttccttggttttccaggtaaagatatccttgcgaaggccaaaacaggcactgggaaaacagttgcatttttggtgagataccctttttgggttcatgttggtcatttaggattacaatcagtttgattaattggggtttgttattaatgttgatgtttctttttccaagcttccatcaattgaagctgttatcaaagctcctcctgcaagccgtgataataggcatcccccaattattgtgcttgtggtatgtcctactcgggaacttgcttgtcaagctgctgcagaagcaaacatcttgctcaagtatcacccatctattggtgttcaagttgtgattggaggcactaagcttcctacggagcaaaggcgcttgcaaaagagtccttgccaggtaaattttcatttgtattaatatgtaaacttatttctgagcaaatcatgcatttccattgagctggacttctcagatgaaacttgttatctgaccaatagagttgcatatatttcttttcaaactgagttggttatccttcgctagaacaatatggactcatgatttgaatttctaagaatatgaattaagatagattgttttttaaaaagaaatggatttccctgtccaagttaggattgtttttcagtcacaggatatgttctttgatctaagcctcattatgcatttagatttttttgcattatttgtcttccctgcagtcaaagtggctgcagagatggtgatctttgtctctgtatatttttgaataataacatattttcacactctcagattctcgtggctacacccggaaggctcaaagaccatatcgacaacacttctggatttgcaacaaggttgatgggtgtgaaagtccttgtgcttgatgaagctgatcatctcttggacatgggtttccgaagggaaattgagaggataattgctgctgttcctaagcagagacaaacatttttattttccgccacagtatctgatgaggtaagtgtcagtttcttgcacaaaggctttcacttttgggttggaatcttgaactgtgtttttttgctatcaaggtccgccaaatatgccatgttgctctgaaacgggatcatgaattcgtcaactgtgttcaagagggtgctggggagacgcatcaaaaggtaaaagattgctttttaagttcatttgaaccaatggcctgccatatgattggatgctaatggtttctcatgtctgttttatctcccaggtttcacaaatgtacatgattgcatcattagatagacatttctcgcttctatatggtcttctgaaaaaacacatcacagataatgtgggctataaggtatattgttcctccaatgcctttgttaatcaccactgtaattctggattaacatgatctccttgctgttgcaggttattattttctgtacaactgctatggttacaagattggtggctgatctgcttggtaagctaagccttaacgtcagagagatccattctagaaaaccgcagagttacagaaccagagtttctgatgagttccgcaagtccaagagtattatccttgtgacatctgatgtatctgctcgtggtgttgattaccctgatgtgtccttagtcgtacaggtaaatcatgtagtagttttcaatcatggaattgaacagtatctacaaagttgattgtttttttttaccgaagttgttgttgtgtgtatgttgcttttgcagatgggattgccatcagacagggaacaatatatacatagacttggcagaactgggcggaaaggtaaggaaggagaaggtgtactattgttggcaccgtgggaagagtactttctatcttctgttaaggacttgcccatcacaaagtcttctttaccgccaatagaccatgaggctgtgaaaaaggtaagatttttcaaatactactactgtaaacttagcctgaatttgtgactctattgaacttagcaagcctttcgtaaattctattcgctagcaagtagcaaaccagaacaaccagaatgttatataaactgtattggaatatgtatgcaaaggaataagattttcacatctcacgaaactaacctcttttacgttagaagccaaatttttcttaagagtatgtaactcgagtgagcattgatgggtgttgaaaacatgttaaaatcaggtgcagaaagggcttatccaagtggaaatgacgaacaaggaggcggcatatcaggcatggttgggttactacaaatcgcagaagaagattgctagagacacgaccagactggtggagttagctaatgagtttagccgcagtatgggacttagcatccctccggctatccctgtaaatattcttggcaagatgggtctcaaaaacgttcctggtattagagtcgctccaggttttgacaagaaacctgcaaagagaaattatcgttcccgctagattttctctttctttgcctaatggtattgtttgtgttgaactttattgcttttttgaagtttggcattttggtaaaagttaccttcttaagaatttcatttggtaatttactaatttgtcaagatccggtttgtttcggagcccaaaaatccgaaaataaaaaattcagaaaaaatagaaatttctttggttaactgatcggttcatctcttccaaaaaattatctaatcggttcatcttaccgaaccgaatttgttacccaaaaagaaagagttccgattggctttttggctgaaaactaaacctgacttgtagtccttggtttgcttctgaatcatagctaggctgttcaacattgtaaattctgtcttacagcccacaggtgtgggtgtaattacctggatttgaaaatgagaactgactttcttctccgagtagttgtatactgtatagattcaaatgtcgaactaccaaattcatgttttgatttttttaaaacaaaaaacaagggtacaacgatggtcctaaatgtttattttggagctaaaacaaagatgacatgccatcaaatttatcaaaccgcactgaaaacaaaaataagtcaaaaggttttagcctaattaatctaagtcttctgtaacaaagcttagaaatatagccaccaaccaaaatcagacatagatgcaaatctgcaatgaaacattttaggaatagtaataaaacttctaatttccccggaaaaaataaaaaataaatggtacctcggtatcatagagtactgaaaagaaggtgatgatgaatggtaacagaaaaacaaaacaaaacccaacaccatctttctactcaagcgttgccttcaccataccataagactaatgcctttttgttgtaacttgtaaaaagctctactaaaccctaaaggagccaaagaaaaaacagagaagacaagctgaaaatggtaagttttggctatggctgcaactgcaactacaagcttttcctatacagaattgaattctgctacgtttagtcctctttccacttgttaacatatctcaagaaggcactagctggattttcatgtagtggagctcttacacgggtagatctcctaaccactgcttcttccatttctatgttgtgagcaatgtccttcgtcctcttttgtagtgtagagctgcaaatcacaagtcatcgccaggttttaaagccattacacataaacaaggggacttcgataaatgtggtgttactcttctacatgtgcattaaagtgagggtagaacaagttaccagaataataaatactgcagattatgcaaaatagaaatgggaagctataaactgaccatattctgtcatagaatatctctagttgtgtatataatgacagttccctctctcctttacggtttagtgaccccatcaatgcatccagctggatctcaagtaacatacacaaatcggaacaagaactatacaatccatttatcaaacaaagaaatgaaccacgtggattgatgatacctcttccttggcggtataatagccccattcttcggaatcagaattctcaacaaatattctcccattgcttcggaaccaccagtacctgttgtagtcccgatctttacccaaggggtttgtacgtatgactattttctccatctcccgctcataatattgcctctgcatgtatacaaaaaatttcagacttgatgggtaaaaaaagcacacacggggaatatatgcaaacaaccaaatataactatgaggggacggactttaccctctgttcgggccccctcctttcaaaagttcctttctcatcttcgcttgcagattttacctcctgcttcttcactgaaaatcctttctcctcttcgtcctcctctgctttctcatcctcctcctcctcttttggttcgatttttgtatccgtcatctgccttttgtgctttctcagatagacattccctataagcctatcacaaccataagaacaatgagctcccaccaagtcatccaaaaacaaaatgttctgcttatgtgtaaataggataagccaaaccttttctctgatttttcaatgttttccgaagaaacagacccattctccatcttgcttccccctgcagtgctctcattctttttgctgtcttcactgctttctaatacttgtgcgctatttttctttttctccaacctattattgtctaaaactccattagcttcctcaccagttttggaccgttctttctcctctcttatctgtcgggcctccgccaatgcttcttctcttctagcagctccaagggcatgccgttgttcaacaagctcatctatttcccccttgaacatacctgtttcggttatatggttcactaattcccttaagattttcaattttacatttgggtccaagagaccataatgtccacgtttgatcgttccaacatcgaagcacaaatcaggagtgttgactgattccaggaaatcacaaagatactctgcccacgtgatcaatgttatctgaaataagatgaaataaagcaacaagcatgccatcaaccacaaaaacaaaactgaaaaatcacaaggctggcgacttaatgttgaatgagaaaagcatattactgtgcggcctaatttgttagccaaatatgattttcatgagacgaggatctgaccttcgacttgcgactccttctctgtaaagctttgaaactatcaccacgttcattgatgaggaaccgaaaaagagaggcatgcacttccatgataagaaccaaattactctccttgtggcagacagcattttcaaagtcttcaagagaaaatcgccatagatgcagctgcctaccaaatgaggtacaaaagtcccagaccataagaagatccccaacacaatccataggaacactaaaatcccgggaaggagaaggacgctgagtgacatcaggatcaggtggcaaaagtaaatcttcgattgggtaattgatagcctcttcctcagacccattaacctctggaaagagaaaaccaacaaagagaaatcagttcaaaagtacacaaaaaagaccaaatttttctctattcctcaagtcaacaatattctccataagctcaagagaacacgtaagattattgatgtcagctataaaccggaaatgtaaatgatatcgcaaaggaacttttggccaactttagaaaacattgaaatggaaatgaattgcagagcatccatgcaaagctacctctatctgtctcctctgcaacatgtttaccattttctgctctctttctttttctattttcccttccggttttatcttcctataatttagcgatgagacaaaactgattagtacatagaccaattattaggccatgctacaaattattgtatggcggtgtactttatatcaacctgcttcctttgttgaaccagttctccattctgaaagacatatttgttctgaagttccttgggaatctttctcgtgatttcatgtgctttagccaggtaatcatttactacccaaggtatactgtggcatgtggaatctcgaatgaaggacttcagaaaatttctactaaatggaaacttcttccatgacagatcctccccaaagagcactgtgttatcatctacttccttgtttttgtcaaggaagcctacctcatactgaggtttactatccccatctgatactatcctcaagattttgcaaggatgcagttccccatccctttccccatacaactctgcgccagggaaaaagcaatcttgcaactctgtcgctattttgtcagcaagatctttcaatgaaagcgtaccttttcaaaatggaggaaaaagagtcagaaataatgctcataaaccagagatttcaagtattaagaaaattatcttacacaaacaaattcaaaacggtaaaaaggtagtcctgatttgcaaaacttatagagagaaaccgagaaaggtaaaatcaagacttggacactctgcaaatcaagacttcgacacacttatatcacataaaaataatcaatgaaggagttaaaaacttactgaattggatgatgcgtaaagcaggtgcaactagctctctgggcagagtttgaaccttcttgcctgccagtttttctgaatctaaggcctcctcgtagctcaagctagttttaccagtagacttacaagtccaaactcggttgcgatacagatttaacctcttcaagtacaatctattttatgttaagcaaacaaatagttctgacacggcatgtgcactgataaacatgaacaaccaagcctttgaagaataatatgaataaaggttgtcccagaatgaaacaggcaaacagaattacaagttttaagcttatttctctttcctctaactgcacacagaaggagaaggcaaatattcaaaacataagtcttaaaattgtaacagttacagaataaggatactgataatctcgaaagatctcatttgttagacgaacttgatagacaagttcttgaggctccaagttctttgggggctccagtagtttatgtgacttcttttttagtagaggcatccttcaaatggcaaaaccaacctgcagtgtagacaaaaatgaatggtctatataagtgattctcatattcactaatgtgaaatcctagtaaatgtagaaccaggtcatccaagcaagaagggaattgtatacaaaagcaagacgtcacagttgttccaaagcggaaaatgtaaaccatggagaacagaaaatcaacccataaggcgtttaaggtgacacaacggtcaagtaaaacttagcaaacgtacaaatttgtggcacagaatgcaaatgattgcatgcaagcctagagctgattctaatttctactgaattcgacagagcctatggaaaagcaagtggtacttgtgagatcatgtgcaaaaaagaaaagccaatgaaaaatgttaagaaaagcaatgcagaagaaaccgagatagcactaaaccctagaaaaatcgcaatcccaatcgaaattagaaaagatctgaaaccatgggacaaaattgacacttgagagcaaaggaaccaaaacgaaaccgaggaatcaaaacacatacccaagagagatcgagaaaaagaaagcactatcatgcgccactttcggagaatccagaaggcgaaacggacaagtaaaacacacaaaaagcagtcaaaaaagcataacaacacatgtaacaaagaagagacgaacacaatcatcaataacaaacaaaacggaacgaaaattcgaagctaatgcaacgaaatcacaacgaagaaagcaaaatcgcagaagaaaagaggatcgatgttcccgccacaacaaagaaaacgattggagagaattataaacaacgaaattagagagactcaatcaaaaatcttacggagaatgtatgaaattgggaatgcgcgtcgtcgagagagagaggtggtctctcaaggaaagaatacaagtgttgagatctcaccgtctctcttcgtttttctcttcgctctctctctctctctctcgctctcagctctttttggtcgtcgtccttccttatgggaaagacgggaaaaaaaacttaatatgcgaattagcctctcaccttttttttgttattttatatcttaagtagcactcggtttcctttttttgtttatacaggtgttgctgttttagagccctatactgtagtttttcctttttctatagtagcccaataactgggccttgtcttgttatatgggccttgaatctttagctttaaatggggttggatttgaaaccagtattttattcattgcttacgatttaaaatggtaaagccttaactctccaccattattatttgattaaattccaaatgatgtttgaccaaaaaaagaaaacttcaaataacccactctagaaaccaagtcattaaataatgtttcctgtgtaaaattcatggaccaatcgaaatgcagaagaaaatctttacagtaattagaatggccaaccaaagtttgttgtttttgtttttgtttttgtcaacgactcaagatgatatttatttgtgtttacatgaacacccgccaaaaatatgtactaaaatatctatttcaaatatggtattttatggcctaaaatataataacatcacttttttccttttcttaaaactaccaccacaaaacaacaaatcaaattaattaaattcttcatccataaatctatcaaaacttggtaccaaactcgtgagtgacgaagcctcgacgacttacacatatcaacacgtactttatgtggtagttgtctctatccagcggccaagatttcgccacgtcctcacttcctccctccttaaaaccactcgtaacaccatcccccaaattacatatccgccattgtttccggcaacgcaaactaccaaaaaaaataatggaggtcgaaagagtccaagacatttcatcttcttctctactaacagaagcaatcccgttggagttcatcagatcagagaaagaacaaccagcgatcacaacattccgaggtccaacgccggcgattcccgtcgtcgatctaagcgatcccgacgaagaaagcgtgaggcgcgcggtggtgaaagcgagtgaagaatgggggctattccaagtggttaaccacgggattccgacggagctgatacgacgtttacaagacgtcggaagaaaattcttcgagcttccttcgtcggagaaagaatccgtcgctaaaccggaagattcgaaagacattgaaggatacggaacaaagcttcagaaagatccagaaggtaaaaaagcttgggtcgatcatctcttccatcgaatctggccaccgtcatgcgtcaattacagattctggcctaagaatccacctgaatacaggtaaaccaaaacagaatcatcaaaaattcaaattttgtaaaccgaagttaaccgttggtttaatgtattagggaggtgaatgaagagtatgcagtgcatgtgaagaagctatcggagacgttattagggattctctcggatggattagggttaaagcgtgatgcgttgaaagaaggtctcggcggagagatggcggagtatatgatgaagattaactattatccgccgtgtcctcggccggatttagctttaggtgtaccggctcatacagatctcagtggaatcactcttcttgttcctaacgaagttcctggacttcaagttttcaaagatgatcactggttcgatgcagagtatattccctccgccgtcattgttcacatcggcgatcagattctggtctgaactttattatgattcttgtataaaaatgtagattaatttataaaatgtttttaatggattggttttgtgaattttgcagaggttgagtaatgggaggtataaaaatgtgttgcataggacgacggtggataaagagaagacgaggatgtcgtggccggttttcttggagcctccccgtgaaaagattgttggacctttaccggaactaaccggagatgataatcctccaaagtttaaaccgtttgctttcaaggattacagttaccgcaagctcaataaacttcctctggattgagaaaaatcaatacgagaagaataatttgtggttgtggaataggaagtggttcgttattgagttgttgttttcccgcggttgtgtctcttgcttattgttattttatgtttaaaataaagattaaaacatctacctacattgtgtgtgatgttgacatgtttttattgtgttgcgatgcctttgcaagttatgtcggaccatttttaggcattggaaagagtaggtttgtattttgtaaatttttaacctgtcacggaaaaaaatcggtgatcatttttaatgtgatataatctatataatgaaacttatttctatccaaagtccaaaccgacacattcgctattagacaaaagtatatattttctggcaaacacactcaagttgttctcaaaagaaaccaaaagttggaaaaataaagactgattttgtttctcacgtcacatatgcaaaaaggaggcaaatgacgacgacttagaccagacacagttttcaatattccaatcatatccttgctatacgtttacgtacgcaccaaagacaatggtctgataattaatgtaaactattcatgcttactctattgttcaagaccaactacctttgcttccatttttgaatgcacataggagaaagctcttctactatgaaaatcacttttgccttgctagttagtactaaagcacttagaccgcaccagataaatcttttgattccgcctaagcagagccaatgctgcttttaaagtaagtgtttgaaagagactatcatgcttccgtttgagccagctgaatagtagatgcgattctttaaatatcttcctaaccactttgttcgccaagaattgaattcattgaaaaacaaaatttatttgtttatatatttttccgcattatccaaacaaatgaaactatccgtggaaagaattcaattgtctaatctctactggcaatcttctctacatttcaagatgttttgcaactgatgcaaattacgagcccgagcatccatattccagagaagaactgttcgatagagctcacactttcctggccagagaacattgaaagagtaagtgatacacagttccaattttgcatccacataactgacatcctaattgcactacttttgaaatcttaaagatgttgaacgtgaatctgatcataaacactattacgcttttgttttttttgtttgatgtgttttgtatgaaaaactttaaaaacagtacaatttacaaatgaaatgcgaaaaataattgcattatgtgaaattagtttgcagaatattacaaaatgataaaataaaatatgatgtagtgaatcttgagtgactcagtggagaaacccacaagatgtcacaatacttctcgttcaagtttgagaacggccatgaaagcttcttgagggacatcaactctacctatggctttcattctcttcttacctgccgcctgttcaaaacaaaaactcattttaaggaacacagaaaccgctgaagatacaatcatgaaatcaagatttcgcccttatagagagatatacctgtttcttaagaagcttcttcttccgagaaatatctccacctgaatgaatgtaacaagatcagatatgccctcgtgggaacaaacacgtcaaagagaaaactacttcattttctgtgtctgaatctagttgtacaagaaagagcctttagaagaagtttctgataatacaagagcttacactaaaatggtaaatgagtttcgatatcaagtcagctggtggttatttcatgcttttataaaaggaggaagggaaccaagggaatgtgtacttaccataacattttgccaaaacatcttttctgattgctgagagtgcttcactagcaatcaccttggatcctatacaagcctgcaagtatatgtgtatgtcaaaacatcttccgtggtttctatattctaagggcattgtcagataaccaagcaggaacacaattcatcagacccatttgatcacaagtaagttttttaaaagctcagaagaagaagagtttaagatccaatccatcttatgtgcctcaggccctcggtgtaagattcaaatcttcaagcattcgtagaaatgtaagttatttggaagagaactctctagccaattgtttgcaaatgcttggaaatgcagatatatacctggatgggcactttaaacatttgtcgtggaataagctctttgagtttctgagtcaaagctctcccaacggaatatgcctggaatcacagtacaaaacgattccacaatactgtgaggacaagatataaatcattgctaaatcgtgagagatgtactaatctctgccgtaagagctttaagctaatgggaacagttctacaaaactttacaatcagagatgtgtaaaagatagttggcagcgcctcgtgtttccatcaatctacttatccaaactttttgggcaagtgaaattgtatcaatgagattgctgaaccaaatttttgtattcaggtgtaagagtgcgtatgtatgctgtattcataaaagttcatattaaagagcttaagcaaaataaccttatccctgtgtacgatggttgacaaaggttccaccatttcagcattaatcagaatatcgagttttatcagatcactttccctgtacctgctcacatattacaagacaaaaaaaaaaagttgaataccttaagatggtaagaaagacatcaaaaagagcaaaagaaacatattatgtattaagcttaaatggaaactgacgaagctgagtagttaacttgtataaagaagggctaccaaatttaacgatagagagcaacacgataattaacctgattgaaattgatctgatgctgctaagcaaatatatatattttagatacttgtttatcactttgggattactatgaaaagaatatagattcttatcttcacaaaaaagctgacgcatttctttgttaatcaacaaaaatagaaggcaagcatcacaaagtaagagaaagatctgtgtattaaaagttgaaagatctaacccaataacggagtattccatgctagcatatcccttggttctcgacttcaattggtcaaagaaatcacccaccatctgcaaaatggcagggagcgattaacaagaagatcagtttacataatcaagagagacatggctaaactttcattggggttatcttaactctgcacaagcagagatctcacctctgcaagaggtaactcatagaggattgaagctctgttctcagctatatatttcatttctttgaactcccctctcctctcttgagcgagctccataagcgcaccaatatagtcttttggtgtgagcagttcaatctgtataaaatggttttgcagtaaggaaatgtaattctacgaaatgtggtgtgtgaacttatcagcaatatctccagtagaaaaggcaaccttaacgtatggctcctcgaccgatttcctttgcccaggatctggaaggcgtgatggatttgagcacaaagtctgcagtaaaattgatttcacaggtaataaggctctagatcaagaaagaaagacaaaaggatgcgattttcagggaacaaagaagaatatttaaaagtttgggatcaagaggaaattacagtatcaccatttacagagttcaccctataaacaacacttggagctgtggtaataagatttaagttgtactccctctctagcctttcctgtgaagaagagtgaactggagcgtaagaacaaagaatgatataattcactttgttgagtataatttatggcgggtatctatcggggaggaaactgtaaataagtaaaatactaacagataactcagtatctatgaatttcttttctctatcttctgttgcataggaaattttcagtcagagacgcaccaaaaacactttagaacaagaagagcgaaacatatctgacctgcacaatttccatgtggagaagacccaaaaacccgcatctaaagccaaatcccatggcactcgaagtttcaggctcaaactgcaggataaaaaccaagttgaggacaaacctatagatatgttaatgctaacgtatacgctccttagaccaaatgtgaatatttttaacaaagatacatacaatagaggactgaagaccagttctttgcaaaacacaattttactttccaattcgaagccaactgggcataaacatacattggctaagtaagcatacgaagaccatagttgtttcgtccgtgcaaattattctgggtacagatgaaagaaaaatgttgtttctgtcatttaattctactataccttcaatgcagcatcattgagttgcagtttttccaatgcatcgcgaagatcgggaaacctgccatcatagaccaggtgtgaaaaaaaaaaatacaaaatgaaaaagcaaaaagtcaacaatgaaaaacaaaaactcagtactggtcagcgtcaactggaaaaagaccacagaacaccataggggtagcttcctcgtaaccaggtaaagagctttctgcctttctgctataatgtgttattgtatctcctaccctggcatctgcaacagatcttacagaagccgcaatatatcctacctgtatttaaggacagtaacctttaaaatatgtgcaagaaatgtggcatgatattcaggcatatctgatatacaccagcagcatcaatcagtgctaaaaacatctttctagctattagaacttgagcaagggaagatgcaactaaccatttcttctcaaatatagccaaacaagaaaagtgaaaacatatttgtttcattgcattcaaattgttattaaccacaactctatcttctgccaaagctgctacaaggaaatgctaagaaaatccttccatttacaaacgcttttagttttcctattaacatgtgttggaatagaacggcggaaactgcaaaagaatactgacattttcatttcataataccaaggtttctgctgaaagaaaaaaattcaacaagaaaatgggacatggatgcacaggaaagtaaacaaaacaaacaaaatattatgttcaaaagagtacactacctcacccgcatataattcatccacttgaatttgatttggagatagaactccgacttcatccgcaaaataatcctgcaattgatgcaaaactgagaacatgaaggatactagtgaaacacaagtaagcgttcttaaaagcttaaacattctcaaatttttcctgaaagaattatagaataacacttcacatcgctttattcaaatagaccgcgaaaacctatctcatgcacaaattacattcaattcattattggcaaatggaaagctatctcgattaaatagaaagacagtacagtagagtaaaagagataaacctttccgcttgccatgaaaaaaattctgtcgcctttcttcactttcccatcgataactcgaaagtatacaatgacaccacgatatggatcataataactgcagcaaaatgaattttggacgaaaaatataaagtagttcacatataaaaactgcacacttgtagactaatcaagcaaaacaaacacgagtatttcacactcatttttagttcaccagtgattaactggtactgacttgacatgccaatgatcagtccaatcattatatacgaatacaacttcgactccaagactcaatttcatactgttttctctagaaaaggcaaaaatcgttatgaataaaaacaacaagtgcaaacctgtcaaaaattaaagctcttaagggctttcctgcagtatcgagaggtgcaggtatcctttgaacaattgcatccaaaatctcggtaataccaattccctcctgcgtgtatatattattccccaaaaattgtaattgaatggatagaaagccacacgtcttaatttttgggtagcagaatagcaaaacaattttaaaatctaacctttgccgaacagaatatcgctttgctacaatctaacccaataacctacaaacaatatgaattatcaatcagtgttcacataaaggctgatgtctctgaaattgcagcaatgagacaattaccccattcgaggaacatgagactggatcataatatcacaaagaaaatgtttaaagcataaaagaatgtaccgcaataatcaacataatatctaatactagaagctagaaccttgtaaaatgtcaagataacatattgacaacagaaaaataaaagactgaagagtttttgcagacacccaaaaaggaatactgttcaaattattactggttgcattgtatgattgctattgaatacgaacatcataaaatgggtaacacaatgaacataatcaccaacctcctcaatctccctgagaactttctctggctcagcgcctggaaggtcaatcttatttaaaacctgcaggaagaagtagagttcatttgctttaaactctggtatgcagaccaaatatttgaaagaagaataaaccaccttacattattatttcctgtatagtcatgaatcaggttgaagcaataatgaaacgttaaatgatataatcattttatcctagactagctattcttttctttactacgcatcttctatgtactgccagagtgatactacctattttttttaacatatttgccttgtttgaaagttaacttattgcagactccgacttcttttaaataaaacgacattgacatttttaaataatcttccatggagatgagacgaaggaaagaatgatgataactaccacatatagttgaaatgtgatttgttaaaaggaatgatgataactagcacatatagctaataagatgaagcataattccgtacttacgggaataatttcgaggttgttttccaaggccaaatacacattagccaatgtttgtgcttccacaccctaaagcacatgatagaggaagtttaagtttttcagtaatgtaagtatgtaaccatcagaaaagaacgaaattaccaagcgaaaaaacggcataaacaatacagattccaggtttccacagcgtgtcagaaaattgtatgtcaagagaaagaaaaatcacctgggatgcatccacaacaagaagagcaccctcgcaagcagcaagagatcgggaaacctatgtacaaataaacagtgcattcttcatcaaaactgcaacttaatagtttgtgtatattcctaactgtaaaaaaaattacgcttttaggtgatatataacactcaaaccaagtaacttctcacatatgaaaaataactataaggctaagcttcaaatgtatccgtagacaataagtagattagaatattgtaagtacctcgtaagagaaatcaacatgacctggagtatctatcaagttgaggcaaaacggtgtatcttcataaacataacgcattcgagctgcctacacaaacatacaccgcaaagttacaaatcagaccgttgagcaatcttatcgaaactgatttttgattgtgcagagaaagcgattgaaagaaaaacctgaagcttgatagtgatgcctcgttctctctctaagtccatgttatcaagaaactgctccttcatatctctgttctgaacagtaccagtcacctgaagcaacttatccgctaacgtagatttcccatgatcaatatgagctataatactaaaattcctgatgttcgaaattggaacctgcgaatttcataacaaattcagtttcaaaaaaaatccaaattcttctcaagtttcggcacacggatgaagagagagaacaaaacagaacccgaccttcaaaagacggtcttgaccagaacgggcggctaatttggagccagagacagagagaccgctctgaggctcagttccagctgtggcttggcaaagtatctgtaacttccgattagagtgacggcggaatccagagacggaaatggaggagagacgacggagagatggggaagatgtagaagttccggataagaaaaacgttggaggagaagataagtccatagcagaagccatggccatggcactgtctaagctctctacacctctctctactgttttgagagaaattcaaagtatcctgagccacagactatgtaactgggccactgtatccaattgggcctgtccatcggattctaacccacccgacccgattcgatccaaatctgttttcttaaaataacgaatttgttttgtgtgaattaaaccgaaattagaccacaaatttaatgaaactgaacaagatc

SEQ ID NO: 705 - DNA, 68098 bp, Arabidopsis thaliana
gatcccatttcttttgttggcttacttctctcgaatttacgcaggaagatcattagcagagaattctcatctgattcagtccatggctgccacggctcttttccgatcgattcgccgacgcgacgtcgtctccgcgcctctttccgtttacaaatccgtatgtttttcactctcgttgattgcgtctttttggtggtattattgatagatcgagaaaatttttgtgattcgtttagtttcgtctttcgacttcatgatttacccatctgagctctgcttcgcttcgccggaaattttcaggaaatgatatatatatatccatttgcggattttggtgtgttatgtgtttaatcgtttcatttaaacaaaaatttgagatgagattgttgtgtaagtagacacatatctgtcgaaattaaccttaagactttgtttccttttgattgattgagaaagcttgtagttgagtatagtgctaaaaggttgggatgaagaagagagtttagcttcatatcactgttgtagtttgagtgcctaacaatcattagaggttatggtcgttttgtttattgcatatgcgtagagaaattgttggttttgactgctcttgaaacgttcttgttttgcagcttgctggtaatgctcaaccttcctggggtagttcatacattggtcagaactatgcaagtttctccagagctttcgggtaggtttgtgtttgtttcttgtgctttttatacctattagaattactctgtggatgtcatttcgactacgtgttgttttcttttataggtcaaaacctgttgtgaatgacattcttggtactggtttgggcactaacaatgccattagagaggagagagaggtaaaatgactttgtctacattttgtttgatttttgcttttgtaatgtttaagagcagcttaacttatcctttttgcctggtgatccttgtctcgatttttccagaagtcaaaatctactgaagctgcaattgttggtgctcaattgactcgatctttccgtgctcttgatgtgggaacatcgaaacgattgttttctacaatctcaggggatataaagacaacacaggaggaaccaaaaatcaaaagctttcgccctttatctcctcacctttctgtttaccagcctcagatgaactccatgctatcgattttcaacagaatctcaggggtttacttgaccggtgtcactttcgctggctaccttctctacctgaagatgggtatgatctgcctcacctacccgagtttctaccaagtcctttaccatacacaacagcaacttccagtcatcacctcggttactgcattagccgctatttatcatactatcaagagtactcactcactcttgacccattaaaaacctttaccaaagctctttcgatgaagccgccaaagtctccagtaagagtttctttgagatgattaataaggagacaagaaaacatttgttaaactctgtcttgaaaaggtaaagatttagcacctgtttctttggattcgaggcttttttgggggtatgtttgttgcttttctttgttctcagaccttttttgaatgatgtaataaatgtttaccaaagttctgttgctacgttactctttttgctacaagttttcttcatgaaatttgtcaacttcaatttcaggaaaagatgagttaaaatattgttttatttgcagtgatgatgttttaatttttaatgcaatttctatcaataactttaatcaggctaatttttgcgtttgttaaaaaaattaaaaaatttaaaactctatgcgagtcctccaaatcgaaaatgacttgggaccggagctcttatctctataactcctgcgattcctattccaactacgaacacagaatctcctcttctctatataagtaacacttttgcaatcacaatctcttcgattctctttgtacgctcgagatctctctggttcttctttaacagatcgcattcttgatttcttgcaatccaagctatggcggatgataatggcaaaaaccctatgcccaacgatagaggctacgatactcttctcacagcgttcaacaatcttaaactctacgccaactataaccatcaagagcctggagaatccggcaacaccaacatcaacagcaacaacaaccaccctaatcctcctcttctcacagcgttcaagagtcttaaactctatgccaacaaaaacaatcaagaacctggagaatccggcaacacaaccatcaacagaaataaaaaccaccctaatcctcctcttgtcactgcgttcaacaaccttgaactctatgccaactataaccatcaagaacctggagaatccggaaccaccaacataaacaacaacaaccctaatcctcctcttctcactgcgttcgacaatcttagactctacgccaactacaaccatcaagaacctggagaatccagcaacaacaactaccccaatctcaacgtttataacgttggtcatatctccgccgctagcttcaacgctcctccgttcactccgtcgtcgttgacccaaccagatgattcttcctccagatattccggcaaacccttccctcctcctcctctgagtttcgtgagccctggcgtcgacaaggatcgtaactggctatcaagtctgttggacatgatgacgtgtgcacaacgtttcactgagttccaaaagtacctccaagatctcgatacctatccaacggctgagagggagagccatctgttcaagatcggatcagcgttaaccacaaccaaacgcattttcctccacttggctacgaaccaatacggctcacaagctttacgtatcctctttagacgcagccctagcttagaccatctcttattctgcgccgtcgacacaaacttcttcttgctcatgagcgataagtatggtcgtggcttgatcatccccgctatacgagccgtcgataaaaccaagaaggagtctctctacaagctcacttacgaatacactctgcaccttgccaggctagaaactggatgccttgccctaaacaatgtgcttcaggaaatcagaggcatatacagagacctaatctttgagtgcgtcgcaaacaacgcagattggttatcttttgacccctatggaacacacgttgtgcagaacattctgatacttcagaatccggttgcaacaaccgcaatcgctgagagacttcgtggaagtttcttcaggttagcgatggagagacaaggaagctatgtggtggagaagtgtttaaaatcggattttgcgagagaccaagtgttggaggagtttagagggaatgccaaagaatgggtaagaatgacaactgataagtttggcaactttgtggtacagtctgcgttgagagtgatgaaggagaaagagatgagaccactgttgagagagtttgtggagaagctaaggcctcactttgggaagatggagattgggcgtgggaggaacacactgcgagtgattcaagaagaaattgttggttggattaatcagttaccagataaatctggatatgtgaactgatgagtgctttttggtgttttttagttagttggttttctgatggtttttcattggtctagtctatcgtagtggtgttatggtgttttttggtgttttggcttgtgtaatagactctgttaactatgcaaacactttaaaaaaaatgtgtgtttatttttagaaaatttcttgcgtttatactatgccaagatatcttagttaagaacttttttatatcgactctggtagaaaaaaaaatccgattgagatgatgtaaagacaagaaataaaattgataagacaaatttgggatcaaggggaagaaggatatcaatttgaatcctaatgacaaagacatggtagcttttacatggacacctgtttctggattgaaacatgtaattaatttggcaacaaaataataaggacaaagacttgagatgaccaaaatgatgatgacaatataatgattgtcgcttagtaaaacaaaattgaattatactatgacaattgacaagtatgggtcatgtggattagtttgttagtatgagagagcaagtctctttttaacatccaatgctttctcacctaacatcttttttctccacaacacatgtccatactatttaacttagattttggaccacttttttctctgcaatgaacatttatacaaatctatttctagttttaacgagtacaaaatagatttaaaggattactaattctcaaattcttgtttcagtgtgagtgaattaaagatacataaacgtaactcttttaatgaatatgaaattggataatattctttatacaccactaaatagatgcataacaatagacaggagacgaaaaggtccaaaagcatacttcaaaagttaaaaaaacagaactctgaaagaagtttaccaaaataaaataaaataaaaacatcaaaagtgcttcaattgattcatcagaaatccagattcctagtttgatctaaaaaaacacttttacacatatatcataaagtttaaagaaatggataatcataacattaacctcaatgttaactcaatctcacactcacaccgaatctgaaacttgtggtgcagccatgttaaccgccactttcccatccggtccggttctgagatcggtcatgccactaaccggttgacccattccctggtactgctgctgctgctgctgaggctgggctggtggcggttgaaccatcatgccttctccagccaccgtatagtacacaggcttccccatctgtgaataaggttcctgtaaccccattggaggaccgacactagtcataacttgcggaccaacactagtcataacttgtggaccacctgaaaacgttggctgtggttgaaccacgttgtaacctggctggttctgctgttccatgtatgcatcaggatgatgaagtcgctgaacaggtgatgggtaataaccttggtttccttgtaccgttggtctcatgacgctttggtataatgtccctggagcttgagattgagctggaatcatgtatacttgttgttgttgttgttgttgctccggtagattctgtgacgttgttgtgtagatattcccctgaatattactgttgttggtgtttccttgccagtagccaaccggaggttgttgattcgtcaccggcgccggattttgagtgtatgtgggagggaagtatcttccggcttcgtcttcggtttttcttctgtacatagcctcttgttgttgttgttgttgaagcatctgattctgatgtatagcctcttgttgaagcagctgattctgatgtataacctcttgttggtgatgaagctgattttgatgtatagcctcttgttgttgttgttgttgatgtagctgattctgatgaagcatttgttgctcttggtctctgatttgaatcatctgaaattcctggatttgtctttgaatctccgccggatttacgccgtgttccggttgtaacatccgttgatctacgaacatctgcggcggttcaagcaccactggttccggtaccggttgaggaaccttcactggcgacggcggaattggagctactttctccgatccaaacaagaaatcagcattattcggaggagcggttacagatttctccgattcaggtcggctagggattggattaagcgtatcccgatccgatttagtcgaaccttcggagccaaatccgccggaaatgggagaagacgggaagagaaacaaacgcatcctagctggtttagtagacaaacgaagcaaccgatcgtactcatgcatcatgtgctccagatcctcatcattagtcaccgaaatcaacgcatctagatcttcacctggaagctgatacttgaacgagatttctcctccatcaccaccaccgctgcagacggcggagagcttcgatactaaagccggaaatctgataccacgatcgaccgacatgattttggtatcgccgtttacataagtaagctggttatcgtgtggacgaggctggatcttgccgccatagctgcacatgagcttcaccttgtagttctgctgctgctggtcctcccatggcgacggattttcaaattcgacatcgcgagatcttggcgacgattcagctgaatctggatacgaattgtacgagaacttgtccattgtatcgcgatattttcgaaattatcgtcctcttctttgctcaatccatgaaaaataatatcttcgagttggttcggatggatgttgagtagagaaatggagaggactgttttatcacggtggtggttttgggaagtgctaacgtgacacgatagtgtttgtggtttttggcgtgaactcattggttatattacacgtggaagtaaagtattggttggatgtgacagcattagggtgacgggggtgtgaggttagctgaaagtcatgaactagatggacttttgcggcagtttggtggggaccagttagtgttttaaaagcgtgtttaattaaacattattgatactatgtgagacaaggccatggttttgactaatgactattaattaatcaattaccactgcaatcatataatgtctgaagaatatatccattttttctgaaagataccaaatattggagaattcacgtgaatctttgcttcaactccaagagagagatactaagtgatagtataacaactaaatgcaacatattagagaacaagatcaaatcaagatctagtaaacaagagtttttaaatgatgaaagaacaaatgaaatgctttgttcacatcgatttattgaggtgaaacaatcaaattaactaaattaccaaatccttcaaaagtataattgcctgcatgctgaagctaaagtctctgcaggacaataagggcatttgaatgtgcggaaagcgcagttcttgctgagtctcatcattgactgcttgctaataacatgaccacaaggcaactgcatcggcgggttttcttcgctgctttgatctctactcacgggacaaacaaaagccgagtggaacttatactcattccctaactccagaggaaccggaagctgtttcattgcttgccattcttgtttcgtcaatgccattagatgaaccagctttaacagtgacggtaagctctcataacccgcggataaagcgactttcaacggggagttaattggctgatcgagaagatggtgatattccatgattagctctttggttaccttgtcccaacatgatggagaaactatctctgcataaggacttttctcaaagtttccaatccataataaacaagtgataagcttttgtatctccttaaaatggagtggatattgcgtaaaatgggttcttgcatactccaaagcatcatcactctttccttctcttaatatatcacagtacttcaaacttaagagcttaaactccagctttgaactcttttgcttcagctttccgcggttcgcaaagatccatctcattgcaggctcaatgtttctgagcttcaatgagtccactatctggtggaactctaagaactgagatctaacctcagtttcttcctctcttccagcctccttaaccagacaatcaccaacgtcgaacaacccttctcggtaacaatggtggataagtatcttattcactaagttgatatcgaaatcaacgctaaagcaggctagagatatatcaggatggtaagaaacctcaagcaatttcaccaacttactaagactccatttagtttccttatgtgatttctgaagctggataatcggtaaaagagcatcaagcttgcgtctcaactcggtaagaaccgattccggttctactccatcgtcgttacctaattggattcgagtcaatgtatcttggattccatcacaaactagatcaatgacatcttgagtaactgagtgatacagcttctgttttttagaaactcgatcaaatgcatctctcacagtcacagtgccagtcacatccatatttgttctgactaataagcttaaagtgtactaccaattagtccccaaaacgcatcaacaactgcaacaagatgatggaaaatagttgatcaaacatctaaattttgcattttttaagaaacaactttcctaggaatttgccctaatattaagtagatcacaaaatcccaaaattcacagaactaaacttaattttgcaccaaatcttaattttgcaccaaaattggaaaagtgagactctttaagcctaaagttttatcctttgatcaatagaaaccgaaatcaattgggattaagatagaagaaagggaaaggtgagcagtagtaccggaaacgcgactgagaatttctgattgtgccgtcagaatttttcacagagacgaaccaaaagccattaaatgatgatatatagagggagatgatgattggcaaagatgatccaagccgaatcactgagtatctaaatcgttaagattggtttctggaaacaaggaacaactattttattttcaacgcccagcaaaattatctagctaggaaaaaaaaaacagatatttttcccaaattctacgattaaaatctatctatttaacgaaaattaccaaaaaaaaacttataaattacagcatattcttcgcataacagttattttaatttttgtgagtaattatatttatctttattttcttttaaaaatatattaaaatgtttcatattaacttattgatttgataaccttaaattcccaattcgagagctgatagaatgaaaatcaaagctatttgtcgttttccggttgcaaaaagtcaaaaaggaacatgaagctaactaaaattagattagcaacagtatttaagtttaaggtacaaattgattaagctgacaaatcaactgagttacgttgactttcccactggtgcatctgatacttggtttggtagtggagtccttgacttcttctattgaaccggttggtctggtacggttaacaacacgatgtaaatgcctcaacacgcttataaggtagacgatagccacgttctgatcactgcgtagctaacgtgtctttacgtaatttgctttttttggttttattctcgtaattaattacttgctttcttctttcttattgagtttaaggttcttcgttgacatactattctctgttgtagcaacactaagaagaagcagagaaaatgagaaaccttagcttcatcgtcttatttctattgaccctcttcttcattcatcatttggttgatgcttctttgctagtgaagtctcttcctggttttgaaggtcctcttccttttgagctcgagactgggtaaacaaaaagtccatctctttctctctaatttgtcaaacatgtcgtttgagtgatctaaaacgtggttttcttcttttgcatgtgggattttactaaagatatgtgagtattggtgaatctggagatgttgagctcttttactactttgtgaaatcagagaggaatccagaaaatgatcctctcatgatttggctcactggtggacctggctgcagctccatctgtggattgctcttcgcaaacggtaacaaatattccattttgtatcctgtaatgagtcttaatatagatgcatgcataagtttataatgaatgttttaaaatgtcatgtttcttgattgctccttaagacaagtctttcaagttgaagttttattgttttttctttctttcttaggtcctttagcttttaaaggggatgagtataatgggacagtacctcctctagagttgacatctttttcatggacaaaggtttgagagataatttcaccaatttttatgattctatttctctctaatatgtaacaacattttgaattcatgtatactcgattgtttttcaggtggctaacattttatatttggaagctcctgctggctctggatactcttatgcgaaaactcggcgtgcttttgagtcgagcgacaccaaacaaatgcaccaaattgatcaatttcttaggagtgttaagtgttgtttttgctttgttacagtttttgatgagtttttctagtgatatttatgtttatcttaagagttagttttgattctgattacttgcagtggtttgtgaaacacccggagtttatatcgaatcctttttacgttggtggagattcatattccgggaaaattgttccaggagctgtgcaacaaatttcacttggtagccttttcaatcaccacttttcacagttttggtactttttagctcaaagctttcaatcacattctactatatgaaaacaggaaatgagaagggcctcacaccactcataaatattcaggtgttaaaagggtctattcctgcaataatatgaatactgttgagaaaagaaaacgttttgtagtaacacattcctatataattgagcagggttatgttcttggaaaccctgtgacagataaaaacattgaaactaactatagagttccatttgctcatgggatgggacttatttcagatgagctctttgaggtaatctttatcttcatcaatcatatcatatgattgttgtgacatttggttacaattattcttttttcactacttattacattgcagtcacttgaaagaagttgtggaggcaaattcttcaacgtagacccaagtaatgcaagatgctcaaataatcttcaagcttatgatcatgtaaagactttataccgcacaaatcacttgagtatcttatctctgattgcattttcacagactaactttttctcttagtttatagtgtatgtcagagatatactcagagcatattttgttacgaaactgcaaagtagattacgtcttggcagacacaccaaacatcagaaccgatagaagaagagtaatgaaggaattttcagtaaacgattcatcatcattgccacctcctagctgctttgtaacagttttctctttcactttctttattattttctatatccatgggtttgaaaagttctgatatgtcttacacttttttctcagacttataggtattttctgtctgccttttgggcaaacgatgaaaatgtacgcagagctctaggcgtgaaaaaggtacctacgtgaattgaattgacttggttctatacaaaaatcaccaattcaaaatgtgatgcaggaagtaggaaaatggaaccgatgcaacagccaaaacataccatatacatttgagattttcaatgcagttccttatcacgtaaacaatagtcttaaaggcttccgctctctcatctacaggcaagattaatatttgttgatgtctaagtacaagaactagtttttttgtatctttataatttgacaaaactcatgtacttgaaacagtggtgatcatgattctatggtaccattttcttcaactcaagcatggatcagagctctcaactattccattgttgatgactggagaccttggatgatgagtagcaatcaagtcgcagggtaacaaaagatacattgtttctaactccattctcctcaatttcattatctttaaagacgctcttttttatcggtgtttgtagctatacaaggacttacgcaaacaagatgacatttgcaaccatcaaggcaaatatttctttcttgtcttgtccaaagcttctgcaggaaaaacagaaagtgatagagtttttttttttacttgaatgttttgcagggaggaggacacacagcggagtatactccagatcaatgctctcttatgttcagaagatggattgatggagaacctctctaaagattctcactcgcttctctctctttctctctttgttgttgttacagtttaagactaatgttcagtgaattgtaattttgccacatgctattctgtgaaatcttcaatgattttgtgttgttgtagaactctaaagtctaatcagaaaggctctgtttcatagcaagtaacagaccctgtttcatattccatttaaatatttccaaagcagaaagtcattttattacttctcagtcatcaatggtgaaaaacaaaatccaaatcccaatgtttacatctcaattgaaaggaaacaacaagaatgatataggaatcttgagtctattcattattcgacctcataagtcgacattgcaaaatatgttcagtaaagtgaaaggtctccagcatcaactgatctcttcacaagtttagcccatgattcatttgtttcttggatgatcttcaaagcatagtcctgtaacagacaaaccacaagtgtatagctcttctcagtttcagtaccaaacataaaccaccaccactatagaagattaaaaagaaggacttactttgtttgctggtttgtctccaagaccaaatctgttagcaggctttccatctgggatcttgtagtctctaaaccagtctctaatggctgttagtgtaccctgatcaacagatttagagtcaacaacagaaatttgtttttgcatgaacgtatggggaatggtttatactagtagtagctcgtaccgggaaatgtttctcaacatcttcaacatcattcacaagatgagcttttgggtcatccaaagaaatggcaacaatcttccagtctagctcaccttcatcaatcatagctaaagcagctaaaggctttatctttagaatatcgcctatcttcctttgtgtttcaccaatctcaacaacatcaactacatatatccaaaccaagaataagcataatctctttgttccaaagtgattaaattttccattacatgaaagagtatcacagatttacctggatcattatccccaaaacatccttcaacttcagaatttgcatgagatggatcttcccatgtttgaggaagcaacccatagttccagttaatgttatacctggatcaaatccattccataagtcattgatttcaaagtctataacaaatagtaattcagaaaatgagctaacttgtcatcaatggatgctgaagcctctaagaaattagcttaaaacaaagcaaaacttataaaaaagggagaaatatattttacttacggataatatctgagcttccccttcttagtatcctgcttaataggagtgaaatcttcatcagtagcaacctccatttttgcttttgactctttaggtatttcaactataaagttgaaaactccatcgcctaaggtcaatggtatatcatgccatggagaaacctatacacaattggaaaccatctttatccagcctttcactaaaacacggaacagagtaataaaccaaaaagtatttcaatcaacaatcaaaatgttagaaacagtggttgcattctcagagaagatctctttattatagtgagcttagtggttagcaaaaatgttggtaaacaaataatccacttactcaatctgtccccataaccaaaccttgaacacagaacagagtgatgaacacttcaaagcaaattgacaatgtagatctttaaaacattgactgcaaactcggagaagatttcttcattatgattcatctattcgtaaccaatttaaccaaagattattccaaaataacaatgtgcaaacgttatccattcctcaatacttccccagtaaaccaagctaagattttaaacaccggagacagaaaacggagaagtcagaaacaaaaggtaccttctttccagaaccatcgaggaagaaaactcgataatctagggattcggccggaccttcttcttgaaccttaacctgaggattgtaaatggcactgcaggagaaaggtctcttagatttcaacaccaaagctcttctgctgaagcagagaccaccaaatccgccgcaggatttcttcgccggaagagtgaaagcttgcttggcgaggaaacaggaggtggtttgggtcacggccgtcgctgcagttaacactctagtagccgccattattgtggaaagattgaaaatggtggcctttcgttttaccctcgactggctctctttattctttatcacaccaccaagaaagacagaacacaaaaacaaaaacaaagatttattttatgttatagatcacgtggggttctgttgagtaggtattaccaacctttagtaataatagataaatagttcaaatttggactagagtgcacaaaggtttcgtggtgtagttggttatcacgtcagtctaacacactgaaggtctccggttcgaacccgggcgaagccaaatttatttttcgttttttaatttgtgaagatgaactctgttttgggtcctaaagattggttttggataatcgaaaacaatagagaagtacgttgaaaaggtcacatatatcgtacacaaactgataaggatttatacaaagttgtatcagaagcagaggagacataggcatgatgtgatgatgagtacatgatcatatagttgaggaaataacttattgtatctctctgattatctctcagtttcattttctgatgaattcaacacctttctgaatacttccggctaattcatcttttgctttctccagaccaatcctacataagaataaggaaattaagcttgagaactctctttctatctctctgagataagtattttgaaagagatgagttatgttttttctgacctttcgtattcgtttaagggtccaagctgatacacttcctctgctcctgtacggccaaggcgcacttttgttgcaaagaaagctaattctgtcacctgtggtcaattgccatttcaagttaaaaccgttgaaacaatgaaagagagtgaaagagttttcaagattcacctgtgaagcaacaaaagagcattctacgacattcgcatctcctcttaacccgcgaaggcaagcatctgcaaacttggctgcagcatatgcctatagtagtagtacatttcacatggattcagtacactgttccagagaaataaacaggtgtaatgatgatgtattaaagtgatttggtttggttttaccattgaaagtgttgcagaaccagctccagcttttgcctccacaacttcagttccaccattttgaatccggtttgtcaggtactcaatttcttgaggtgtgaagctgctaggaggtttaacctgaggaaaaaggattatgcaaaaacaatcagttagcagagaagctaatgtaatggaaatgaacctttcgtcctattcatatgatacctgtgacagtagtggcaagattgtgactccggcgtgtcccccaactactggcacatcgacttctcttggatcaaggccaagaacttctgcctgcacaagaatttaaaaagataaattcttagtgtttaaaactcaacaaaaccaaatggagtgaggaatcattaggcattattaccacaaatgtgttggcacgagcaacatcgagtgtagtaactccaaggagcttcttaggatcataagttccagctttcttgaaaacctcagcggcaatggggacagtagagttcacagggttgctgatcaagttgacaatagcattaggacaacattttgctacaccttcacatagtgttttaacaatcccagcattgattttaaacagatcatcgcgggtcatccctggtttcctcggtataccggctggtatgatcacaagatccatacccgttagcgcgtcctcaagctgcttcgctcccaagaacccgcggacctaatcaatcaagagtggtcattactcattcattagcaagaagaagtaatcttatgtgaagttttcaaagtttaagagagatacttacaacagctccagtgtccatatgactgacgtcagcagtgacgccaggagcattgacaacatcgtagagatgaagtaaagagacaagagggttcatcttcatcagcaaagataaagattgtccaattccacctgcagctccaagaattgctactttgaatcctggattaccacctttagctctgcagttttcccgtccgattacagagttcttggcctccatctaatggttgatcaatcatgaataagaagaagaaatttcactatcagtcctagatgacttcaacggagtcataaacagattggtctctctaatggcatcagaaatcttcagttactaatttcaagaaatggaaatatacacttgtagaagcgaatgtcaagttcatggttgaactataaatattcagaacgttgatgagtctagacaaatcagttttgtttgagagtgaatacaaactattctggttttagtagaacaaccatcgaatttaagaatataaaaaaagataacttgagttaacagcaaaggtaaagaaaacctgaggagtgagatgagctgaaatcctagcaatcctctggttggcatctccacgaaactccattgttgtgttcctcagtttcctctcgttaggaagctgtttaagagttttaatttgtatcagacaagaaacaggaccttaaaacatggggactagattgaatgattatgacgtaagtatttgtattataagatttttattatgagaatttgtgtggaaagaaatgttgtccatcatgtaggaagccttccttatccctttatcttcaagttgtttttgtctcttgaccgttgtggctctcaaattttccgaggttttacatgaataaacctataaatggtagtagattccggtgcgacgattgtattggtcgcttaaaggaagcccactaaaggcccatactgccgtttagtgaaaaagattataaaacaaaaacgtttatttatttagcaaccgggaagtggtttcaccaccgatccagcataacaatatccaacaaatcttgagtttttgatccagcataacgtaaccggctacaaacagattcggagattcccacacattttacagctttacacaggtttttgctgagaatgtgacacttttaccataaatggctttcagtttcgatcaatggagccaccaagtaaagacattactagcccaccgccgtgaactctctcctccggaaccatgaagtcatagatgtttgtttctccttcatgtgaattacttggagatttcattgatgaaggtactagaacctgcatcggtatcatcatcttcttgttcttctgcctattctcaaactgtattcgttcaacagaatcagtacaatcagagacagcgctagctccagactgagaatgatcagaagtagagccaaaaacaaggccactaaagagtcccggtccaatcaaaccgctcttgcttccatctttgttctcccgagacataatagtgttatgcgcagcgcataaaccgctctttcctctagcaaatttctcacatttcccatctccccaagaacatcgtttcccaccaccgtgagctttacagaaatcagtactaccttgagcactcttctcacaatcaataatcttgcaacgtttcccaccaccatgtttaacacaactgtcagtgcgaccacgcgcactctttgtacaccccaccacaacacatcttttccccccaccatgagcaacacagaagttagtcccaccatgtacgcttttagagcaaatcccacccccatcagcgagacagcgttttccaccaccgtgtgctttacacagaggagtactaccttctgctcctttgctacatcctgaaaatatgcagcgttttccacctccatgggctttgcagtagttagtacttccttgagctcctttctcacaacctgaaaaatactgacaacgtttcccaccaccatgggatatacaaagaccagcttgtccttcagcacttcgtgtacagtcttcgatattacatcttttgccaccaccgtgtttgatgcagaggcccgacctgccacgggctgctttgtcacatccttcaaggaactcgcaacgtcttccaccaccatgagatatacagaaatctgttttaccttcggcgctcttcgtgcatcccaagtgttcacacctcttccctccaccatgggttttacaaaaagtggttttactctctgcacctttgttgcagcctggtttttggcatctctgtcctcctccatggctgatgcagagtcctgacgctcctcgagctcccttcacacatcccataaatttacacttcctcggattgcttgtcctctgctgtacatagaactctgtgtaaggtgatggttcttggctcacttgtgaatggataccggttccaaaatctttaagttgttgaatctgtgaagggtttttaacatttggatctaacaaaagcgatggcatgtatccacctgatctcttagctgaagaagaaccttcatcaacaacagggatcacaccaccattatcaagtccactgaaagtgtctatgcttacagcaggacgaccaagttgcagaactgaatcagcttgagtaaatccagaagcagaatctttgttgctgttattaacgccgacactaaaacagtatgaagtcgacgttggacccaatccgaggactaaccggcagccatcatcagtgaaactagatacatcggaacaaaattggttttcagagcccccaagacacttcaggctaagagcggtgtcacccatattaatggcactagagaatggaactacacctttgtccaaattcacatgaagatgaaaaggatatagatgaaagagagctccgaaatagtaccacttagcacatcatacttgtagctataagcatatattggagcaagttgagagatgaacaacttccgccacttacaaagcccgacgtatctgccctgtccatcttcaagaatgggaaaacagcactatcctgctggtgttaatactgtaaaccgaagaatgtttgttggagattatcaggttccgctgaaaagcaatgatctttgttgaagtatgctactgttgagaactgtccacatgacctgaaaataaatccagaaaggatgcaacttgagagttaacaagaagcatgaagagcaaagaacattgtacaatcaaaaaaaaaaaaaactgaaaggagcataaggctgaccgaagcaaagaacaatcaaaggcatttgaagtagtagcacaagattggaagctaagtagctaagtactctgcttgagacatctttactcaaatataattcatgatagaacagaattggggaatggtaatcaaatgatataatcaaaatttacaaggtccaaagtcaagattttttcctctgtgatacagttgtcattagaatgattgaagatccaaacacaagttcacaagatcctaaaatctgagaaaatatttgttttcagaagtttgacttggaagattgactattgaaagcagggtcagaaaacaccacaaaaggttatctcatcctagtatcagaaaacttatggacaaaccaataaacaaaaaagaacctaaagcactttggagaagaagaagatctaaaaaacaagatttatcatgtaattataatactctcagcataatctacataacaatgatttcatagaccaaacaaagtctaaagatagaaacagtcatgcattattattagtaagtcatgaactcagattaagcaaaattaatgataaaaatccagaagaaaatttagatgtataaggtgagtaagagaatgaaggatgaagaagagaattcaaatacctggtggatctgaaactcgggctcacagatagaattccaaggagaagacaagaagaagatttcagaaacaggtgtcgaagatagaagacaaaaagattattggcaaattggcaaatatgatagtggaattattataagcgtcgaggagtcaggttttgtctacaatgtgaaatacctaaactaccctcggtcttttagccctcacttctgattggggatttgatagtttgctaaaacaaaacttgtaatggaatttgtttttaagacatcaactttgttctggtttaccctataatccattccgaaatttgtgtagattctatttactcatctataatttgccattctgaaatattgtaaaagaaaagagaacatgatgccactgatatggaaactttgaatatattgacaccaaaaattataaatttctaatacagtacatattgtaatcagagtttacatttgaagaatcagaatgtaaacattaaaaaattcttattgacttatgtatgaattctctacaagagtgaactcttttagcaatagcaattagggttcttgcttcttcactttggtatcatccaaaactccaacaaggcatttctcaagtaagatatcaacattgacccaggcatggtatttgttgaataagagcgtaccgtctcttccaaccgctttcatcagcatatcgacacctccaggatgaaaattcatataaggcgatatgttgtatacacgacctttcaaaacagtccacatcgaatctcctgttcggtgtttctttacttcatccattggaataagcctcttgtttgactctcccttcaggcctgcataaacaaattgtctctttcattaaccaacacatcaaaatgtatttaggaaaaagaggactaagaaaagaaagctttgcttacctgcaagatcgggatgtgttcgtgtaagtttcaaccaatccatttggctataacccttttcaaatggaaccttggtacgagtgataggctttctagctggagttttgaaagtctcagaggattcattggattgctttttcgaagacgaagaatcagtcaccgtgaaagacaaagaacctattgtttcttcctttggaggaagagacttgtctttccaaataagaccattgcttttttgttgatctaacccatctttaagggtaatactacctacatctgatgcaagatctttaacttcactatctggtggtgaaaccttcaaaattgaaaacaaaccaagaatcaatcataaaagtctagaactttcacgtttcataaacattgaaatcatgaagaaatgagtggaaactaaccaacctttgagaatgtgaaatcatcatctctactagtatccatcttgagcttaatctgcacgcagtttgcataacaattcgtatcagttagaaacaaaacctaaagtctatgtaaagcactcacgggaagaagaagacgaagatctaaacaaacgaaagttggaggcaaaagcaaagtctaaaggtgacgataatagggattattgggtgggaatttcttaaattcggaaactttaatctaacaaaaacagatttgcaattctgattcatgaatccatatcaagcaaacaataacaagggaaatcagatgtactagaagaaaattggatagatacctggtggatctgagactgctccagacagagaatcaaaggagaaacaaagaccagtggagaaaacaaagagcgacgaaagagggagagatctaattggccgtcaaggattcttatgagaataatcatgttcttctctggaggctgcaatcaaaataccaaattcgaatcggtctaattcggttttgttttggggttgttggatatccgatacaattttggttcggttcaggtcagagatattcaatccgaacttgtaatttggtcccggttttgtgtaaaggtcttcgtattttttggttttgttcggttatctatctcggctccttaatttgggttggtatcaagaagttacaatttactgttaaccagaaaaaaaaatgtagtcacacagtacaaattatgcaatcccatcacttagtaacgaaaatgctggcgagaagagaccccaaaaaacaagatctgctctcacattctctgctataaaatatgtaccaaattgtcctctcttgtcattaagatccgatgagtcctctaaaccgagcgtacgacagtataatcacgaacaagactatgcaaaatgttcccgtgagacttacgaccttcatcaacaacaacaaaaaacacataccaatgatatcatcaggttaaggtgttccattctggtggaaactgaaatgtgactcgtacccatttgaaaatgtaaccatggtcgtggttccatgtgttgggaatgttcatgccgaatattccggcgatcatagagtacactgatacacagacggttcctgcgcttaacattagctctaactgcagagaattttattgcttttcatacacatcaaaaaaaatttaaaaaaactttaataatcctgagcttttcttttatattcactcacctgaatcagctgatttcgatgattgtctaactgcaaataaacagtgattatagcctgtaagagaaattacattttcacaacatttaagaaattctgacttttcatttttggttacctggatgttaatgtaatcctctgtgtcatcaatatactcgcgtagctgcatcatgttcaattatactttctaagtcggagataccacaaagacgaaacaggaacaagaagatacaatacctcggttaatttgttcaaagtgctgtctatttgcatgaagtatgcctattaacaaaaatcacattaatggttgtttatacttcatatgtagctggaaacaagtattacctcaagcaacatttcaagctcttcaacatcagtttcgtcgtctccacgaaccgtgactaaactcactctacttgctctggaaatcatagaacctattgttggggaagtaggataccaaatgggttcatctgaaacgctgacagatgaagatgcaccaacaagcttccttgtaaggtagagatcagccatatcaccatcatcatccaacaactgttcaagctcatcccttacctgaaaaaaaagcgacgagagagattaattcttctctgttccactatcgtatatcttgaatgttcacttgacatatgtgaggaagcttcatactcatagtatatgtggcaacacaagttctaaacatagactctgtttaccagtgaaacatactcaccttttggacccgagctgtcaaacgggtcatggcactcttcaatttacgaactctttccaagttacggctacttatctacaaaatgaaacggttctcatcgactgaatggagttaaatgaagttggaattagatcagtgatgacaataattgctgagttagctaccttcaaggtaagttcatccaaagcaggataagcaaacttctctagttctgttgtccttgcagctagaaaactacaaatagcttccaaggccacctctagcgcccggaattcaaacggggattctatatagtaacaaacaaacacttcaataccaaaagtgaaaagagtgaatggttcattagttcttatgtaggcatcaaaagatcaaagatttttccaatttatatccttaaaataacaaaagttgaggccttgaggggtaccatcttcttcacccaaatcaccatctccgtgaacaccatgtgcctcgtttcctacaggtaatcttctctgaaactcctccaggacggggataacattttcatctgacgaatctcggatcaaaacctaaaaagcattttcaaataaccaaatcaagccatcatcacttcaaaaggagacaaaatgttccaaatatcacataagtatcaagccgaaatagtgaacttttaaaaaagtcttcacatttggctacaagccagtaagaaatgattctgacctcttcggcagtgataatcgccttgatatgctgcatccgaccaaaacaaacacgaatcaattgaaaaagctgtgaaaaatccaaaagcagaggagtggcaaaaagtcccaacctctaagttaagaacaatggctctttctcgacccaaaatagcagaagggtaaaatagattcgggtcaaggatccggagatcacgagcgtggatttgaacacggtgcataatcacgtgtttgtcaacgtcaagcacagttttttgccccgtggcgtctatggaaatccaactccttgataactgagatgtcttcctcttcgccgtgactaccgccgatgaatccaccggaacaagttctccgtcaggtgacatctccgattcttcactgcttaaacccaatgcctaccaacaaaaaaaaagcacccaattgaagagaagaaagatcgaaactttttcccctaaagtaagaaattaaaacccagttggaatcagaaaaagtgagttttcgtagtatctgctccttttttttcattattaaattcctcgaaggtcgtcgttctctttttaaaatttgtttattaatttaaaatctgacgacagagacaagacaagtaccatttttttatgagggttccttgatatttgcctttatcaaagagacgacggcgacaaagagaccgtcgacggcgacaatcacgactcgtgaggcgtgactgagaagaagaaaaccaaaagactaatttttgaaagttttaaaaaaattgtcaaaagggtaatgtagtcaatttcattttgaaatggaaaccaatcgcccagacgcgatttggtaccaaaataacatattcttttcgtttttaagccctcaaacttttagtcttttcaaatttgaccattaaaaataaattcaccgaataagtccctattacacgctaatgttgaaggaatgtttcaagctacccacatggagaagatgatgacccaaagcgagtttcctctttccgatctcatcaactacacccagatccttacacacatcgaccttaaacctaaccaccgtctcttccttctttcctaaacgaatcttctcgaaccctagaagttgcttcctcggcgatccgtgtacctccggcggcgtcgtgaacagaaacactgtctcagtcccctctctgtctccgacattccttaccttcaattgaacctcaaaatccgatctttcaccgacggctttctcgcagtgtggtccgatcgcgtccaaagattgacactccggcgatcgacaggattggctctcgtcaagattgagagagacgaacttcggagctttaataagctggtgactgaaattagtgtaactgagcccatctccgaaggcgtaaacggtttctccgatgtaaaatctgtaagtccgacccagatacccgtttgatttgtcgggtctcatgttcatattcgtcatcggaactttctccacgtatgactgaggataccacgtcatcggtaatttcccgcctaaccaataaaaaaatcgccggttatgaaaatgacaatcttaaaaccaaaccggtcgataaatcactggttcaaatcggagaacagagtcttactcggattatgacgaccgaagatgacgtcagcaatggcgataccgccggcttctccaggatatccgacccacataatgcttgtaatcttctcatcgttcttggcgaatgtaatgtcaaatcctccaccggacattatgactagcaccaccggtcctctcgcggccttagccacttgagtcacaagctcttgttgttttccgggaagattcaagtctatgcgatctaatgtttccttctcaatggtttgatcggctcccattactaacaccgtcgcatctgcagatgccgctagagtcttggctgagtctaaatccgcctcggtgcaagtcacgttgaaacagccacgatgatactttgtggtcaacaccgtcctctcaagtccttgaagcggtgttgtatacttgcaagccacgcctgaaaacataacaattatatttgatccacgttcgaggtttgagtttaaaattaatttgatataagttatgaatttaccttcgtaatttcctatcatagtttttgtgacattagcatttggtccgattacggccaacgtcttgatggcggaaggagagagcggtagcgaaccagctgagttcttgagcaagacaatgccttgccttgcggtttctacggctagttctcggttttcaaccgtgcacacgtccttgggacccaaaccaccatatggctgattcttcgggttaccgtcaaagaatcctaagcgcatcagagtcgcaaaattgtttgaaattgctttgttaatagctgcttcgtcgatcagccccttcttgaccgcattctctgtgtggttacccaagaaagaaccacaatttagatccaaacctgccagtatagatttagctgccgcttcctctggagtcttggtatagtgttgtgaaccatacaaaatacctaatgaatcgcaatccgaaacaatgtacctaaaacaaacccgtaggtctggactgcccaatccaagctgtgagtgaaccgtatgaaccaagcgaaggtttggtccgtacggttgctaaaggttgagggtattgcgttaggctggcttcacagagcagcgactacctcccgctctcagcagtggatggaccacggttcgtcgtcacacaaatccactatgatccgctggctcgtacccagcttgaaccaccatttttttcgttacattttaaattgctaactcattttatttctcccctctctgtctccctcgacgacgttctcgtagtgcgctccatttttttattagggttcctcgatttttgcctttatcaaagagacgacggcgacaatcatgactcgtgaggcgtgaccgtgaagaagaaaaccagaagacttaactacgaaacttttaaaaaactgttaaaagggtaagttagtcaatcgcattttggacgtggtttgtggaaaccaatcgcccaggacgcgatttggtaccaaaataatatattcctttctttttagggtaaattgagcacagtagccgttgatccacttttaatttcagattttgacattgtgggctggcctttcatttcttagccattcagccaaaaactgaccaaaatgcccttgacgaaactgaacccggtttgtacgtacggatcacatcgttggaatccaagagaaccgggtttgtatgtacactgttcattgacgagaaatgcattaaatgttttctggattttcggcgaatttgacacttgagatcggttttacatgaatgagagtacgattcgttgaaatattatatatgcataatatatattaaaatatacagcatacatataacttacataataacttaatctggatgtcaaaaaataaaattaaatttttttcgtagacaatggttagagaatttttaaactcattttaatgttgtaccatgtacgttccaataaataattttgtgtacgtacatagtattagattgatgtgatttatacatttttatgatgtaactgtttagagcggtcgtatacgtgtacgtgtatctcaatattatcgtgtatgtttaagggtttagtttaaaatcttgtttattctcaacaattttaactcaccaacaaagatgtacgtacattattatacatgtacatacataacatttttcaaaagtatgaggaacaactatactttgaccatatatttttatttaattattatatatgaatagatttatgatgaaaaccccaaaatatattttatctaatcaaaataaccaaaagtttctaatgtacaaactcaataaatattttgtatgccgcctttacaataaaacaaaatctaacatgtttatttctattttaaataatattttatttattatcatttgaagacaattcacgattagcaatatcatataaatatatatgcgtaacggtaataatatatacgtacacggtagtaatgtgtacgtacacggtagtaatgtgtacgtacacggtagtaatgtatgtagtaatgtgtgtgtacgtataccgtaaattacatatacgtacaatttttttttaatgaagggtataattgtaattttgcactcgtcttcaacctctgcaaccctaattttgcagccgcttgttaactcattaacatccaaaactcctcgccgccgactactcttcttcatctccgccatttgagtatgaacaataattcaagaaaccagaaaatcctctttttgttatactttatcacgagctcgatcgaaattttctcaacttaagcaacgactagaactcgcacagagcctcaatcgaaatttcactttcgatcggagtttgtgtttcgtcggaattgttcttcgtcttcgacaaacagtttttgatttcctttggttgtcagaaagttaataacgtgtttttgatttaattttaaatttaaattttggtaaccagaaaaataaagaaacgaaactgaaccgcctcctttcatttctcgttccagggcaaatttgtccatttttggctgaatggctaaaatctggctggaccagtccactttgtctatttgtggaaaaaaaagtcagaaaggtgtccacggtgaaaatttcttttctttttaagccctcgaaattttattccttttaatatatgaccattaaaaatatatttaccgtatcagcccctgttacacgctaatggtcaaggctctcaaggaatgtttcaagctacacaacgcgactatactctttccgatctcatcaatttcactcaggtccttacacacattgcccttaaaccttacctaaccaccgtctcttgcttgtctcttaaacgaatcttggttctaaaagatgcttcctcggcgatccgtgtacttcatattttaaaaatagcgttcctaactacattatcgtcgaactctggaggagaatacaatgcactatcagaataaaggcgaaatagaaccgaaatttgtttaagaagtcataactggttaaggttccaagaaagagttgtgcaatgaacaagtatcaatcactttcagtcgtcaatttccaacgagctttttgtaccgagcgtacgagattataatcacgaaaaagattgcgcataatgttgcagtggcgctcaccaccttccatataaaaagaaaacaccaactatatcaggtcccttaaattcggaatgactaacaggtccatggaattgaagtgtcatttcatacccatttgaacatatgttctttggtgttccatgagaaaggaatgttcgtgcttagaattccaacgactaaagagtacactgatatacagacgcttccagcggttataataacctcaaactgatacaagggagaacaagatgaagatgaataggacattaagccaacacttgtctaacgtttttgattttttatctaagaactaattcaacaatcttgtactttctatattcactcacctcaattagcttatttcgactactggctagctgcaagataccgatgattatagtttacatataatatatatgagaaagaaaacattttctcattacatgtgtaaaattctggaagatagagagtgtaagtttccattacctggaagttaatataatcttctgtgtcatccaggtactcgcgtagctgcatcagtcagagatgtcacaaagattcaaaactttgaatagaaaagaggcgaggaacaagaagatacagtaagtacctcggctaatttgttcaaagttctgtcgatttgcatatagtgtgcctgtaaaacaataacaaaataaatcaaatcgttgtttaagttccatatgtagctgaaacggtaaatatatatatatatatgcaacattcatgcaataaacaacctcgagcaacatttcaacttcttcaacatcattttggtcgtccccacgaaccgtggctgacctcaccaaatggctctttgctctggaaatcttagcacctattgttggggacgtaggatacgaattaatttgttcatcagaatcgctaactggtgaagatgtagtcgcaatcttccttgaaaggcagagatcacccagatcatcgtcatcctctaaccacagttgaagctcatcctttacctgaaatgcttattatttcatgcatttggtttatcaccaaaaaatgtgcatcaagaaatgtgagaaactaaacaatacgtgtttgaattcgtacatcttccgaattgacaatattcttacaagacttaaatcttgcatttttcagtttggattgacgctataattaattttgatgaagaaaagagatatttgtttcgagaattaactttaacacatatagggtttgataacacttttttgttgttgttgtttatgtaagcattttacaagcgaattctatgatgggttttaaacgctagcaaccgcaaccacccggaaacatagcttctgcggatgatagcgggaaaaccaatgaagctactcactttgagcgataattaattgtcacgaggcttttgcttatttcatagataaatatcctctctaggcaaatatcttgagtgtctaccatgctatcgaaattagaaaaagaaaatcatatgcttactttttggacccgaactgtcaactcatggaaatcttcaatttatgcaccttaccgaagttacggttacttatctacaaaaatgatattgttctcatcatcatatgaaaattgaaacgcaattggaaatgtatgagtgacgggctgagatagctaccttggaagcaagttcattcaaagcaggataaccagacttctctagttctgttgttcttgcagctaagaaactacatatggcttccaaagccacttctagtgcccgaaattcaaacggagattctaagattggaaacaccacatcagataccgacaacgcgacaagtcgaatagagaacggtttttatggaaaagcattacaaaatatatatatgccaaaaggacaagaatgttttgagatcgtaatgtttaaacttaccatctttttcagcatcaacttctgcacctgagtcctcttttccatctggctgaccacggcgttccctgttttcaacacccaagcgtctctcaaactccttcgcaacgggaataacattttcatttaatggctcccgaagcaaaacctgtagcatgtcgtgttaaaaaacaaagagagactgaaatagccaacacatagacaaacattcgaattctaagccatcagtttaatggagagaaaatgttccagctacagaatgttagagaactcacattaaaatttgatggtacttaaagtaatatatgtcttaacaaattagtattgagatcaaatcgtgaaatcaacccactttagcaagtttcggaattgtctaaacttcttctagagaaaagaaaacccttcaagtaggaggaaccaaattccaacacaaaagttttctatatttagaaaatgtaccctaactgttacgaatcaaaattcacgttaagccaagaaccgagcacaagatagtggatcgatcaaactaacgagttcgtctatcgcaaaaagaaacaaaggataaaacagagcaagaacagaggaacaaaaagagggcgacagaagattatagagtagagtatcatcattatacgagttgatgaaatttcatttctcctaagtttaacctgatcatgcgaatatataatcaaagtcgaacctacctactacaaagtagtctagtaaaaatggaaggcagcgagtagaaagtaaactgacctcgtcggcagtgatgatcaccttaatatgcttcatcggaccacagcgcaataccaaaaatgattaacacgtttgagaaaacccaataatgtatgaagaaaaaactcagaaacaaaaatggcctaacctctaagttcagcacaatggctccctctcgggttcgaatgcttaaaggggaagaaatgcttgactcgaagaccctgaggtcacgagcgtagatatggacacggcgtatgatcgcgtaactgtctacattgagcattgtactattccctgcagcgtctatgaggagccaactccgtgatggttttcttttagccgtggaaacctctgacggatccacgtctgaatcaatcgacatctccgtctgatgctcgcggcttcaattcagcaagacaaacctatacagaaacagcacccagttgatgaataggatcagaatcccctcaaatgtcacgaattcgtcggaatattttaaaactctgtaaggattaagcaaagtgggttttcttgggaccatctccacctctttttcatttatgattccccaaaagtcgtcgttctaatctagtctaagatctaggatggagtctttctttatttggttattaattgttgaccccgtgtaattcgcgggaatataatttatactatttctggcttatggcatttcaaattgtcagaggagttttttactatcccgcatcaaattgtcgataaaaatattcctgttgaaggcaaagcatgcacgcggcagggctgctatttctcccactttcctagtgtgtctgccctgctaagtttactttaaacaaattcccattattgattggtaagtttacgtactttaccctagttcatatagttacctcatatttctaagtaactacactatagccaaacataaatgtgaaacggaagcactcaatcgtcagcgaacttgagagcaaaatacaatacgacggtacggtatcagcataaacgtgaattaatggaaccgcatatttaaaaaaatcataactggataaggtttcaaaaaaagaattgttgcgcaataaacgagtttttttgtttattacaataaacgagtatcaattccttccatcgtcaaaaaccaaagagctttttgtaccgagcgaacgacattataatcacgaacaagattgcgcaaactgttgcagtgccgctcaccacctttcaaataaaaacaaaaaacaccaactatatcagggtcccggaaattcgaaaggactaacaggtccatggaattgaagtgttatttcatacccatttgaacatatgttttttgatgttccacgggaaaggaatgttcatgcctagaatgccaacaactacagagtacactgatacacagatgcttccagcggttaaaataatttcgaactgatacaagtgagacgaagatgaagattagcacttgtggttttgattttttatctaagaactaattcaacaatcttggaatttctatattcactcaccttaattagctgatttcgactactgtctagctgcaagatacggatggttataatttacatttattagtaaacaagagagattacattttcacataacatgtgtaaaattctggaaaataatcttttttcaaaaaataaagttctggaaaatataaagaataaatttccataacctggatattaaggaaatcttctgtctcatccacatactcgcgtagctgcatcagtcaaagatgtcacaaagattcagaactttgactagtatagaggcaagaacataaggaacaaccatagggggttggtttctttgtgcacgggttcaatcgccctttgggatgtaaagacattcttatttcggaatagactaaagactggctcaggacactgagggagactatgtgccaaaggtccagaactctagcggtttatcaacaaaaaaaaagaaagaagaagaagatacagtacctcggttaatttgttcaaagttctgtcgatttgcataaaagtgtgcctgtaaaacaataacaaaataaatcaaatggttgtcggtaaaaatatatatatgtgcaacattcatgcaataaacaacctcaagcaacatttcaacttcttcaacatcatttttgtcgtccccacgaaccgtggctgacctcaccaaatggctctttgctctggaaatcttagcacctattgttggggacgtaggataccaattaatgtgttcaccagaatcaatagctggtgaagatgcacccgcgagcttccttgaaaggtagagttcagccatatcttcgtcatcttccaacaactgttcaagctcatcctttatctgcaaatccacatcatattctgatttagacccaactttcactcggtataatcccaaaagcatatactccagttttgatggttctttcaatgagtctttgaactcttttatctttgaggttcacttgaaatatgtgaagcagaacaagatcagtgcatgtatgactcacttaagaaatagtttaattttcatgaaccttatgcataactcctaaatatatttcttttctaaacatagaccctgttccaagtgattcctgctcaccttttggacctgagctgtcaatcgggtcatggaactcttcaatttacaaacccttagcaagttacggctagttaactacaaaacgaaacggtgctcatcgactgaaatagagttaaatgtggttagagatggatcagtgaggacaataatttcgaagttagctaccttcaaggtaagttcatccaaagcaggataagcagacttctctaattctattgtccttgcagctaggaagctacaaatagcttccaaagcaacctctagtgcccgaaattcaaacgcggattctatatagtatcaagcaatcatattaataccaaaagtaaaaagagtgacaagtttttcttacgatatttatagaacataggtatcaaaaagatcaagaataaatcaagaattgagttctaaaaatgactaaggtcaagggctaccatcttcttcaaccacatcaccatctaattgaccaccgtgtgccttgtttccaacagataagcgtgtctgaaactcctccagggttggaataagattttcatctgacgaatcctgaatcaaaacctgtaaacatttgaaataactaacccaatccatcatcacttctgaaggagagaaaaagcttcaactattacataagatcagctagcatgatgaaacctgtttaaagttaagcacactgacacctaatgctctaagcagtctataatgcaaacaagatcaaaaccccaccgagattatgaccaatttaacacagtagctatgagccaaatctaacaagtttaatgtttgcccaagtcaatcaaagtacactgagactgacctctttggcagtgatgatcgccttgatatgctacaaaggaccgaaacacacaggaactaatcaaacatgattaaccaacaaagctgtgaaaactatgaaaaacagaggagaaacacaaaagtctcaagtcccaacctctaagttaagaacaatggctctttctcgacccagaatagcagaagggtaaaagagatttgggtcaagtatccggagatcgcgagcgtggatctgaacacggtgcataatcacatatttgtcaacgtcaagcaccgttttttttcccgtcgcgtctatggaaatccaactccacgatgactggggtgtaatcctcttcaccggaacaagttcttcgttaggcaacatcttcgactcttcactgcttaaacccgatatctaaaagcaccttttgtcccagttgaattaagaaaagcggaatttccgttatctgctccttttgttcttcatataactcctctaaagtcgtcggtcttattttaatgggttattcaaaatctgacgagggagacaagaaccattttcatattaggatttcgaggttcacactatagtatatgtttgttttttaatcaatacatttgaatgctttgctttttgttaattttcatccttaactatctttgacttacaaagatttttgtactgaggtttgatggagtcgaagcatccttcacaattactaacaactgatattaagcatcctttaaaacattttaaaaaaaaacatatatatgctattatatgctattatcttcatataagtttggtcgataatttgtaatcgtgggacaatgaaacttctccaatatcccacatcggtttctctactcataatttgtcttgtttatatatctcattaaatcaacttcttaacgtcgagctatgtaacgagagcttgtaacccaagtggggactataagatggtggaacactggatcggcccacgggtcggatttgttgttggcataggtctggactgcccaatccaagctgtgagtgaaccgtatgaaccaagcgaaggtttgatccgtacggttgctaaaggttgagggtattgcgttaggctggcttcacagagcagcgactacctcccgctctcagcagtggacggacaacggttcgacgccacacaaatccactatggtccgctggctcgtaacccgcttgaaccaccatttttttatttttgtaagattttaaaattgctatctcattttattaccataattaatatcttaagttaaaaacaaaacgagccgtcgaatcaaacactaatgttcaaagagtgtttcaagcttcctacatggagaagatgatgacctaacgcgattttcctcttcccggtctcatcaaccacactcagatccttacacacattgacgttaaacctaaccaccgcttcttcactctttcccagacgaatcttctcaaatcctagtagttgcttaatcggagatccgtgtacttgcggcgacgtcgtgaacagaaacaccgtgtggcttcccgctctgtctccggtgttctttacattcaaatgaacctcgaaatccgatcctccctcaacggcgttctcgcagtgaggtccgatcgcgtccaaagattggcactccgatgatcggcaagggtggttctcgtcgagactgagagagacgagtcttggcgctttgattagctgatggtcgaatttagtgtaggtaagcgcgtctgcgaaggcgtatacggtttctccggtgtaaaacctgtaactccgacccggatacccctttgatttgtcgggtctcatgttcatatttgacatcggaactttttccacgtacgattgaggataccacgtcatcggcaaatttccacctaccagaaaaaaaattaccggttagagaaattgcaattttaaaaccgaaccgggagattaaaaccggttgaatctgtagaacagagtattactcggattatgacgtccgaagataacgtcagcaatggcgagaccaccggcttcaccagggtatccgacccacattatgcttgtgatctttttatcattcttggcgaatgtaatgtcaaatcctccaccggacatgataactagcaccaccggtcctcttgctgccatagcaactcgagtcacaagctcttgctgctttccaggaagatacaggtcgactcggtcatggccctccctctcaattgattggtctgcgcccaccacgagcacaacagcatccgcagaagcagccagatccacggctgagcctatatccgcatctacgcaagccacgttacatcccagttgataggtagacgacaccgtttctgccaatccctgaagcggcgttgtgtacttgcatggtacacctgaatataaatacaatctcagtttcacacattttaagcttgaaaactgaatcatggagaccgataatcacttgtgtttcttttatgtttgtttcaatttaccgtggtagtttccgatcattgtttctgtggcattggcgtttggtccgatcacggctaatgttttgattgcggaaggtgagagcggaagcgaaccagcagagttcttaagcaagacaatgccttgtcttgcgccatctcttgcgagttcttggttatcagcggtgcaaacatccttaggaccaagaccaccgtagagctgcttcttagggtctccatcgaagaaccctaaacgcatcagagtcgcgaaattgtttgaaatcgctttgtcaatagctgtttcgtttaccaaacccgccttgaccgctcccatcgcgtgttgaccattgaaatgatcacaattcaaatccaaacctgccaatagagatttggccacagcttcttctggagtcttagcatagtgttgttttctgaacaacacatctaccgaatcacaatccgaaacaatgtatctaacaaaaaaaacaaccgatgattttagataaccaaaccctccataaaattaaaccattggatccaaataaccttacccgttgagctgccattgtccgcggatcacaccggaaagcagatcaggatcggcacatgttggtttaccgttaacttggttgtaagaacacatgacactagcaacatgcccatcaaccacacagctcttgaacggtggttgaaacgtatcagccagatcttgttggtttacctaatccaacataacacgaaaaacagaatgaaacattgaaatgtatttagtgcgacaaataacaaaagttacaaaatattcaaagaatccaaaaaaaaaaaaaaactctttcttcttaccacagcgttgaaagtgagacgattgacatttctccaattgtcaatatcataggcggtgtagtgtttgcagcaagcagcgactttgagacggttaggatctccaccgtcagtctcctgaagacctttaacgtaggccactgcgtatttgcttgagagtgttgggtcctcaccgggagtctcttgtcctcttccccatctcgggtcccggaatatgttcacattaggtgaccaaaacgttaaaccggctgatcccacattgtacattgccctcgcctctgtcgatacaaccttaaaccaatatatggataaaaataaattaaaactagatgcaagaaactactcatgtctaaagcattgagaagaaaatatgatatatcattacttatgtcctaagaaacaaaattttccattttgcataatgagtgagttttcacagtgtagcccaaaaatagagaaaatgaagaaggagatagttctttcaccttgccaatggcttggaacaaagacacattgaaagaagcggccgtgagtataacttgtgggaagctagtggcgccagggacttgaccggtgaaccgactaccacctccgacgttagagacgccatgaagtgcctccgaccaccatttgtaagacggaatcccaaggcggctaacgccgatagctttgctggtcaaaaacccgattttctcctccaacgtcaatcttccgacaagatcggtgactcgggctttgatactcaaccccgcgttgcagaatctaagcccggcaagagaagggtttccggtgacgtcacaggcgaagactggagaagactgattgttcgattgctcggagatgcagacgatgaaacagaggaaaagagtggaaacagagaagagtgctctgtttcggctcgccattgtatctttgtctcgagattttttgttgtggtttgtgtttgatgtttattgattactgttgtatatatatactaatataagctgtacgctggttggaaaattgttaaactaaggaatataatttttaaaagttgaatatgtatatattactgtatttatatagaagttgaataccaataaattaaaaaatagtcaaagtaaaatgatggtaagttggtattagataccttaatattaatgtaataaattaaaaaatggtcaaagtaaaattatcaaatcctgaggataaaatgtcactatgaataataatgacatttcctgctctttgttaagaaaggttatctaaatgaaatcagggaaattcgttgactcgagaaagaaatttgattctctgaaaatcagatagaaatgcatgactatgtatggtcgtgaggtaatatttcttagttataaagacaaaatcatatatatgaaagttggtcaactctctataagtgacacatcatcatacaagaaaatgacatgtgtcattctatattaattaaataaaaaattaatacaattaattaaggaagaatcaaaagtcttttgttgtgttaaattctatataatctctcttttaaataaatattcttaaaacattcaataaataaaaaattataataatatatcaagtactactttcattttattctacttattttttaaaatatttttatcaatagttatcaatttataatggctaaaatttactttgtgtcgtagtttaaatgtttgctacctaacctcatattaattagtaattttagttggatatttttttattattacgttatatgaatatgatttatcatatgaccttatttctgtttatttttgtgcgttctgataacttggtaacattgatatacatttttcacgtaatggtcatccgagacattagacatacccacacaaaaaacacgagactctatatggctatatgcaagggaagagaattaaagtgttgacttgaattactagcatatcatgatgtggttagtgtactagataacgagagaatatatggaataaagaattgtttgttacaattaagttaggcaagtttcaaaatacataagtaatataactacatattaatatatcatataattttgttgtatgtgtttatgatagtgaaatatttgaataataggtctataaatattcatattatagtaaaatttaaatttcgaattatagataaatttaattataaaaaattataactctataaaatagatatgactttattacttatacagcaggtaggcttatattttagttaaactaaaaacttttattgtaaagttgattataaatatatgatattattttatttgattttaaatgtatagtaaactgcgagttgtatatgttttgttgatattatttatattgtttagtgtttaaaattatatacttgtattttgattgttaattttatagtttcacctgtagtataccatcttgtattaatattgatttaaacccgtcaattctaggatttttcaccttgtattaaaaattgaatcacatcatacacattaaaaaatctaatatgataattcaaattgtggcatatgcgaaaaaactctaattatttttttataacgatgatattattttttcgcaaaaatagaatcatataaagatgagaggtgaactataataattaataaaaaattaatatgataatttagataccaaatctaatttgttgattttaattggttacttttttggaaattaataatgtatttcgtttttgagttaaatttaattaattaaattagtatttgactttttaatttttaaagaaatgaattaatttactctttaaaattttatttctaatggcatacctatgtaattacttacaaaaaataaggttatatttaaaatgtacttcccaaataatatagtaggatattcattttggacatatatatatatatatatttatttatttatttaaaatatccaggttacatagacatagttatgaaaacacaaatggtttacaaatgcattggtatttggtaacagagaaagctgcaagagcatataataattcgatctgattttgaataaaaacaagatgtaaggtgttttctattttgggtattattgaatcgttagtagcgttgcggctttcaaagtcatgcgcagacattttgagcaactttgcgattgaatgcagaatactgctgtctcgtgattggtcgttgacatatctaatttcgacataaacaaaaagatgagagtagtagtacagtatgcaataagaaacaaggtgtcgtgtcttattcagtatgcaataaaaaggagagtacactaaattataatatagtctgtaaaacaattctacgaaacagtaaatcacatagttgtacatctcatggtaagattaagattctatttcctagtacaaaaaaaaaaatactattctaaacagacaaaaattaagagcttaagatttatgtattataagcatatttataagaattttcacacatttctttccaaaacttattttctttgtaaaacattctttattaaaaaaaaaatgagtggagacacatgcaccccataaaatatgcagccacgcagaggtatatatatcttccctttttgaacacgatacaatacattaacaaactcggaaatttttacaatagaataactttttttcgtcgtctaatgtatcatatgagaacatcttataagttataacttacatatatattaactttaagaaaacttgttctctatagtctacagaaactccacaatacacaatatttcacatatttctgatggtaaaaacttaattttggtacgtaaaaattaaatcttataaatctatttagcaaccacaagacctacattaagttctaggtttatgtaagatattgaatactgatagcgattggtcatctacttaaaactacgaaaatctggcgcaaaatctgattgtatggttacatattgtgtatcaaacttaaattcccaccctacatgtcaacaaaagaagaagaagaatctatttggatatatatgtttgggtaaagaagtgaaatacatacataaatgttaactatggaatatggaccacattggcaccaataaacctaataccaaaagtgtaggttcggtggtcatgaatgatgatgtggactgaataatcgacatttttgagttggctttatcgtggaatatcaacatcattttgacattttctataaaattacaacatattgtaaaagagacagattctgaactgattgtttatcaacgtttcttgtaatcataaaccaaaatactatgtcacctagttcatatcttggccaaatttcgcagacaatgttgcgttagattcagagattccaacttttacggtttctaagttgtgaaacatttgtttacgcacatttgaatatttgattcaataacttgcaactatttcatttttgtccaaccttgtttttatgtttgctatactatatcgtttactagttgaaaaatatgtttgatatatttgtcaacaatgtatcttgtgattatgaacataacattttcacacaaaaccgcaacagaaaatgcaaatatatgcatttgaaacaactaaggcttatatatatatatatatatatatactaaatacaaatgatcacatacatactagcaaaagaaagatggacctatgaaattgcttcaaatttcctcattataagagttgtaaacaaacaccattccaagtacgatttcaacatttacaagtaaagtacacttacatttcaggagaataagacagcccgctttacttacacactcaaatcaaatccaatggcacaagaggagtgtacttactcttaactctggtccttgtaaggtgtccaaatcagtttgctagcatctacatcaagaccacctcggcctgcagctttcagatgtcggtccagaacctttggatccgcacagatcacatgctgtcctttcctgtactgtatcagttctaggctctgaagtgtgcttaatatatcttccgctttgattgctgtcacgtcgctcagctcctacatcatcatacatgaaacagagacagatgagtggattcttagatcgcagaaaccaggattagcctaagactttttatcagtttgaaacacaatctaaccttgatagaaatgtttcccttatgttttttcaagatttctaatagaacacgagtccaataacctctgtagcttagtaagcctagatccgacaagggtctttccggtgtcccaacttttccctctttctttgacagttcataggctgcaactcagaagaacaatctgttacttatttttgtggacatgggattgagaagagcaaaagggtcaaatgggcaaagaacttacaaaaggctattaagaactttccatagccttttctttgatatgaaggcagggttagaatgcaagctaagttgtatgcttcttccgaatgcttctcctggacccagtagaagttacgtttatgagcaaacaggaaaatggaaaccaaacatatatgtaactactttgctatattacctttgaaaagtacccaaccatgtggcatcctcggtcatcacattcgcaaagaacgtagaatagaaacaaatcaacatcgtagtaaagagttttgtggtcaagaaataactttgccaggtagcagagattctgtgcataaaccttgttctttttgccatctacctgtaagatgagagtacggttagagaaaaacgttcctgctaatgtagaacataaccagatgagagataaactaatcagcatccatatacgaaaaaaaaaaacataagagaaagctaacgatacatcatatccagagcaagaagaccagagacctatctcaggatattacctcaaacattgacaaggtaccacttcggtaaatttcatcaccaggtgggtgcttcaggtcacacttcctctgcaggaaaaaagtaaggaaattatacaaaagctacaagataaaataaaaccatataaatgcaactttaatgaaccgtgaatgtggatatgcaagtcagtgacaatattcaacagaatctgaaaggttgggtactatcttcagcaatgaaactggaatgcaaaaacatagaatacagatgtgaaaccagactattgaagctcgcaatggaaatgtaattaaaaagcatcataagacttcaaagataaagaaaaacagttgctcaccatatgcctttgaagctgctctttgcgtttcatgaagttcaggcaaaactcacaaaaaaagagcttcacacagtcattgtattctggcggaaaaggggagaagtaccaagtctcaatctcatattttccaagctcaattgttgatatgttcttcactttcgtgaactcttcatgttcacgcaaacttgctgcatccagctcttcatgaccctataaaaacatttcgaaacacagaatactgaatcaacacaaaccttacgtttccaggacccgccttatattggcattcattacctctatatgtgtctcatcgatcttcctcttctggtgacgtgtcatcttcaagcttgttacctagaaaccacagacataaatctctgctcattgctaaacgtatatgagaaaactcatgaaatccacattatgcaactaacaatacaaaactagagaacgcaccttgtcttccactttttcatctacagcgcactctactgaatcaaggtccagttggtccagctgagtccattcatccagcctcctattaactgcagtttcgaaaacaaattaccaaaatcaaacacattgatgatcataagatttcaaaatcaccaactttgtcatcatattactcagcttaatcacaatagtataaatggttcaaaatctttagaagcaaagtataatgcagaatttgatctccttctcaaaaatctcacacaacttgaagccaattccaatgatccaattgataaagtcttgcaatttaactcttttttcttcctacattataaacccttgactaaatttccacctttgtgaagctcaacagtacgaatcaaccaaaattgaaaaccctacatcaaaacttgataaggaattaaacgacatacactcagtgtaatgaacgtaatactcgtaatcattttgaccgccgttatgtatccgccggcgctcaattactttcaccggatggtgtttcccgtctctccaccgacacatcacacgagtacccacttctagaggaagcatccccattttcctcttcttcgacggatccgactctataatagcttgatcaggagttaaaggaggaggaggaggatgagacccatcaacgccgttcgtagccggaggcttttgattcgacgacggtggcggtgcgttgccgttggtttctgtattcgctgacgatcccatttctcggtcgggtcggagattcccgggtgggctttctttctcatacgagtaagagaactagagagagaaaaacggacacttgaaataaatcaggcccattagtaacttttcacataattgggcctatatttatgggccgttaaaaatattgatatttaatggtgtgaagtacatacattttcaccgggatcacagtttattcataaaattagaaagttgtttgatcatgtaagaattatctcgaatcacattgaaatatttctgtagtaaaacgaattagatttgaaaatatatgaatcatacccatggctatttagtgactattaatgcattgtttgagctaaataatttggttagacgttaagttcttgcaattatctctaggatgtgaatgaatgtataactatgtggcaaaaagaaagaaaatatattaaatgatttcgttagcaaaatggatatagctaggtttccatgaatctcactgacatttcattgtgtctttattaaaacctatgaatgtgaggagacacaaaagtcagcggaagtatccatgagtgaagtgaacaaggagcataggtttccttgaattaacctctctgctacttttctgagattttctgaccaacaagtgtggagcaaagctctggtggtttaatgcttgtttgtagtcaaaggttttctttttattattgggaaggtaaaaagagatcttgcaactgttttagttgaacttctattcattaattcgaagacaaaacgagcaagtacattttctctgcaccatcctctttataatatgtctcgatatatactctctttctggagtagagtatctgtataccttatcggtttgttgtaatttgagattactttatattacaaaacatcattttatgggatgattgtcgtaattttcattatgctaaacgttactatagctaaacatttttcgttaacatttttacaacaagtataatcggatacgtttagtctgttagactttttagttttcaggtgatgtttaatcggatactaacaagtataatctaatagactaaacgtacggatattattttcataacaacttttttctttttggatttttcgttgctagttgtgaagctatatattaaaaaaaaagccctaaagcttattgtaatttaggaattcttaaagcttattctaatcataacaaaacgattttcaatatgtataggtattaacgttcaaagtgaggtatgtacgtaaaaagatgaaaatgaagcaatagagtacattcatattatatgctctaaaatatagtacttcacaaatatatgcgttgtgtgtatacaaagacaaaagtccacagtaatgataacactatttaaatagggttctttgatggcgtcatggttcttatgcccgaaaaatgcccggccaaaacttgtatacaaccaaactccaaatcaagaacttattattatatacgaaatgataacataatattaaatatatggtggtacacaactcaagctaaccgttatgattattccacaaccttttcacggtcaacaacaatatattatatatcctaacaaacccttatttcgtatccatttttattatatataaacactttccataattgcaccattactcacacattatagcataatttagttactactaatggaaatgtcatcttgtctagattaattctcctactcctcttcccccacggccgaaacttggcggtggtggcggtgaaacccatgacgtcgtcaccgcctgagaagcttgatcttgcggcggcggaggagtatatccggtattattattgagtagccggatctgccgtttcaagaacttgacatagcgtatagcttcatcgagcattgaagccgtatccattttagtgccacctggcacgagtctctgaagaattctgatcctctcactgattctctcacggcgatgtctagccgccacactctgagggtcgtcggagatcctcacgttacggcgtttgggtttcttgacggttgctgggtcgatgtcaaccgattgcatggctgcgatcttgtacatcatttccttcatagcaccgagttcctctagaggttcttcttcgtcttcgtcgtcttcttgatctccggagagaagagtggtggttgtgagggaagaagagagaggagggaaatgagaagaagagaaaggattgaagatatggagctgtgtgtactggtccatggccataccgattggatcattattatgttgatgatgatgatcatcattcttgttgttgttgttgctgctgttgatgatgttgttccaagtgtaattttggaagagagatgggttcatattataattattcataatttttgtttgtttggttcgtaaaaattttaatgcttgaggcgatgcttatatgtatatatatatgtgtgtgtgtgagcatatatatatattaaaggaaaaaaagaaaggtgatcatatgatgaggggttaggttggtgatgcaattaaggattttggttcggagaaaaaataaagaataattttatttatatgtatcttttcaataagtggacgtcactagtcgttaccaaagaaaaagattaaattgtatatagttgaataagaagtttttttatgctccgaaaatgtttataaacgttgtagcacttttgtatacatatagttggcataatcgcttttttttttttttttttaatgagcagctccagttgactaatgagatagttttgagttggctagggtttccctctcccacattgagacttgaatttagggtatatcgagaaagtggctttcaccaaagtaataaactaataaccactagctataagaatgtgaattactttatatgaacatgagtttctctttgattcacaaaagatgtcaccacttgtgtgctcttattctgacttctcaatttacaatccctttaattatctccttctctcttcacaaaacccattcactaaaataggaaatcttgataaattttctctcattctcttgtctcttcacgaaatagcacattttgttgatcctatactcttatcccgatcaacggtcgtgattttctctctcccctcgatggagtccaatattgaatgtaaattgtgtgtgaaactcgcaatgttatatattattataaaacaaatgatcaacttgcttttttccacaaagctattctataacttgcgacgtgattaaaggtttataaggataacaaacatcaaatcactcgcatggggacaccttagcttcttcaacatttgggtgttatccatgattgtcattaataagaaagacgtgtatcatcgtcgtgactcgtttatataagacggtggtgaatatatcattttccatgaagcaatttctgctttttattaacaaagttcacatctacgtaacaacgttcttgtatacaagtgtataaaacaaacacaaatccgtaaaatacacgaaattttatgagacttcaaaagaggcaaatttatatacgttgtttcgatccgtttatacaaaaatcagacggttctgatttaatgtgacaagtttcttatgtcatatgcctcaacacaaaagcaatgtataaatacacatgtatatgtacatatatgagatataagcgtatattttgcacatatgttatgatttggtctgcattataatcatacaaattgcgcatgcaggctgcaatcatgcattatagggttacttctttggtattaatccattgttcactgtatattatattcttattaaatccacccaactgccaactacatgtatgaacatctacttatacacacacaagttttggaaattaatttgattcgatataagtatacactatatagttttcgcatttatagcggtttaaaatgaaaaccgcaattaaaagagtaactgtgtatttaatataatagctagcattcgatcatattattaaagtatataacagtcatgagcaagacttataatataatatagtttagttaaaagaagttttattttgccatgtattttatataatacaaattcggatggattggagcaatgaacaatttttttattgcctgatcataaatttagagtgttttttaattaagtctattaatatttttcatacatgtgaaagttaaatgattcattttggacagctagtttctaaatttccacaaaaacatgtaaaataatagaatatataagacacataaatttaatttacttcttaaatctatgatttcatttagaatacatatagtattttattattactttttcctttttggttgtatgtacatttctgcaactgtgatgtgaaatatcataatggtttataaagcttgtataatatgtttcgaaatgtataccgagttgtaataaacaaaaattgaatgcaattgatttactaaatcatgttttcttttaagcaaattatcactagcttatctattatgatatggtttaaacatgtgacagctcaagcggcccccatttcgtctgtgtataaagtgtaaccgtaaaccctaactagatgaatctagtgtaaatgtatatagtacatatacacgtgagtgggtgaaataactatgcaacattttccgatgaagattgaatcataaaatctgacaatctccattattttcatccaaattatcgcgtacataaaaaagcattaaataactatatatatatataggccatacatatataactatttttttcagcaattgtgcttcttcctcctttttattaatagcgatacaatcttccgtctttgtgcgttacgattcccaaagaaccacaccctcatttcctcagagtctggtctcttacagcgacttctctttttctttcttttttggatttcctctttctgcttccaccatggagaagaacaaacaaagaaaaactcagtgttgtttctttccaaatttgaacactttgtaatctagtgatatcactttatcttactccaatttcaccggttaggtttggtcattaaaaatgatcaaaccaaaaaagaaaatgtataagtaatcaccagttcaccacttggcttaattcatccaaaaataaaatttcaaattggctatatatcaagttaagaaaaataaagctagacgaaaaaggtaggatatatatgcgttattgtattgatttctataactacgagggtagattatgtgttataatattagtaatgatgctaagttttttaaaatggagtagcaaaaaaaaaaaacatgtttattttttctctttcgcgagaggatctaaaaagtctacaaaaaagtgattacaaggcatgggaagctgcagtgaagaaaagtgaagaagtctcttgtttggtccgaaagtgttagtgttatggaaaactctttaatgagtttttcactttatttttctttctcttttgtttttgaggggaagaatattacacatatgaaattgacttcgagggttttcattttcttggattattgcaggtacaaacgtatttccagtatccatgcatagacgcataatgccgtattgtagctacatacacgagaagtagacagtagactcatttaacaaaaaaccaaatagactcaatcaattatatgttttgatgaatattttaacattcaacgattaatatatccactaatgaacattcttttttttccaacatccactgatcaacattttgttcgacgataagcatttttctataaaaaggaattccttagctcaggtttatgagcatgcagggtaattgaatcatcgtgagtggggacagtgaaagaacagttttttttttttttcaagtaaagaacaatttagccaatttcagatgattttttttactagattaaattaatttaacacattttacttagaggcatgtgatcccactcgtcttaaattacagtacaagtcctagtaaaaccgaacatttttgaaatccaaagagtataagaattgggacagaataaaacatatatataaccaaaaacctgtaattagttggaacatcagtcatgttccctgctaggattgggtaaattttgtctgtaattagtaaaaataaatctccgttgccgggactcgaacccgggtctctcgggtgagagccgagtatcctgaccagctagactacaacggatttgtaataaataatattaattagtcaatatgttagtaacaccaaattttttgaaaaaaaaaagaaagaaaagaaaacattaaacaagagaagatataacatccaaatcgtaaaggaaaacaacattcttctcaaaatcggttgtctaaacttggggatttggactaattcatacctggccccgagcccccgacttacctgaggatggtaattgtgggtttggaaccttaaagccctaagttattttattgggtcattggcaaaggtgcagaatccatcttagtgggcttatacgagccaaaaatatgggccgctacaaacatctggttatgttattttagaccaaaaatatatacatataccaaacatgttggatataaaaacttatgagataaatgatttcagagattttagtatgtaattgcctatttggtattcattatgaaatcaaaaaaattaggttatttttgttgaaactagtttatttctaacatccttcagatttctttctagtttaacgtttgataatttacgttgagatttaaatgtaattatcaaattaactaaagatataacctccaatcaagttagattttaaaatttacaagtttagtatattataaacaaaaattcaaaattttaactacatttatatgtataaaatctgtaattgcagaatagacataagagtcttgaaactggtgatatagtgtttgctaataccaaacctaaccaaatcaacatatattctaatctccagattagtgtttggagccgattgcttactaaaattagactattaatcgtatactccctttgttccatgaaatttgatgttttagattttatttttgtttcataaagattgatgttgtaggttaataatattattatttttgttaataaccaatagagagaggagagaaataagacttatattattaaattaacagaaaataatataaataatataaaaattacttttctttgtgtgaaaaacccaaaacatcactcttttaggaacagagggagtataaaataagaatccaaaaacaaaataaacaataattcgatattaggaaaaatgaaaaaaaaagaaaaactaagaaaacaacaattaccaaccgcaagtcaagaatcaagatcaatagcgtgagacggacctaaacacattaaaccaatacataaccggggtcttaaccggacaatctattataatctccttatcttccctaatagaaccgtaattacgaaaaaggacagtcacaaaactccaatctctctctctcctctccgtctctgcgcgcatgatcccccccatagtgttccactacgcaccgcccgtgactctctaatggtctgtgacttgtaatccatctctccttatttttatttcaattttatttctttccaaaattttaattaatttccacacacacacacacctatacatatatatacacacacattcgtctctaatggcttcttcgaaactccatcatcatcctcaccgcagaaaatccccaatacgttgcttctgtctcttaatcataaccatgtcctccattctcatccttctcttctctctcttcctcttctcctctccctcctcctcctcccgtcaccaccaccaccacaattccggcgacacttctccggtcaatccttcgtcgtctctcgccgctcagatccgtctcgcttgtaacgcaactcgttacccagaccaatgcgtctcttccctatccgaacagggtcgggttcctccggatcctaaaccaatccagatcattcactcagcgatctcattctcattccaaaacctcaaaaccgcccaatcaaaaatcaagtctattgtagactcgtccgtagggaatctaaaccgtacaaacgccgcgaacacgtgtctccagcttctcacttactccgagcaccgcactcaatcgacggatcaagctttaacacgtggcaaaatcaaagacgctcgagcttggatgagcgctgctctagtgtaccagtacgattcatggtcagcgctcaagtacgtcaacgacacgagccaagtaggtgaaacgatgtcgtttctcgacggacttatccacgtcaccagcaacgcgcttagcatgatggtatcgtacgataacttcggagacaacgtcgcgtcgtggacttacccagcaacggaacgtgacgggttttgggaaaagactgggcctggtttgggcttagatccgagtacagggcttaatttgggttttccttccggtttaaaagaagacgtgacggtgtgtaaagacggaaaatgcggttacaagacggtgcaagacgccgttaacgctgcgccggaggataacggaatgcgtaagttcgttataaagattagcgaaggagtctacgaggagaacgttattgttccgtttgagaagaagaacgttgtgtttatcggtgacggtatgggcaaaacggtcattacaggttcgttaaacgccggtatgcctgggatcactacgtacaatactgcaactgtcggtgagtgtctctcgtaactttttaatgttaaagcaacatagtttttttgtataaattaagagttgaaagttcataattttaatattgttattagagtttagatgtagataaatattatgtggtttaagtctggtcacgtgaaagaatacttttttgatgagctattccaaaatgataagcatattaatcatttttttttgttaattgtaatagtaatgccaaaagtgaatttatatgtgatttgaatgttttgttttgtttaggagtggtaggagatggattcatggctcgtgatctaacgttccagaacacggcgggaccagacgctcaccaagcggtggcgtttagatccgacagcgatttttctctgatcgagaattgcgagttccttgggaaccaagacactctctatgcccatggtcttcgtcagttctacaaaaactgtcgtatccaaggaaatgttgactttatctttgggaattcagctgctgtcttccaagactgtgaaatcctaatcgcaccgcgtcaaattaaccctgaaaagggcgagaaaaacgcagtcactgcccaaggaaggattgacccgtcccagtccacgggtttcgtgttcttgaactgtttgattaacggaacagaggagtacatgaagctgtttaaagctaaccctaaggtgcataagaacttcttggggaggccatggaaagattactcaaggactgtgtttataggttgtaatttagaggctttgattactcctgatggatggttaccttggagcggggatttcgcgctcaagacactttattacggtgaatctaagaacacgggtccgggatcagataggtcacaaagggtttcatggagcagtcagataccggacgagcatgttcatgtgtattcggtggctaactttattcaggctgatgagtgggcttcgatgtctgcttaaatcaatctttaagactataaggggtttaggaatgttttaaaagaagaaaaccatctcattgtaatttagttgataaactgttttaaacataaaagcaaacattgcattcatgttatatcaattgagagttcatagtcttaggactaattgaagtaaaacaataaagtttcaaaacttggaagaaagcaacttttttgcctataggtgtatgcagggaatgattccatatatagcgtgttgggctaaaatcataaatgtgtatggaggaggatctcaagttgcgttttgcttgacgttaaagcagaatttgttgtaagaaaacgaaatccccaaaagttttcaacgaagtagacatcatcatcatcattatcattatcaccatctcaatggtttagagatggctgtaaaagtcaggaggatgatgcaggtcgcagaaactggtaaagggcaggtaaataaacattaaattcaaacaagagtaggtttcaaatggaaaatcaagttggggttttaggttctgttaagtagttcacctaaagatagttaactaggtaaaaggtccatgcattaggtacataaattttactgcttttggtcgatcatagggcacacattaagagattagcatctcaaactctaacctaatcttgtaggagcaagaaaaagagagtaacattttttactaacagtttagttcataggtagataggcaaagaaagagtctctctaagcctgttaatgttttcaagagtacattttcaatgttcaaacaaatgaaaaagctaacttattgtttgccttctgtaaaaacatattgtggcatatgataaatgatcacgaaaatacatttttgagacagagacaagatatttggtgaacagagggaaattgcttatgccacattacagctcagaatcagggattttctcctccttaggcggagcgaactgcctggtgagccgagatctttcccatgggtccaatggcactcgttgcggtggttgaggtgttgctggttttgattgcctaagctcgttctctctgtcaataaacctatccaaagtatcaagtatcgaccaaattagttcaccagaaagcttccaaatcattaacacttcttatttgatctaacatggagatatgaatgtaaaaccagaaagactgataaagaaaagaaactagttttactcgatataggccataggagcagcatcaccaactcgtatgcgagtacgtagcagtcttgtgtatccaccagctctatctctgtaacaaataatatatatccagataatgcaaagcgcttaggcaatggactgttaaaatgatgccaaaagaatttgaagactcacttgtatctatgtgccagttctgtgaaaatcttgtgaaggacatcatctcctctcacaaaaccagctgctcgccttgcagcagagagtgacccctataaatttcatcaccaagatgaagttatcatacataacgagctaacacctctatcagaccatatagtactgctgattagaaatgagaagaacttagtagggcttaaaagctggcacatatagtgtgatacaaaagatggaatgttatcaatcagtaatcgaataatatgaaactctttgagttcaacaacagtatcaaagacatgaaggaaacataaaaatacctctttgccgagttgaatcatattatcagcaagacgacgaacctctttagcctgcaaaatccattttttttctttagcatataaatttgcaatcaataaataccactacacacgtttcacagtgagtataaaatagctcaagaatcggaatttgctattaaggagtatcctttttccacaaaacagacattagaatctgatgaaattgagttagacgtaggaaaatggcagattctataaaccctaattaaaccctgacaatgggagaaagagaatcagtacaataccttagtgacagtggtctcaatacgctcgtgcttcaccaactgagaaaccatagtcctgagtgataccaacacttcaaaaatcaaacgatttctatctaaaaagaaagtgagacgtagcaaaaagaaaagctggagactaaacctaagcatggacatacggtgacccgccggccgaccaagcttcctgaacttcgtcatttctgcgtcggagaagtgatctctgaacagagagaagaaccctaaaggaggaggagagactgtaactctgtgaagcgcctactgggtttgggctttgggcccatatatatcctctcttttttttggacaaaagggcccatatatcctacaaaccggtttttgactaattctgttctaaactaaaatttggaatctgcctcaaaaaaagttccaacagattttggttgctgaatataactaagagaaagcaaattaatgtctcacggaaacacgaaacaaataaaaattggtcccaaacatatgaaagctacagacgagtaggaaagttcacataaccaaactaacaccattaaacataaaagtagtttacttcagttgcttgttatccaaggcaccttcacatccatcagcatcattcatcagtgagttattctctcttatggctttgagacaactagaagcagctcgagtggtgtgatgagggtgaatttgcaagtgtccccaaaaacaacaggatactccttgcacaaacgtttccatccaccagagaaaatttgacccctctcttttaccacaaaaacaaccttccatgtcttctccccatctggatgatggatcttgacccttgttttctccttcggcatataatttccaaaaggtttcgggatcgcctgaaaaaccaaaccaattttgttcgtcaatcattaacatatcaagtttgacacaaaagccaatatcagaaactgtgtgttagtgctcttatcataccagggatttgatgtatgatttcgagataaagattttgaatcctgcaacagaagaggaaggttcgcctgcataaactctctccttactaaccactctctccgtcctcttggaattttgggtcctctcagtcctcttgtaagtttgggtttcctcagctttcttcttcccaaagttgagcttccttttgtagctgcctcctctattagtttcagctgctgttgtcgggccacgagacctcgagtcagaagacaccaacacctcttcctccctcttgacatcttgttctgttttgacacgacctgtttcatcatcaaaagtatgaagaatcaatgtctttaatccggttcactgtttcataatcagagaatcaaaatcttactagaagaagcgaaagaggctctggattgcggaggttgcatcatctccttgccatctttgttgaagattttcacagtgaagctcatctgtcctttgtgagtgaaggtaagaaactcgtggtctcccaaggcattgtctatcacgaacttctcccatccagacttctccatgaagtagaatctcgggttcttggagatttttactttccaagagtttccccattgcactctgaacttcatgtctccggagagctcattgtcagagaagtttatcacaaagtcgtacggaatcgctcgctgtggttatataaaagaaagatgaaaagatataagtaagatacatgtctgatattaatataaaacagtgaaaaatcagtgagcttttacacatcccatcaagaatctgagtacaaagtttcaaatctaaccatgaaatcagtgagctataacacacaaatgacaaacacaacaagacggtgaaaatgaacagaacagatctcatccacaagaaataaagtacacatcttcacattcagacagagaactgagaactaagagaagcacaaaaccatgaaaaaagttcctcagaaaagaaaaacaaaagctttttctagacccataaagacagttaacgacaagattcaaacctttaagaaaccgaaagtttaacctttctagactaagctaattcaacaacataaagagtttagaacatagtttaccgtgtcctctgaagacatgtcggaacgcttaagaactttgaagaagctttcctgcttcctctcttctttgcaccaaagaaaatcagggttacttgccatctctctcctttgaaatgttctgattcaagctctcacctacaagttttgctccttcaacttgctcgtctctctcactctctatctcctctcgtaatatttttctctctgtcttgttgagccgttgaatatgtagcaaagcaccacttaaaatttcaaagatatgattcaatcaaagtggtcaaagtgaaaaaagctttcctctcaatactgaaactgtagtacaattgtgacttcatcctttttggatgtgttcatttaattcatagcatgcgattattatgcataacagatgaatctcttttggcgttaatacatttcggtgactggaaataagaagtacgacactaggcaagtactgtaattatacttttctgtttaggtaatgactgtattggattagttcttcattttgataaatttatgaagaagagtataaaagaaattataacttatttggcaaccacttaaggtggtgaagttgtctccaagaacatataagaaaaaggttaggatttcatttgatatcaaacaaaagttcagcaattgacatttgccacatcttaatctctgtaatgtcattccaaatccaattattctaccgctaacttcataattaaaggccatatattcagcagccctacatttataattgacctgtaatatggcaacaaaaagaacatctgatctagagactctgtagaactgttagaattgaaagatcagaggaagtgatgagtaggatactcatgttcataaccattgtagtcataatagagcctttcccctttcgatatatcgcgtgtagccactagaagaactcgacattcgccgtttatgctatacctcacgcatttgcagttctgcttcttcttagcaaccctgcaacaatcagtgtgatgtgatgattcaatgttataaaccagtttagtggggggaaaacaattttgaatttgttgcttacggattgtgattgttaatgccattaatgaagcgagatatgtttccaaacttgtctggacagataacaagagtctttgaaggatcttctgataaaaggagagtcatgatgctgtcacaatcgtctttttctcggtttttcaagtaatcaacatcccctgtatattcagctatgaatgttaagtccttaataggaccatctgcttcaactgtgtaactgtacaaacggaataaccaaagaacatgtttacaactccactttgtcattatgggaaggttgatcgaaggaatagagagagatacccttcaagcggatcaaataccacaacgagaggagggcattctcctcgtctatacatagattgacattgttccaatgtctctaaatcttctttgcatagcacctgcgaaaagtaaaaaccgagataaacaatcaaggaagtaacttaaaataagagagttatggataaatggctgaaagattgtttttgtttattacctgcatcccacctttctctaacttggattgatttgcagaccgaggagccattccgggaacataatttaaaccatcgctgtatttgatacccaatgccgttaatgcagaagcaagtgttcccatttgtgcaagcctctgatcaggatcttctgatggaaccaaaggtaagagttttctccttcttttcttcactgtcaaagagcaagatcgtctccgctttctagtttcttcttcaaaacaaagaaatctcaatctcaaacacttgttattagtttaatcctgaagcatctatgatctatgtatatgatatgtataagttctcatcaatgcttattaaccctacataaggtgcaacaaaatttcaagcatataataggccaaagttaagctatttcatattcatctaactatttaatcaagtgaaacatctcgtcagattcatcaactcaagaactttatgatcatatcatgaaatccaaaaacaaaaatcgcaccttgactcaattccaatttgtctgtttgatgagtatgcttctcaatccgaaagaaatgtaaaatcttcttctgagataaccctaaacatttcaccggacaagagaaaaatccatttttttattaaacaaagaacacaagaaaattaggaaatttaaaagcgaagaaacaaaaaatccatacttcttacaggtcgttggtcggaacaatcgacacaaagccaagttccaatggggacacgaacaacaatgggtctaaggcatttcatgtgaaagcctctatcgcatttgtcacagagaagaagctcatcgtctccttctccagaaccacatttctcgcaggtgacgttactgtagctgtcttcgtcttcttcttcttcttgttcaaccacagggacagatttcgccattatctcagccattgatttcatcttcctcggtggtggagattcggaggaagggcgtctcgctggagctttcgttcgtcgcctcgatgagcaaggagacgccgcaggggaggatgcgttccatgtggccatgacggaagctcacgacgaagagtcgccggagaacgggatatatgattttgattggttggggctaatgtgcaccgccgcgtgtgcgcacgaaaactgatgtgcgcatcacctggagtgtaatttgggattcttcctttgagactcttctttatcggctcttttgtttttttgacctttgacaaattcaaaattactggtatgtcttaaaaggtttaaacattgtaagtgatactaataaatttacaaccattaaagccttttaattgttactaaatttcttaactaaattttacttatttaatttactagggattgatataaaaattaatacagtattaactatactatacaaacgtaattacaaaaatagatatctttcaattgaaaaaaaatatatgttggtgggctcaatacaaacacagtaaacgtcaatttcgtcaactgagccaccccaacgccaagcccaacagtcggtccgcctcattggaggctcaagttctttatttgacaagctaaaccaaagtgttctggtttgaccaacaatgtaatattacataaatctgaatctataaaatacaaaatttaataaattatgtcttatggtttaacataattttctgtttccgatttaagaatttttcgccatattgattttcataattttatatacatatataatatctttcaattgtaaatttttatcttataattttatatatgaatagttttctctatttttttcaaggtttttaattaataagaaattgcggtgttagcgttaatgaaatagttatggtatagactataaagaataatatacataattggaacaagtgaaatggttgtttgatatattcttgacgatgagagcaaaactttcttatcatattttctgaaccggggtgtatgctaggtaattttgtggctaagtcctttattaaggttgttgcacttcttcacaaggatgaaaacttaagtcttgcatcggtggatgcttcaagatattcatatatgctcgccatgtaagttttgcttatactaatactgtttaagtcatagtattccaaaaaaatcaaagaaataagactattactggtccatcacaatggattcccttcgagaagcccgcatcgatctttctatgccttatgagttttgtccctatgaatatgaggaatatgaaaaacattcttgaccttgcttctactaccgttaaagtatgatgtctctctcttctccatgtatcttgttacattcatgcttgaccaatttgtttgtgtttcattcatgaccagtttgcttgtgtgttgtagatgatgcgtcattgcttcgattattggcgtagtaatgaatttcccttgtttaaaaaccttgttaaactatcgtttgagtctaagacgaaaaaaggttggaaagttctttggactctgataaaaagctctcccaatctagaaactttgatcctcaaggtttgtatgtataatatgatctctttttctctttctcaattataaatttaatctcggagtttcacttactgtgtgttcttttcttttctatccgttgtttcagggttttcagtgtgtaagtacttgtgggtatagcattgatggaaatacgttgaaggtgttggagttatacgggtgtagagggaatcttagagaagtcgaacaagtgaggctgttctgtcggaaagtgaatttcttcaagtaatgaaagtggaaattggtactaaggttgatgttgacaagaaattgcaactcaccaaagacctccttccttatcctaacgttcctccaaatgccaaatccacttcttgtaatcttttaaatccaattttgtttttgactgctcaatcaatcaagattcagtttgttttagatacaaagacaacatctcccttgatagagcatattgatagctttacttttaatacgattttgccaagtccaaacataaaattctggtttagagtatcaacattgcaatgatactagtactaaagaacattgcaatttattctcaaagttctaatggcattggccgtgataacaattccattcaccttccaaaaaatctctttccttacaacttgaattttttttaccaacaagtaataatccctaaagaagttaatacggaggggggataatcaaaacggcataatatgtgtcgttttggtttcgtataccgaaaggcaagatcttgagttcaccttgaacaccttaagaagatccgttagcatatgcctaacggtaagcgagcaattactctgtaaaagtaacagtatcttcgtaacgccgttaattctaataacggcatcttgcgccttcttttccttgaaaagataacagacgctccacaaaaccgtaacggcgtgttcagtcgccgccgtcgacactttcatcagcttattcaccaccgtctccacgcacacaccatcacaaatctccgatcgaccttctttacaagacgaaatagcttcgagaagctttaagcatttttccgtcactgaaacgctcgtagttggatctgttaacaaactcgtgagtttcgtgactagcttttctctgattaatgcgagtttcacgcgttttgaagacgcaatcgcgattaataaagataaattcgcttcgattaagcttgagtcggaatctgagcttatcaatttaataatctcggtgaccaatccttctcccttggcgattataagctttgactctgcgtcgacggcgataaactcaagcacggcggagcaatcgatcttcaattttggattcccgcgtttaatcaataggaagaaggaagtcaagcaatcaccaccgttcgttaagatcagattcgataaccgtctccgatcgaagattttccgacgaatcatgctcagaatcttcaccgcttctccaacgagtagcaattgagaatcagagaagtttctggaatcgctaatgagatccacaagcatcgctacgaaatcatctttcccggcgagaaactctctgttctcatcagattctctcgcgaaccggagaatcttcgaacgagcatcattctcgatccggaatctctcaatcgcagcgttaatttcgtctcgcgtcggagtatcggattccggagactcagaatcggctcgacggttgatggagtcggaccagtgatcaatgagacggtgaagagttaggttaggtacgaattctttgttctgaagaatctgcatcgtcgcgggacaagtattgttaccatcatcgagccaacgttggatgctaactcggtcgtatgtaacgccggtggagagactcaccggagatttcatcacatcaagtgaaattggacatttgaagaaacaagggacggtggtgatgtaaagatcatcgctcctcatgtttttgctctttcttcttcggcgaaaacgtttcaaagagagaataaataacaaaatcactgagagagaaagagacgtgactcgtgtggttaggttttaagaagatgatgagtcatgagagagagttcaaatatgctgacgtcaaaattcactttttgaacaacctcttgatacttttccatttaaaaaaaaatataattacgttattttattttatgaatcttaatttttttaaattatgctaaggttttaaataatatggagagacagttttttgttaaattgagattattatttacagtagttaataaaatttccctaattttgcatgtttattttcaactttgtataacattgggagaaaaaacttttttgacatatttatttattatatgccaaacccatgaaatgaatacttttccgtatttcgttctctcacttttggtcaaatagttgagtctgggtatctttcggcgcgcgtagactaagatttgtattcgagttcatctcaaccgttaacagtaccaccaacggtacagatttcgcctaaggatccacttacattttaaaattgcaccgttcgaggaaactcgggaaccttttgatttcttttaaagagcctataaacaatttgtccagttctcgtaaataaaatactcgtattgtcccttgaagaattgttgtagtcattaatatttgtaaaacaaatgtgataaaaggaagtgaacttattgaccagacagattcgacggccttttgcaacttttgttgcttccttttccttttcaaagtccactttaaataaagtctttatcgattaccttagcgacaaagtgtcaatgacatcaagagtaaactactactcggttatgtgaatgtgacagtccaggctcgtgtatgggccttgtatgtaacccaaaccatcgttcgtaggcttagtcatttattattattttgcgaatcagaggcccattaaatttactcctctttttctatgtcaatacatagaaaacaaataaagaaagaaggcgagttatcgttatgctataacctcatcgcactttttatgtttttttggtatgagcctcatcgcatttgttatctttatgatcgtgtttatattatatatgtaaatgtagtgcgattgcaatgaaataacgtttcttttagtgaagaattgcgcttaagtttttggcggagggtaattgtattgcaaaagtcactaaactttagagagaagcatttaacctttcggattacaaaaaaatactgtgacaataaaaaaaaaaaatcaatgagaatgatgcattggagaaaacgtgtatgaacagatggtcggtaaaaaaaaaaaaaaaacgtgtatgaacagatggtcggtaattagcacgaaaatcgctttggttgtaatttgtaatagtactattttatactcgtatattttcaacagtgttgttacagtaacgctaaggaactagcctggacaagcttttacatctcatttactgttgttgttctgacacaactactgttgttgccttttatgttcggtttccttcgttcttctaagttctgacatcttgttcgtacaaaggggtctcatcgtcattattctctgccttcaatatatatgccgcaaaagaggatgcaactcaaaagtgtccactaaagctacggtctttaagttgatgattacgttaaggaagatgtccaagaaataaaaagttgatgtcttgatgatgactaaaatttagaattggttgatccggtcttgcggtgcagtagttgtattgcctggtcgttaagtcacgttacgttttagctcgaacttgttttacgtaaaggatagatctaggaaatatagaaacttttttatgcatatgcgcgtggtttgctcaatcaattgtaagagattgcaaggatagaatacactatagtattatcaaactgatatgaaattattttattttgtcgtcaagtaatatgaattatatttttttcacataacatgaaatgaaaaggcttgaccttgacccaccactaattatttttctttcgttttcttctctttgtcccctctcactttcactccacagagaggattaattgataatatattatagaaacaaatgtgaaatgtattttaaattgaaagtaaactaaaaatcttgacaatgttaataacctgtaatcctaatggtcaatgctaaaaccgttattatatgatcagacatggtcaaacccacataatacatgttatttcaaacgcaaaattagaaatatcataaatatgcaatagtacttatacgtgaacctaattaaagacagctataaaggagtcttcctccaactttttttgtcttgtgggtcatatcaagagctatgaagagacgttattgtttttgcccaacaacgttttttacgcattccaatatgagatcatgttcagaaatagttaatttaaactcaagtgaaggtagtataggggtaaaacatcttgtgtctccaatttgatttagtatgttttgaataatgtaattactacgtaaatatccatgattaactagatttaggtttagtgcatggttttccttaataagagagataagaatagaaccatatgagtaaataaaaagaaacatacaaatagaaccataagtcaacatctttccaatcaaaatctctctctcttgatgtgcccatatttctagctgtcaacaattcacagccttctctttttcattcaatcacccatcaacaaaaaaataaaaccttttaaatattaaatacttccacccaaaactccttcaaacaaaaatcacttccctccctccatctctctctattcactctcccaatttacaccaatgtcttctcgaagccacc

SEQ ID NO: 706 - DNA, 82390 bp, Arabidopsis thaliana
gatcaagaaaatatcaactcacgagaacaattcctattcttgttcttcttcttgtccttttgagttgctgcaatggagcaagaaccacgaacgtcttcaacacaagctcgccacccaaacaaaaggacgtcgtttcgccacctcatgatcatgtccatcatcaagtacaagatcacaaaagtgtacagttcttggggtccctgccacgtcagtttccggttccaacttctggtccttccagaaaacataacgaaatcggtttaagtagtactaagacttaatcttcaccttgtagttcaaaggtttgattaatgaatcatcctttttacttctgtaagttttttttgttttagtttttgccccttttgaatttggttcaaactgatgtaaatagatttcagtttgatttatttatgggcaatgctgtggatacgatcaaattttttagtttaatattggaacttgtttgatccattgaaatattgcaagtacgtaagagcatccacattggtggttatttatacatgtctttaaatataaaactataaaaaataataataataaaataatgaatgtctttaatttgagatttgtgtcttcctaaagacactttatacacaacaaaagtgaaatgtctttaattttattatttatttatactaaaaacatatataaaaagttgtctactctaagtgtacaagagccgaggatagaagggtcggtttctaattaaacaattattgttctttttattttccgtcttctaatttgatatatatgaaattatatatcatatgttcactgtatcctaatcgtggattattacggacataatgataattgttgagatatatacaagtcccgatcaatttaggctacatctgtttggtagaatattgatggatataagccgagtagtgatttcaatattttatatccactctcttcttataagttatggtaataacaaatagaaggttattctacatatactagtatttgagttggtgtttaaatacctcgggttattcggacatgcatagagaaaatatatggtattttaagataaacattatcccataatatatggacattgacaaatacaaataatgtgtgttcgtgcgtaaaagaattgtcatttctttaaaataagaaggaatgaaagattgaaaggtatatgttctaactaaaacgtgtgattaagattggacttatatacatagttgattactttggatgtatctttttgtttaatttttgtttcaataatgtcattgagtagtcgttgtgaatacgattgaccaacggttgcagagatatattggaggatttgatgtgatatctcctaagaatttcagaagttcattgaacgtttttttggggttagtgaaatagtatcatttgtatctttttgcataatttttgaaaaatcattcatatccacttgattctcattcaaactttgaatacctttattcgaattccatgtgatgatttatacttttcaagaacactatggtcccttgactccattgtctcgcttacaactttagtttacgtcattaacaagtaattaggcttgagctatagcctatagcctatagataagctagttaaaaggtcaaacaaggagattccataaactgtaaaataaaacttccaaaaatgggttgtatatagggaattgtatcttttacatacgttagttctgactgtattattttttttagtactgtccttttttgttcttatataaaaatggatcggatacacatttaaacattagtacttacgggtacatgtctatcctcatatgtattatccaatacatacacttacggacatatgaaagtgaacgatcgactctaattcaagtgaagtaattctgctaactgcaataatctacattttataaagtttgcactttttttttgttttagctacgtttgaattcttaacttactatatatatattatttaaaaaagcttactatattaaaacatcttatatttattgatcaaccactcatgaatcgaattaaaagtacttccacatatatgtattcaaattgtttagataacttaaccatcctttacgtgacagcgctattcaattacaacatgggtcttacaacatttggatttattttgacgccttgttggtaatgagtttattagataattgaaatttttggtcaccgctgtccgctgcgatggtgtgtgtattattattaatcatgcatgcgtgtgagattgaataaattaatataagtcaaattggctgaaaacgttgtgacaaatactagagtgtctatatatatcaggattatgatatgcgggcatgtgatgtgtctaatgcgtacgtgtgcactcgtgtccacgtgcacatacacgtgcggtgtaccccgcgttgatagggtctcgattatttccaatcacgtatatcaattgtttttgtttttgttctttttgataaaaaaaatttttgttacttcacaattcacatatgtatccaaatgcaagcgacaaacatattcgcacgaaagagtcgaatgttttggttagtgatagaacattatatattgatcttgatcgtatgatttcatttatatttagggactgaattatatattatattgtaacatttaacatacagtatatcatgtgttgctagttatgatttacatgcacttcgaaaatggtatctgattttttatatgatttagaacttatctggcacacatcattgaataggatctaacacattaaaacactgtctaacttatttgtttgtatgtgtgtgttaaatcatcattttagctaagatttttaaccataggcaaagaaatgactcaaatgagcaaacgagaaactgcagacagcaacatatatcaaactaactctaataggcccaatatagcccaataagaagtgtgaccgatggagggaagaatcgaatttaaatgatacagagtttttttgtttggagaggaatagactgatatgatagtccgtgaaaatattttcatcttgttttcaatgtggagatattttaaagtttgaaaccaatccaagttctaaaacatcaaaagcttttattctctgtttaaaccacttggttggtcttggtcttcttgaaatatacaaaccagacccaaacgataatcagtgaagatgactgcatcattgggtctttaagtttcctattgggccaaatcagcccaactatattattgttattatttcagtccattaaagattttcggcccgttttatcgttgggaattcatctatatttccccaatttgatgatacacagaacaatttcatgtgtatacgataagaggcaaattcaaaatttgcaatcaatgtaaagtggaaatgagaagcatggtggctcaaatcaacttatctttccttggaatacaaactacaaatgatgacggatttggcttccctttgaatttaccttttacctctctctttttttttttttataggtaatgttgttattggacaaaaatgttaagaaaataaaggtgaatgataaattagaagagtacccataactattttgattatttaagttgccaaccaagctagaccactttccaacttttatagacaaagtgtaagaacttagcacatgctttccaacaaggaatatgaaactttatttcaaaaagattattgttaaagcttttaatcattctaaaaggtgattaatatttgaattattggaagtaacttgttttggacatataccaaattaatcaatagtatcaatggacatataacatgttgtgagactatatcaatgttatattccaagccagttaaaccaatttataatgataccatttatagataaacaatacactttacacacattattttcttagaattgggtctcatatagaacactcacaaaggtgacttataaaaaatgcttcaaagatcctagtcttttagtgtgcattcctcaaaatcgtagttgatatgtatcttgctcctattcgggttttggtctagaattttggtttcaggaattttcaattaactcattaaaacatttataacataaaaagatatatcacgaaaaccgatcaatcatttaatatatttttattttattttattttttgtcacaataaaatctagacaatagtgtttaaacatttatcaaaaaattcaccttacgattaatttgttttatattttgtgatgatgcaatttaatctatataaattataaaacatatcgataatctgtgtttttctttttctacatataaaattcataaaaatgagagttttgaagctcttaaaatggactagtcaacaattggccaatctttgttctaaattgctaataaacgaccatttccgtcaattctccttggttgcaacagtctacccgtcaaatgtttactaatttataagtgtgaagtttgaattatgaaagacgaaatcgtattaaaaattcacaagaataaacaactccatagattttcaaaaaaacagtcacgagaaaaaaaccacagtccgtttgtctgctcttctagtttttattatttttctattaatagttttttgttatttcgagaataaaatttgaacgatgtccgaaccacaaaagccgagccgataaatcctaagccgagcctaactttagccgtaaccatcagtcacggctcccgggctaattcatttgaaccgaatcataatcaacggtttagatcaaactcaaaacaatctaacggcaacatagacgcgtcggtgagctaaaaagagtgtgaaagccaggtcaccatagcattgtctctcccagattttttatttgggaaataatagaagaaatagaaaaaaataaaagagtgagaaaaatcgtagagctatatattcgcacatgtactcgtttcgctttccttagtgttagctgctgccgctgttgtttctcctccatttctctatctttctctctcgctgcttctcgaatcttctgtatcatcttcttcttcttcaaggtgagtctctagatccgttcgcttgattttgctgctcgttagtcgttattgttgattctctatgccgatttcgctagatctgtttagcatgcgttgtggttttatgagaaaatctttgttttgggggttgcttgttatgtgattcgatccgtgcttgttggatcgatctgagctaattcttaaggtttatgtgttagatctatggagtttgaggattcttctcgcttctgtcgatctctcgctgttatttttgtttttttcagtgaagtgaagttgtttagttcgaaatgacttcgtgtatgctcgattgatctggttttaatcttcgatctgttaggtgttgatgtttacaagtgaattctagtgttttctctttgagatctgtgaagtttgaacctagttttctcaataatcaacatatgaagcgatgtttgagtttcaataaacgctgctaatcttcgaaactaagttgtgatctgattcgtgtttacttcatgagcttatccaattcatttcggtttcattttactttttttttagtgaaaaatggccgatggtgaggatattcagccacttgtctgtgacaatggaactggaatggtgaaggtgagttagactgtttatttagatactgtatggttctaaccttctttgttgtacatgtgtaagactactgatcatgatttttgtatattaacaggctggttttgctggtgatgatgccccgagagcagtgttcccaagtattgttggtcgtcctaggcacactggtgtcatggttggtatgggtcagaaagatgcttacgttggtgatgaagctcagtccaagagaggtatcctcactctgaagtatccaatcgaacatggtattgtaagtaactgggatgacatggaaaagatatggcatcacactttctacaacgagcttcgtgttgcccctgaggagcacccagttctactcacagaggcacctcttaaccctaaagctaacagggagaagatgactcagatcatgtttgagacattcaatgtccctgccatgtatgttgccattcaggccgttctttctctctatgccagtggtcgtacaaccggttagttcttaactctaaacatccaagtctgagttatattatcttcttacttgtatttacttaaagtcgttctctttttgtaacaggtattgtgctcgattctggtgatggtgtgtctcacactgtgccaatctacgaggggtatgctcttcctcatgctatccttcgtcttgatcttgcgggtcgggatctcacagactcactcatgaagattctcactgagagaggttacatgttcaccactaccgcagaacgggaaattgtccgtgacataaaggagaaacttgcttatgtcgctcttgactacgagcaagagctagagacagccaagagcagttcttcagtggagaagaactacgagctacctgatggacaagtcataaccatcggagctgagagattccgttgtcctgaggttctgttccagccatcgctcatcggaatggaagctcctggaatccatgaaacaacttacaactccatcatgaaatgtgatgtcgatatcaggaaggatctctatggaaacatcgttctcagtggtggttccaccatgttcccaggaattgctgaccgtatgagcaaagagatcaccgctcttgcacctagcagcatgaagatcaaggtggttgcaccgccagagagaaaatacagtgtctggatcggaggatcaatccttgcatccctcagcaccttccaacaggtaaaaatcccaattccgcctctttaaaactttcagctccatttatgaaacatgagtgaaaatactgaaattttgttttgtttgtgtgtgtgaatcagatgtggatttcaaagagtgagtacgatgagtcaggtccatcgattgttcacaggaaatgcttctaagtgtgtcttgtcttatctggttcgtggtggtgagtttgttacaaaaaaatctattttccctagttgagatgggaattgaactatctgttgttatgtggattttattttcttttttctctttagaaccttatggttgtgtcaagaagtcttgtgtactttagttttatatctctgttttatctcttctattttctttaggatgcttgtgatgatgctgtttttttttgtccctaagcaaaaaaatatcatattatatttggtccttggttcatttttttggtttttttttgtcttcacatataaatattgtttgaatgtcttcaatcttttatttgtatgagacaattatttaagtatcgggtgacaatgcagctattatgtattgtcgattgttatattggcgcccaaaatatatacttagcctaagaatttggtaagtgagtggcttatgttttactccagcaaaaattgtgtgtgtattaccattctgatgcgaaacaagaaaagaatttgatctaagaaaccaagtttattcactagttaaaaaacaaatgacctaatgtaatcgactccacatatcaaaatacgtaaaacaaacattgtatgttgacaaaagggaaaagaaatgatttatttggttaaaaagaaagctggattcaattgcaacagtttagtcgaaatcattttgaaagcttacaatggattgaatgtgaatattccattaagccgcttctgtctacacagaatgttacgcttggagagcagcaatcattttcacgtttttatctttttaggtggacatgtatattattggttacgcctttggagtttttcgaaatttatttctttcaaatcacaagatgactaaacatcacaatctgtttatcttcctaactagttaaatttttgtccccaccattggaaagatttgaaatggtcggtccagccaaatcactcaaatactttatgaaaactttgacaaatgatccattggccaactcatatacacacacaaaatgtgtagttgccgcacatactcaccgacttcatctgtctaattcctttactttattgtattcatttttcaattgtctattgaaccttccaaagaatctactgtcttctttatcggtgagctttcggtccaaacaactagtgtatgatgaattgataattgattaaagtgttagtagatgatttaatatccaagtagatggtaactaatttactatatcaaaagttaatgtggtaaacagaatttctcttttttcgtctgagggccgtttttaggcccataccaatatcaagtaatatgtgaaagctattgtataaatcccagaccatagtcttatgatcagagcaacggtacttttttttgttgggacaaaagagcaaagttacttaaaaaaatgagaacgacaacgtgaaatttttgcatcccaaaatgagtagagtagaccattaggactaccagcccattttctagtcccaattctcaaattaaaggcccatttaagcccaaatatctagtgagaaaacatttctcaccatcttctttagttcttttgttgtaatatcaacactaggacttagaagtaaacagatgggagcaagctaatagtacttatacagtattattgaggaatcaattatgtcaataatgaatgaactggagttactaacattcccaagacaaaaaaaagactaaatctagatttttcttcttcttttaaaccaaaagaaagaagaaatactgatggtcataacccaaaccaaagaaaaaattgaaaattttcttgagaaacaagcaatttcttcttatggaaatgagtttgaaaaaaatgcagtaaacattttggtataaaagatttaaggtttctctattctttccaaaacaaaaacattccctttcccatctctccctacttgtaaatcttcgtctaagtatctgcaataatttctcagaatcaaggaatccaatccataacaaacacaattctagttacgattttggattttaattaaaaaaggatacgaaatctcgaatagtccctcggggttgaagattcccaaaagaagatccatgttcttcctaaatatgttcatcaactgattccaacacgaaacaatttttttattaccaaaaaaggaatttgattatatatgtcggagaaagaaaaaaaaacaacaacacagacctggtctggtttgatcgttgagctttcataagtaatctctacactctacaaacaaacaaacgcaattccgtcaaaacgcgatttttccaagaatctaaaaaacctaaaaacgtcaagaaaacggtaatgtaccgatttggacgagatcttgaaggaagcgacgattctaaactcgccgtcgagtagattcaatccccggacatcgaatttcaacacatggaccgttttgcccttcgttaattgaaaaagaaacacattaaaaacgtcatcactaaaaagctgaactgatcaatttcttttttatctacctgagcaatgtcaatctgttgaagaagatcaccaagagagacgaaatctcgaagacccaatttagttcgtttagaacccaatacagtgattgtactgtaaatgagtttccagcaacctccgatcttgtctaactctccagtcggctccggtgtcggattccgacattccaaaagcttcaccagtccctcgatctctgtctttttatccgacttaactccgaatatccctctattgatccctttaatcccaatacaatcagataacagaatcaaagcatttaaaatcaaaatttgaactacgagctaatgagtttcgaattaaagattctgatagtcgaaaggaatctgaaaggagcgaatctaatcacctttgagagcttcgtagagctcttcttttatatgagaaactgtaatctcttcttgttcttgttcttgttcttcatcttgttgttgttcatttggggaggaacaagaactctgttctgtgactttcccgatgaacatgggtctgagcctaaatgagttgtcactaaaactcagcgttttgccattagaactggtgaaagagactaatactttcacgtttcctgttcttctcgagattgctcctcgtgaagctgccattgatggtggctggaaaaggttactcgtcattagcagtttatacaccagaatctctaaacccaatggagcttaataagaagtagaagaagaagatgggatttgaggaaaaagagagagagatagatttatggggaggagaatggacagttttttttggttattttatccatcttttagcatctatctctcccccccaccatacactgcactgactctattataaaatttagccaatcccattggtcttttttttcttttttaagatggtgtcatggtaaaattctcaaaaaaatctccatctaaattgagaaaaacccaatttttgttatattttgcaaccaattgcatatgttttaaaaaagtgtttacacttcatcaaaagcagtaatcggagtacagtaaccacaaagtatcaacatagtaaatgctctgttctttgtcacaaggcttttaaaaaacagaaattcaggcatctttggttaaggttgcagagtcttgtgatggtggcttccattgttgtggagtctgagctttcttaatagagagagcatgaatctctttcatttcttcttctagcgcagcattcaccatacgatgcctctccagcaatctcttcccttcgaattgttcagagacaacctccacttcaaaactcgaaccacaactgcaataaacagttttgctgatattaagaacaagaaattatgccataagccagagaatcaaatgtgtattgacaatccggtacttaccctccagatatgtcaatgacttcctggtacacacaaaaacaaacaatgtcactaaaaaattctaaaagctaaagattgaaacaattggaacacatgaatcaagtgaaaagggaaatagattgacattgaagtaacttcaatcttcacatgttataaagcaaagaaactatacacatccttggatctgctttttgagttctagttcacaaaaaaccatgacacaaataaaattttccgacaagaacactcactactaagttgctaatacatcaggaacactacgtcatcaaatcctgagctcagtatcacactgcatcaaattacacctaactacgcaaacaaccaccttttatattctgtttcagagctgaaagacaacacatagtgatgtataatctagatgctgagattattacaatacatagtacctcttatgatccaactatcaaagtgtatgattttgatcaaagtgagcaggtcaaaaatctcaaatttggcaattttcccagatcaatttgatgattagggtttcaaagtttcccacaaaagtttcaaaccctaatcaatagatgaaattgaaagaagaaagcagtataagaacactcacgagatgaattggcttaagtttcgaagtcaatgaagcttcgacttgctccttcgtcaccatctctctctctctctctcaaacaaaaattgaaatccctaattactgtactcattgaattagaatattaaaccatacgctatttggttttggtttagcgagagtacggtttagtttggttcaattgggataccattcggttatcgacaattccaaaataataactagggtttaagctctgctttcctttacttcgtcttcctcactcctaaaaccctctcagtctctccatttcccggagcaaaaatagctctccgaccatgaagtttggatctttaccatccaaatcccttctcttccgcctctcttcttcctccacaacccaatctcaccgtcgaacaattacccttttcatcactaacattcattcctctccattctccaccacaaccacctccggctccaatttcgtctccggatccagccattctccctctcgacgtcctcagcaagacgaagagtcccgatccgttagggtttcggtctggtgggacttcctgagctgtaacttacctgtagacaccaatgtctacaaagtagcacaatcaatcaccgccgctatcagaaacagcggaatcaaaggaccaatcacaatcacagccttcggtgacgttttacagctccccagatcaaaccaagacgctctctccgctacaggaatcagtctcactcatgttcctaacggtggtaagaacagtgctgatagatctctaatcacagatcttatgtgttgggtttctcagaatccaccaccagctcatcttttgctaatctctagtgataaggagtttgcaagtgtgttacatagattgaggatgaacaattacaacattttgcttgcgagtaaatcatcagctcctggtgttttgtgtagtgctgcttctattatgtgggattgggatgctttgattaaaggagagtgtgttactggtaagcattttaatcagcctcctgatggtccttataactcttggtatggtcactataggattcctcttcttgatccatttgctattgctaccactactgagcaatcttcgtctagtgtgaaaatcgaagaactatccgagtctgtgaattcgaatgctgttgttaaccttcgtcctattccaaaagaagttgttgataagattcgttcgatagtgagtttatatcccaagggggctgccattacagaactacgtgctgagctgagtaagagcaacttggctattgataaagatttctatggacataagaagttttcgaagtttcttttatccatgccagatatcttacaggttactacagtaagtgaaggcttgtttatgattcgggctgttaccgaaaagaagcctccgatgcggcttgattctagtcctcgtttgtctactgctgttgatcagaagattaaagataaggaaactgttaatgctccatcaccaaagctaattagcgatgtagagcttgctgctgaaagaagaagagatggcttacttggaaagaagcaggaaaaggtattggagagtgataaaattgttaaagaagaatcatcagagagttctcaagacccaattctggtcggccagaaggatgttaaggcaaatgttaaacccgtcgagacgaatcaagtcgctcttgttgcgtggagtgattcgtccatggaagatggcttttttcaaaagctaaaaagactgtggtatggttcacctgagatggaattagagcatctcccagaaatgaagagcgtttctggaagtggagacacacatagagaggataatgacttaaagtcatcaagtcagggaagtggaaacaaacataaagaggataaggacttaaagtcatcgagtcagggaactgtgcccatgtctcaaatctcaccttctttcgttgctgagtcggtcgatgaggtaaaagttggagctgatgacgtagacagtaaagataaagatgcaagtccaggctttttaggtcgccttttgaagagtttcaagttctggggaaagaatacaaagtctagcaaagactctagtgggaatcaggagcttgtcaatgttgattctcaagtacaagacatatttgcaaaagagtatttttggagtgatattgaatctttcattaattctccaagaggctttgctatagtatctcactcgaggacaaggtgcgtacattctcttccctcctgatttggcaggactttgattagatattgattaatatgtaaatctatcttaggttcagaactattacaattggttcttgcattagccatttgttgtcttttttgggacgagtattcagctaatgctgttccgtcttaacctggtcagggaggtgatggctaaaaatgtgcaggaggaagggccttcgtgtctcagactgctcgatgaatcaagcatgcttcatttagttactttgctaatatcagaaaagaaatggattgaagaaaccccatcttcttctttaccattcagaatcatcaaaggatctagccctggccaccgtcatgcttcaaacggtttgagctcaatcttctcggattcttcaaaatcacagtggcagaaacaaaatggtgagaaaagcggcaagaacgttgctcatgctggagtttctgttggttctgtggaccggaaagagctggaaagatacaaaagtaatgcaatagcggattgtcagaagatgataaagaagataacagaggaacaccctgaagggtatagcctgattcgtttcaggaaagacttcttagaggagtatgggtaccatttagcggttgacaagctcggttacgacaacctgcagtctctgattcgagtcatgcatggagtgagaatagcatctggatacatctttccttcaactccttcaccaaatgccaagtcaaaagaagatgattcggacttggcattcgcagaacttggtccagtttctgatacaacaactacccacccgacgaccaaaaagcttccagtatatgaaccatcactctcagaggatgaagaagattctggttcagagagagataacccagagaagaagaagcaacagatgatgagtaaagaaggtaaagagagctcgttattgcaaattctggattcttattacacaaataaagatggagaattgaaggagaatccggtggagaggaagcttgtaagcaacggtagaaagcaaaagcctacaaagacgtattcttttgtgaaagattcagaagtctagtgagtcagagggttgtttactgtttaattaacaatctcccgaggaattgagtgtaattagttgaagccggttttgggtttggtctatggtaaaccgaatccggttaaggagaaataagattaatatggttcaaactcttttcagtggcaagtcgcatcgtatgcatttattgataggttttactgtattacgtgattttttaaattaaattttggttcttaatttcaacgttgatgtgtaaagcacggaatgaatgaatagaaatagaaaaataaaatgtactccataaaagatggagttatttaaacattttattcgattagattaaatgaagagtttaaaagtgataatgacatgctttttggttataagttaggtattaaatagttaacaaaccaaaactagatttggtatataatttattgttgaccataatgtttatacagttttttttataaataaaaaatgaaaatttcgggggtttcaatttgtgccagtagtttcattttagtaattctaaaaaagtttataattgttgtcagaaagatgtatctaaggagtaattattaaataggagtaagagaaaagtatttaatgaaatgttgtgacatacatgtggagttgcttggtgaatcatctttgtcacttgagtcttctcaatggacactcgattaaaaacacacaccaataaaagtacttaagaaatggataaagaaaagaaaattgatcttattatttaagcctaatcttgtcttgttcccttaaaatataccaatattaattaccattaaaggctatgtatacatattttaatacaataattaaacaaaacagctcatgcgtatccacaatgattcggtcaaaaagattataaaaaaatgcgtctccttcttcatcaaccaatggacctacgccattacgacgggtcttaaggccatctttaactccaaagtcaaaaagataaactgttgttttttttccccctaaatttaaaagataagctcgacgttaataaaaattaattacacttaatactgattctaaacctaaaaattactttacaaagattgacccgttaattagaaattgaagttacatttactgtaactgaaaataacttgaccaaaccgtgaatctgcaaggaaagaaacattgaaaaaggtcaaatctttcaataaaatcggcattaaacaaaagaatcagttcctaagaaaatcaatctattttctttaaagagatagattttatgcacatcattgtctaataacaaaaatacaaatatggtaaacttgatttttttcgaatctattatttaataaaatccaagaaaaattatgttctttatcagaaaaaaatatacgtagtagtaacaacaaaatagaaaacaagtgtacccaccaacttaattccaaattcttgaaacatttttagaattcactgtcttcttgtgtctcagaaacagagctttgttctctgtctttttttctcttcctcacttaactctcatctttctcaatttaccagtgtctaccaccttgagaactcccgccttttcttgggaaaaatccacctttcttaggtttaggaatgtcatgaatgtccatcacctgtatagtcctttgcttttttgctgaattcaaaacaaatacatggaacaacagtcagaaaacgaccacactgagtagagagatgtctgaactaaaaggtgtcgagttttaaaaccattctcggcttgtctgtagttttgttgtagccttttcctggccgtgtcgaaatcaacttctttatgctctttgtccctctgcaattcccaaaaccaagttcatcacaattgacatagttataagagtctttgaacaccgatatcaggatacggtttggtaatgtaccggaatggtttgttgagaaggagaagggcgagaaggttttgctggagaaggagattctctcctaggttgaggagcaacaggtcttggttttctttctggctcagtaatgttactgttcttgcttgaactggaatacccatctgtcgaaaaccggaaaaggaataagctttacggattaaaaatggtgaaagatcaaaatgttatagtctttgattagcagcttactctgaggaaccggtgaatatccgaaatcagggacctgccacaagagaaacagataacaattgaagctcaatgactaagcaagaatcgaaaagagtttcagggtttttacctgttggcgactaccattatgaagagctttctgcaccggtgaatcctcatcggctacattggaagagattgattgttctgagattgataagaatgatgctggttcttagattcagagtttggttttctctttacctatcaaacttggaggttcaagatcaccaggctggttaaatttgacccattcatctactgtttccttccattttctgcaaagaacaaaaagtattagaaatcaaagtggttcttatacttagagaagaaaagatgtctgaatctgatcgtaacttgacaagctgtttagctaatcttcgaacattgttcgaaggatgcttccgaactcgattcacatgcctcccaatatcagtttcctaagtgatcaaaacaaaccacaaacttcaaaaaactatcaaaacaatagaagagtgtccttactgaattagaatcaagttacattacctgaagagcttggaatgttatatccatatcttccagattctgaagcaactcaaccaaagattcttcagactgaaaccacaaacaaaacaagtttccgtcttcaagctgaaatcatcaaatcaagatccaagtgaaaaaaacttttaagcaaaccagatcaggatcttcaagtttctccttgatttcaacaatactcttctgctcatcatcaaacaaaccagcaaagggatcgaaatcgtcatcgtcttcaacattaacagatttctctctaacttcttcttctgctgctgctgttactccttcttcatcttcctcctccgtctcctcgtgaaccctcccattattaaccctaccaatcgccgcctccgtaacgttaccaccgccgccaaaatcgcagtttctacacttgttagccatcgacgtagcgtagagacgctcgacgatgttatctctccgacgtttcagttcttgaccatagtcaagagacgcaacaagaatcgccgtatcgataaatgtccaaacatcaacacctgcgttatccataaccgatcggaaatcatccaaatccattatcacccacactcctccttcttccccaaatttggttacttaataaagaattcaaaacgaaaaacaaaaaacagagcaaatcgaattacgtaaccagatctaaaagatgaatcttttgatgaatttgattcatcggagattaaaaatcgtgaagaaccaaacaaagtttagatttcaaatagtttaaaagatagacaaataaaaaaaacaaaaaacagaagaatcagattggtaaattcagattaaaaaggaagaccctttactgttacgaggaagaaagaaacagaggaggtcgtctcacataagatcaataatgagtaaatggcaaattaaaaaaaaaaaagggaatgaagaagaaagggaatattccaaatttgaggctttagaatttggtttggagggttattgctttttctttcattcttctgcaagtttttttttgtttggtccgttaataaaaataatattcagacagaatcaattaacagttttaggacaaaagtaaaagaagaaaatgggaattgctttattgagggatgatgctctttgccctggacagagcaaagctaagcaagttggtttgttgtggttggggagatgaacagctctagagagagagagagagagatgtgagtgtttttctttcaataatggcgtttactttttttagtttttcttcaagtgacgagaaacattttacatgtttcgacttttttggttattgggcctctaaatttttggccctatagcaagtggacccaatatgtcaaatcaatattttcatttggtctcaaagtgtttgtttcatgactttcatctcatgagccactgccactcactaatcgtttagtgaatttacgtcgacggtacaatcaaaacccccaaagagaagatcacatccgagtttttaggtgttgaaggaggtgttcgatccatcaaagtttactttgttaggaagtaatgtttatttatcacttgttgagtgtagattatgaatacaatgtcttttatgcaattattggaacctaatatttatctcgaacaatttcgagcaatttttgaaatcttcaaatccttctcatgtgagctattatgatttcttctgcaataacataccatgaacaatttcgagcaatttttgaatacagatgttttaaatttctaattgatttgattccacacattaaaactacgccatatccaacatatacaggcaaaggtcttctgtaaaactaaataatgtgaagcccaccacccaacggatatcattttactatgaaaggcccaatgaacatgttgttattcagtttataaattaaaaatatttcggatccagatccaagcccggatatttgcggataatttgattgttgggaggatatcttccggatccggatccaccctaaattaaaattgttcttcctccactcttcttcaagtttggcctccgtttccagatttttattcaattcttcttaatcaacttttaaaatccggcgactcatagtccgtgaattttgaccggcatatccggttttggtgtcgtcggtaaattcctcttcattgcagtggaagctggttcattgagaaataatggtaactcttttgggattatgagacttgttttcttttgcttcttgttaaatctatatagcttataaaaacttgttttctgcaatttgtggttcttcgcaggatgcatttagagatgctatattgcagcgagctccaattgaaacctttgcactcaagactgttcaacactttatacaacctcaggtaactctttcgaatcaactaacaatttcttcactcctttagtcttacttattgtctttattgtaaaatttgacagaaacaaacaaagttggctcaagatgaaaaccaaatgcttgaaaacatgctccggacattgctgcaggagctagtggtctcttctttctccactattatattttcgtggtatgcgtatatacttgttcatttatatatgtgtggatttctctttctgttttcggggtttcaggctgctgctgcgcaatcaggggagcaaattatgcagtatggtcagttgattgacgatgatgatgatgatgatgatatacatggacagattcctcatcttctaggttagcaatctctctagtctgatttgcatagttcgttcaaacaagtgctagcgttgtccccgtaaaacttcttattctcttgttgtctattgcttatcatcttgtcctcactacttttgtctaacctctcaccatcttcatgttttgattgctttgttagatgttgtgctttatctttgtgagaaagagcatgtagaaggtggcatgatattccagctgctggaggatttgaccgaaatgtctactatgaaaaactgtaaagatgttttcggttatattgaaagcaaacaagatatattgggcaaggtatttcttaaacgaaatcaaattttttctcggttagttgtatcttgtattttgacttggatgttgcaattatttgcagcaagagctttttgcacgcggaaaacttgtcatgttgaggacttgcaaccaacttctccgccgactctcaaaggttcgctatctgcacccttttctagttccctttgtcaaatatccataagtcataatctactttttcatatataacacatccactcttttttaattcttttttttgctttcactatttggcatacaggccaatgatgttgtattctgtggaaggattcttatgtttttggctcacttttttccgttatctgagcgctcaggtaagaagggtttctcgtgcatatacgattatttggtatgtgaatgtttaaaaggtgtgtaacgtttacttgcgtgacttattctttcagccgtcaatataaaaggtgtttttaatacatctaatgaaaccaaatatgaaaaagatcctccaaaaggcaagtgatttttttttttcttatgcttttggtccttatctccatatgacaattctaaaacgtgttacttattctgtctatgtcattgcttctcaggcatttctgtagatttcaacttctacaagacattttggagtttacaggtgcgtattagttaaaggaactttgtagggaacgaatgttatgcctttatcataagggttgtctcatagaacctctgtttgcatatcatgcaaaatcaacattactggagatagcatctcaaatttccttttgttagttagtttattgagatagttcttttcttactgagaaaattgtttcgtttccaggagtatttctgtaatcccgcttctcttacttccgcatctaccaagtggcagaaattttcatccagtttggcggtatgtgatctttggtttttgactaaattgcattacctggtcttgtatatatgtatatgcatagaaaattcatgctggcggtagtgagaaatcatcttagaccttgtttcttgaactgcttatgtaggttgttttaaacacctttgatgctcaaccactaagcgaagaagagggagaggctaatagtttggaggaagaggcagcaacttttaatataaagtacctaacaagtagtaaattgatgggtttagaggtaagtatgctgtggttggacatgcgcacttctgaacttagcagttcactcacttttttttctacctttcgccacagttaaaggattcgagtttccgacgacatattcttctccagtgcctcattatgtttgattatctaagggtaaatgtctctcaagaattattgcacggaaattactctctctggtattctggtataactgaatcctgtttccgtttaggcaccagggaagaacgacaaagatctgccatctgaaaccatggtcagtgttttttcttgtttaatgagaaaattcctcttgctttctttcaaaggttcacaaacctagttatatctcagtattcagggttttatgcataattactcaaaggtattgtttatcttttcggtctagaaggaagaacttaagtcatgtgaggatcgtgtaaagaaattgcttgagatcactccgcctaaagggaaagaattcctccgtgcagttgagcatatactggagcgcgaaaagaattgggtatgtgtgctgctttctctcttacctgctgcatgattttctggcttgtagttgagggccgttaatgatcttctacaatacacaaataacaggtctggtggaaacgtgatggatgtccaccatttgaaaagcaaccgatagataagaaatcacctaatgcagggcaaaagaaacggtatggggaaaagctgaccttgtaatctaactgctttgtactcatagatggtgtccgccattcgaatttagaatacattacgtggaagaaattgagaagatgttttttccctagtgatctctggtcgctagtccattaaagtgagaaacaactaataaatctgcattacgagtattaggctcaatatgggttatcttttgcttttacaggagacaaagatggagattgggaaataaagaactctcccaactttggagatgggcagatcaaaatccggtatgcattatttttctttgcatccttgttcgttgttcatattatgccacatgcttctccagctctcctctcggctcaatcttcatattacgactctacaataattgtatatctgatgggataacagaatgctttgactgattctcaacgcgtgcgaacccctgatattgcagactactggaaaccattagcagaagatgtgagctaacatactgttttctttatttttcccaaaggacatcttaaaaaaaatggttgatgtcttattagcacacctgatgttttgttaaaatctcagatggatccatcagctggcatagaagatgagtaccatcataaaaacaacagagtatataactttcctctgatttacaacttttttttttatgatgcttaattgaatcagtctaaggcagataattgttactgttttgataggtttactgctggaaaggtcttcggtttacagctcggcaagaccttgaaggattttctagggtaaaattttcttcgatttcgatttcccaatgcttcatatgattgctttttaaaacctttttctttctttttcacagtttactgaaatgggaatcgaaggagttgtcccagttgaactattgccgcctgaggtccggtccaaataccaagctaaaccaaacgaaaaagccaaacgagcgaagaaagaagaaaccaaaggtggatctcatgaaacagagggaaaccagattggtgtttctaatagtgaagctgaagctgaaggaggaaggggtgatgcagagacgatggagagtgatgctattgcagacactcctacgcctgaggaacagcaaagactcggtggttctgatacagaaaacggtcaagaggccggtcaaatcgaagacggagagacagaagaagctggtctgatggacactgatcttgatcatcctcctatgcccgtctcatgaatacgctttcagtttgtcgaccctttcttcaatggggaatcctttggatatgaagttcaaaagtattgatgtttaacaaattatgttaaaaggtattttctaaatatgtttgtatgagtgcaaatctgctagcttattacctgtctttccatttctatatactcaacaaaatcatcatacaattaagttcttttgcgtaatttatcgtctaagtgtaacactagacacatattcgcagctaataaacattggattcaattgcaatccactaaaaatacactcaaacaaacaaaaaaatcaaatacttgaggaaccaaaagctaaaagtgttactattatagctatcaacataaactttatgttttgccatcaatatttatttagaatataaatgagtggtttttaagtcgtgtcacgatttttaaagtccataaacaccaccgatctccatataataataaggtttcatcatatgccaaatccaataatacgtgaaactataccagttcattgtaggcttatttggttatattattactacctccaatcattgaaaatgtatatactttgtttagtcgttatcacttgtcaatgcatatcaaatcaccttataaatttacccaaattcactattgaattgttgatgcactgtcacataagatcacagttgtcttatagtcgtcgcactgttatgacaaaaaaagtgtcgactcatattgaaacaaaaaaaagactaaacaatgttggcacagcgatgcgataaagaatcgaccaagagacaaccgagtgatttgtgttgtcaacgacaaatgaaaagttgcctatttttgttacttatcgtttgaatacaaaaccgtagatcgatctaaacataatccgaatatactaattttttgtttaaacatgatttattaacaaagtcatttaattattgtaatacaaaaggtttttgccaaaacaacaacatgctactttttcatcattttcccggaagaaactaaagatacatgtggcaccgacacttttctaattttctatcagatcatgtggcccaaaggatttggaaacaaacagtacctagaatgcattctaatcatagatatttatttttataaacctactacgtctttaggcatatattagcttaacactaaaaattacatatgtttttttatatataaagaagacgaactcacaactttattagtactttattgaaatttaagagcaggttaaaaacattgaaaacatcatatattgtgattttagtgttacgcaaatattgtctaaaaaatacgttagtttttcttgacttaacttatagtgtacatatataggtatatagattgtcggcaaatgtatacatatggatgtatggcatataaataaatatgatgtgatatgatagtctcaataatttgcacattgttttccacttgtacataatattttgtggtcaacagtacattaaatttgtatatgcaaaacaggagaaaagacaaatgggaaaaataatggtgtgggtggagcctaatttaattgtatctacgcaagagctagtgaatagaattagagaatttaagtctgtatcaaggcaaatgaaagaaataaagaaagttattccttgaacatttctaattttatatttcaggttaatataaagtacattgataaaacacagttaaaagtcaaaaccaatgtgctcaacatcctctaagcattatatatatagcttttatttttgtgaatctatttttattgtgattagtatagtcatcactcaggagacagaagaacaaaatagagggaaataataaatgtaaagggtgatccaatgtttaccaaatctatataaaattttcgtccttttccgataaaaagactcagtgagtcaaaattattcatttaatttttcttacgtcaatttaaagtcaatttatacattttaatttttgtgtctactttataagtactcagtattttttttttttgtataaagaatttaacgaaattaccaactgttaagacaaaataggagtggaggacagagagcgccaagcgacacacttttactgggtcccacattttaaattcatttattatcttttatttattttctaaatctctttttatttttttgttggtagtttgtgtggttttctttctctactttggtttggtagttgattacttgaggaggtacttcaatatcttccgtctgtgtctctctctcttcgtcttcttcattacgcgtcttcttctttctcctcttcttctacattagcccctctctctttaattagctgcagctcacctttcactatctcttcttttatattgattgtgaacttgtgtgtgtgcgtacatttggagtttcagagaaaaacagttggattcactccaatacctaacctttcacccatcttcctcattacttcttcagaagaaactgagaaatcttctctgcaaagcttgtaattgcatgttttgatgggagttgtaacgactggatctctctcgaccaacctgttgggttgacttgacccggttgcagacctcggaagctagagattgcgtgtgtgtgtctgaatttgacatactgtctactgttttgtcggtactatgaatactggtggtcggctcatcgctggttctcacaataggaatgagttcgtgttgattaatgcagacgagagtgccagagtaagaatttatatcaaaattgaagcttttttcacttctttctctctgttttgatttgcacacattgttaaattttcgttgctctgtgtaaaggttttgcctttttcttattctggatctgggttttacatttcatcgttaatttatcaattagggtacacgattccataattcttacctacttttatcatcatgtacagtgaaagtttgtgtcggtggggattgaattctgagttttagtgtgtaaaaaatccccaaatctaatactttgctttaaaagaaacaaattttgagttaattgctagtgaatcttgtgttctaattgagatccaatctatgtgtgtttctcataattctctgcttatgctgatttcaatatacagattagatcagtggaagaactaagtggacaaacatgtcaaatctgtggagatgagattgagctaagtgttgatggagagtcttttgtggcatgtaatgaatgtgctttccctgtctgtagaccttgctatgagtatgagagacgagaaggaaaccaatcttgtcctcagtgcaaaactcgttacaagcgcatcaaaggtcacacttacttgtttcaacaagttttaacctttgtctgatcttatgtatctgacaaaggtttcttattgttttcaggaagtccaagggttgaaggagatgaggaggatgatggaattgatgatcttgattttgagtttgattatagtaggagtggccttgaatctgaaactttctctcgccgcaactcggagtttgatttggcctctgctccacctggctcacagattcctttgttaacttatggagaggaggttggttcatattttccccaatcacttctactgttttattgtcccttttttattgctcattttggttgtttttctaggacgttgaaatttcttctgatagtcatgctctcattgtttctccatcacctggccatatccatagggttcatcaacctcattttcctgaccccgctggtaagttttgttttctgatttggggggacgtgtttcatttcctgttattgttgtttgtggttactaagctattggtttgctatgtcacagcacatccaagaccaatggtacctcagaaagaccttgcggtctatggatatggaagtgttgcgtggaaggatcgtatggaggagtggaagagaaagcagaacgaaaaatatcaggtggttaaacatgatggagattctagtcttggagacggagatgatgctgatattcctatgtaagacagacccaaatactgtcttttgtcatgtttcactgctttgctttgatatttacgagttttgttgttcttgttttaggatggatgagggaaggcagcctttgtctaggaaagtaccgataaagtcgagcaaaataaatccgtacaggatgctaattgttctgcgtcttgtgattctcggtctctttttccattaccgtattcttcaccccgtcaatgatgcttacgccttgtggctaatatctgtgatatgcgaaatatggtttgcggtttcatgggttcttgatcagttccctaaatggtatcctatagaaagagagacatacttggacaggctctcattgaggtacgaaaaagaagggaaaccatctgaactagctggtgttgatgtttttgtgagtacagtggatccgatgaaagagcctccgcttattacagcaaacactgttctgtctattcttgcggttgattatccggtagacagagttgcctgttatgtttctgatgatggtgctgctatgcttacttttgaagccctttcagaaacagcagagtttgctaggaaatgggttcctttctgtaagaaatacactatcgagccacgagctcccgaatggtatttttgccacaagatggattatttaaagaataaagttcaccctgcatttgttagggaacgccgagccatgaaggtttgtttattcttgcttctttatacgataatttgctaagaaaattttgtgcttattgaaaataattgtcttcttttcctggctacagagagattatgaagaattcaaggttaagatcaatgctttagttgcgactgcacagaaagtgcctgaagaaggttggactatgcaagacggtactccttggcccggtaataacgtgcgagatcaccctggcatgatccaggtgagatgctttgaggcgttagatatttctttttgttctatgtgatgtgtgtatacttccaaacttacctgtttaatttcttgatttttcctgtaaaaaggtattccttggaaataacggtgtccgcgatgtagaaaacaacgagttgcctcggctggtttatgtttctcgtgagaagagacccggatttgaccatcacaagaaggctggagccatgaactccctggtaaataattatgctcaactctccagtgtattctttgaattgatttatgtttatctctcgctaacttcctgactctttcttctcatgttaccgtatataattgaagatacgagtctctggagttctatcaaatgctccttatcttctaaatgtcgattgtgatcactacatcaataatagcaaagctcttagagaagcaatgtgtttcatgatggatcctcagtcgggaaagaaaatttgttatgttcaattccctcaaagattcgatgggattgataaaagtgacagatactctaatcgtaatgttgtattcttcgatgtaagtacaccattctctatcaccacatccttttcttgagttattcatctgctcttacttaccaaatttttgatcttgcaattgtcgaaacagattaatatgaaaggtttggatggattacaagggcctatatacgtgggaaccgggtgtgtttttaggagacaagcactttatggatttgatgcgccaaaaaagaagaagactaagcgtatgacttgcaattgctggcctaagtggtgtttgttttgttgtggtctaagaaagaatcgtaagtcaaagacaacggataagaaaaagaagaacagggaagcctcaaagcagatacacgcgctagaaaatatcgaagagggcaccaaaggtaaccagaataaatcctctgtatcatttagtttcagttcattgctgaacacttttttgtttctttctttttcttaggcactaatgatgcggcgaaatcaccagaggcggcacaattgaagttggagaagaagtttggacagtctcctgtttttgttgcgtctgctggtatggagaatggtgggcttgctaggaatgcgagtccagcttctctgcttagagaagccatccaagtcattagttgtggatacgaagataaaaccgaatggggaaaagaggtaatgtagagctctttaaaacactttttagcactttatctttcattttgcgatatggtttttgatttctttcatggtgtttgtgaaatttattcaagattgggtggatctacggttctgtcaccgaggatatccttacgggtttcaagatgcattctcatggctggagatcggtttactgtacacctaagataccggcctttaaaggatcagcacctatcaatctttctgaccgtcttcatcaagttcttcggtgggcgctcgggtctgttgagattttcttgagcagacattgtcctatttggtatggttatggaggtggtttgaaatggcttgagagattgtcttacatcaactctgtggtttatccatggacctctattccactccttgtttactgttctctcccagctatctgtcttctcaccggaaaattcatcgtccctgaggtaaaacacaaccccaatctatgagttctccaaagtatgaatctttgttctatgttttgtctatcatctttgagttctctaaagtatcaatctttatattatgttaaggtttcctttgctctttcttttggttgcagattagcaactatgcaagtatcctcttcatggcacttttcgggtcgattgctgtaacgggcattctcgagatgcaatggggtaaagtagggatcgatgattggtggagaaacgaacagttttgggtgattggaggtgtttcagctcatctctttgctctcttccaaggtctcctaaaggttttagccggtgttgagacaaacttcacagttacatctaaagcagcagatgatggtgaattctctgagctttacatcttcaaatggacatcactcttgatccctccaaccacactactcatcataaacgtaatcggagtcattgtgggaatatctgatgcgatcagtaacggatatgactcgtggggtcctcttttcggaagattgttctttgccttttgggtcatcctccatctatatcctttccttaaaggtctgcttgggaaacaagacagaatgcctacaatcattcttgtctggtcgatccttctcgcctctatccttacgcttctttgggtacgagtcaatccgtttgtggcgaaaggcggtcctatcctcgagatatgtggcttggactgcctttgattgaactcaagagttgatatgatacgtaacagattttccacagaggtaagtaaagaggaaagtgtcgctcacacatttgtttgtttactgtgttaagatccttgttagattgaacacaaaaagaaaagaaggatttagatatataatgttattcttttggaaggtgttgtaatgtagatatagaagaaggtggtgtcgtctatttattcttgttatttttttttgagtgaaagtgaaacagaaaagagaggtgttatcttattaattctttcattgaaatattttgagaaatcttctgcaagttcttgaaagaaaaagaagaaggttactttcatcaacaattgttaagaagatgtttttgtgagggattcttcttgtctgaaacataaggagagattcaatctccgtggatctccttgtcttagttctcttaagaattattgtctattaattcttcttctctcttgagaaagaccttggagcacgaatcagtcaaaattcaacacaactgtttgactggacacttttggaaccaaaccaccaaggaataaggatcattcattagtaaattcaagtcaggataacatgtgtagaatcacccgagtctctctatatgaacaaaagtcactgagactgcaaaatttattttataaaataaatctaaccacacaaaaaaatcgtaatactatttagtgaatccaatttatgtcacctcaatgtagttaattgctgttatttaaataatattttcacctgaacgtgtaaggtatacagcatttttaattggttaaataaaactgtagagattagagaggcttttaaaatttgtgaaaagcgagtcagcgataagagaagcatatactgcataataaaaaggtttttggccaagtgtctgaaaaagatacgcgttttgtgaccaagcaccaatgggaaatacataagtcaaaataggtggaccccactaaattggatatttgtataagtttcattttccttaatttagttttaaggaaacattggtcttttgtaatggtaggatttaggtcaaaagattcaaagtagcctatattttctcatcatctgacggttcagatctgcgttggtctttaataacccagtacaacagagtgtacctgatagctcttataggtctcttgctgcttaagatttttatgccaacatatttgcctaaattatatagccatgctaaaaagtttatcagtatgacattataacccctcaacaatataagattgacacacttggcaaactccagatgttgactctttccatggaaatgaattattattattatgacctacgagttgacaaattcaggctccgaatggtgatcgaaccggacagtgcgatacaattcaaatagtaacgaaaatgtttatatatatatgtgtatgtatatatttttgttactattagaaccgcatcgtattttatctgcatcacattttatccgcacgtcaccattcggaccctcaatctacgatttgtggacgaaaaattcaatttttttttaactaatgatttacaatcataattgactactgttaacgctttgaaataacaaaaaaaaaatcccaatgttttaagagtatggaagattcattggtaaatcaatgtggcattcaaacaataataacaatacactaactagttatttctgacaaatttgttgggaaataacttgtatgtattaggctatgtaatggttgaaaatgtaacttaataaataaggagaatgtattattaaactagtaaaaatatagggacgagtttgcaaaaatatagttaagaaaagatgagggatatagagagagatttcccagcaccaacgtcgcagtttctcatggtcttcaaaaaccctcaacaacattacgtaatcctcgaagaaattaaccacaactaaaaacacacaaaaaaataaaataaatcaaatcgaacaccagagagaatttcttcacaaggaaatttgatattaaatttggagtttcataatggagaagatccaatcaacgaagaacgagagtaataaacggaggagacgagaagagatgataacggagatagagatggaggctgctcaacagttgatgcatctaagcgatgaagagaaaaatatggatatcatcaagaagaagaagacaatcgaagaaatattcggtaaagatgatagtcatgatcaagatcaatgcacggaagaaatggtgatgttgagagtaatatcatcattgaagaaggagaagaagaagaagtataggaccattgagagcatttacatggcaacgagacctatcagggtcgtgattagatgaataaacatttaactctctttaggtttggagtttaagttttttttcttaatctacattatggttttatggataggatttttaagcagtttgtaattagttcgaagcattgtgtttgttatgagcgcaacacacttagtttttataattatcgtagtttatgatttgattatgttgtggagatcgcaagaatcgattgaggatgagaatatggtttgagggagcataaagatcaaatgattatgatcgatgcgtcacggctttctcgtttcttcagaaaacaaaaaatcttcggacgcgtggaagtctttttcatgtgtttatacgcgtgttgggttttgtctttcacaatttaacgaaagaagaattatattcgagtaactttttgttatatgtctgtgtaacattttacaaaggttttccataactgaaagtactgattctatttctgtttttttttgaacggttgatccgaaatggagatatcatttatgaaactcacggaaaaaagttttgaactctagagcaaacaagaccaatgcatacgggacatagaaggtatctttggggctagcgggcggagatggacatgtagaatttcggcaagacgggttgattgtaacacttctgacccgagctagagcctagagtcaaatgtagtgtatatacgaaggaggaatgggaacaaaaggggaaaacggtgatttggtttcatttgagtttcgaaactatacatggtaaatggaaatgtcttgtaataatgccatttaggcgggtatggttaaaggtgataaaagaatggacttggttactgattggaatggtaaaaatataggatatgacgactgacgtgtgaatgtatgctagttaggggcacttgcttgagataacataaaacttaaactgttttatggttggagttaatgggttcattaaatttgatactcgcgtctctatagaaagatattgcaggtgaaattgactgaaaccaaagcttagaggcttgtgtctagaactagaagcacgaggaactagtctgtcatggattatggtgctgaactcggttttatctctgaatatttgcttctatactttggattgtagcctacaagtgatctaagtgttgaattcattgtctttgatattgcggattttataagttcaaagatcaataatatatgggaaagttacaacaaacgaggacagaaaaaaaagaagaagaatgaaaggtcctcattcataatccttttatctatgtaacatatttcagacaagagattgagaatctgcatagcagttagaacaagaaatctactaaagacaaaaatccgacttgtcttcaattcaggccttggctttggcttcatattcatgaggaggctgcaataaaagtattcattcagtaaacagatgaaagtaaaagccaaagaggatgaacgaactaactgttttaccatgaaagttgcagatatcatcttttgtgcaaaccatctcatatgcattgctctttgagctgctgctgctgcctccactgattgaaacctcagatacacaaaccccgcactgttcctgcattttaccagaattcataccaatgtcacatatctataaacagaaacagccaaacatgtaacacattttgatttaaaatacttacttgtctacgtatatatggttgactgggccatactttgaacattcatccgcaacgtcgtctctgatttcaagatcaaagtttggttccgtctgcagcaaaataatggtttgatgttaatagcaataatggccgagacttgtttttcccagctcaaacaaaacaaaaaacaaaaaacagaagcaagcattgacctcggttgcaggatcaaacatattcttcaatagaaggcattcgcttggcagaccaacatgttcattgacaaaagaagggattgctgttgtcggaagcactgatgttgggaaactaggattcatgcctggttgattaaacgctgctccatttagccctggtactccaagagagcccacaatgctgtggatagaattccatatgttataaggaggtactcgcaaataaaagatttgtgaaccaaatgggtaaaatagatgcggacaagagagacagatataccttgtagcgatacctgaacgatccagcttctgcataagcatagccctagattgtgcatttaaagcctgagagggagcgagagagagtcataaaaacagacctttaagttaaaggagacaaagagtaaaaggaccaggatctctagcttaccagtccacctccatcatcatcatcaaaatcagcagattttggagcagaatcttgtgtaccaatatgatcagagacggaagaaacctaaaaagaaaatattaacccggataaagtaaacattagatacatgcaattcaaaagaactcatcatttttccacaaggaattcaaaactcaccttgattgtcctaccagcaatctccagctttccatttaaggcaatttgtgctgcctttgaatgttcaagttgaacaaactatgcaagagaaaataaaactcagtgaggaataactaagaaaaagagtaccaacaaagtaaaaaacacgttccactaacctgaataaatccaaatcctttgcactgcccagtttcaggatcaagtggtagctgaacaagctcaacgggaccaaatgcctcaaaaatctgataaagaaaaggaaacaactgtgagaatatgaaggatactgaaagaaaaaaaaacagttgctggagtgtccatatgtaattaaacaattgacctagaaaactgaatatcacctgtctaagctgcagttccgacatgttgaaatgcaggttacccacatagagtttcctatctgcagggcctgtaccaccaaccgtagtgctgttagattgggccagattcttttcagcttcagagggcttaaccatcacaggttgtccaagaaacagttgtccagacagagctatggccattggaactgacatcacgtcataaaactcaatatacctgaaagtacaaaaaaagaagagatatacttgacttcaagcacacatgggacgaacaaatcagaaaaaaacttacaaagcaagtagcaaagagaagttggaaacaaaaaactttagtgcgggggttcaagctgagtctctttggtgggttggaggcctagagtaatagaaaatgttagcccatcatgataaaagaacaataatcaagtctataacagcaatgactacagaagcaagctcctccaccagtgaatatccaaacagaggacagggaaagcaccaaggactaggaggaagtatcaaacaaagaatgtgaataagattgataggctataggattccctccttcctgagagtgcttgcaatggaaagtaacaactgaaataggattcaggttttctgacatctaccttgaccacgcagaatgattaaacaactgtgcaaggtattgccatcatcctcatcattatcgcattgctagtgcatctaagaatacagaatcgaattcttgaaattgcagagaaaactgaatatgcagaaaatttacgtaccaagtgcacatacacaaaactaagtttagtagaaactgaagaaacatacccgacgccttttgatcgtcttgaatttctgtccatgatcaatcgcacatccctcacctgaaattataaagacccgagaacaataagaacaaagagaaaacagaacgcaaaagaaattacaagagcaaagatagaaattttttttgatcaaaacagctctctgcagtaagcaaaagaagtctagcaatccagaccacacaaattatttaaacactgaagaaaaataagtgttcctattgaagccgaaataagaaagtcaatgaagcaagctaacgattaatgtttattctattgtgacaaaaactacagatcccaacatatatcatacttgagaaaatctacatcttcagtaaaagattatatgccatggtcaagcacatagaaacagtaacccatcaaaaactacaaccaaaaagacaattaacaaactagaaaaggcacaaagtaactgaccttgcccgctttggagaagaactcataaacatctctctccgtagctttaagaggcatctgttcaataataaaacaagatttaactttaacgtaatcagtaaacttaacaatgtgggttatgtcttcccctaattattaaacccaaatgtttaagaacttacctgatatgcaaaaacagttctttgatctctctctggatctgcttcaggctcatctttcttgtccctgtgtcttctgcaatcgtgaaatcatttaaaaccgttcttaaacgactaaagaaagctcatcggaactttgtatcattcctcaaacacttgcccatgtaaagaagaaagagaaatttaacaaacctgcttcctctttccactacttcgggttccttctcttccctccgagatctactgctgctcctcttctccctctctcttctctctctgtctcggggtttgtctctatcgctcctatctctctccttgctactcctctctcgatcgctctctttatctctcgatccttctctaaccttatccctctccctatccttgtctctgctgctcctatgcctctctctctcccgatccctcttaccaccaccgttctcttcgccgtctccgcgagacttcttactccgactgctaacccgctcttcttcacctccttcttccccctgcctctctcctccttctctctttctgtaactcctctcgctcctctcgttcccactctcttcctttttcttattcgacccagctccttcctcaaccgtcttctccaggtactcgtattcgtcaaactccattctcgtcaacgattcggcgtatttcgtaaattagggcttttgttagggtttcgaattggaagaagctaatgagataattgaatttagttgtgcctgtttgatcgatatctagaagatggtgatttaatcgtaaattccgaataatagcgaggttataaacggtacttcgtacataaaatcagttacgacagtgatgggcccaatagttgtatagaaaaggcccatttatcttaataatttttaaaacgtcctaaattgttttttctcactaattattgtttttttttatcaacctatatatacaacttattacggccacacaatatttaggtttggttcaaattattttgatggagaaatagtatggcagaaaagcgagcttcattttttgatgtatttgataacttgtgggtaaaatgttccagaaattattcttccatgctttacagtttcttttttagattgaaaaaaaaacaaatatgttacaagaaaaaaaaaaggaaatagaagtttttatgaaccccatcataagtgatctggttaaaaaactaccatcgcctctccattgcctctgccaaatgatcaaaacaactgcaagcggataaaaaatcaataatatttgtattttccctatgtcttgtggtttaactcaccaccttcaccttcttccatattgatccgacctgaatcatataaacattcacattcaatctctcttctacaaccacaaaactatcactcgctttgcggcgtttacagtttggttacatacctaacaatgatatcaacgacggggcttcccctgatccatttgatttcatgtctgcacctacatttcaatgtcacaactgatacttagatctatatccaactattggacctttttctagaagacaatttatcttaagagcaagttataataagcaaacacataagcagtagagacaagagatatgaagactacctgaactttccattgatcttgtgatgtctgacttcttaaatgtaaatcctatgaagttggtgtccttggacgtcaacatctgctcaacccaatttataaagttagcaccaaattgttttcatcaatagcatactgtccaaactcgttgatactagtctcaaccataacaaaacataatctgctagttttatcatgttcagagaaattttcgcatatgtcaatttgcaacacagattatacgataggaatctagtggagtgattcacctttctccaaggaccaacttgtggtgcttcggatggtgatccttcaacctacaagaaaatatcaagaaaattgatgaggatattagacggtttgactttctcattttagcaatactaagatccataagacagttttgacttctaacaagcagttttaaaacaagttttaggttcaccaaactagtcggtttcaacataatgcctcatgccacaaattatgtcatgacaagttttttgagattctatcaaacttacttcaggaaacttctcaaaattttgtgtgtctagttctccatcgacaatgggtctataagctgcctccatgtcatacagtttgtcccatggggtgcctttgaaccatggatgcgactgaaacatgaacaaaatataatacaatgatatcaaggatcatgaaactgaatcgtaattttacatatccttttcagaagtcgcacctttatctcctcaacacctctggttcccaaccttgaatcaacatcacaaagcaaccgacaaatcaagtctctggcttcatctgatatttttggttcttcagggaacttcaagcataccctccaattaattatctgagataagaagcacaagtctttttaagcaagcatgactatttcaaatatagataaaattttatatgactaaccaattgtatacacctaccttgcggcatgttatacgggggtcatcagaacagaatgggggatacccaactaacatctcatacaaaattgcgccgagagaccaccaatcacattccattccatatcctttctttaggagtacttctggagccatgtaatcaagagttccaacggttgaataagcctataaaattgagagacctattgattacccaagatattttggatgtggtaactgatctctattgtgtagcataaaatgagtagcccatgtaattcaattagagaagcagcataagtaccaatgcacggcgattgcgtttccactgcagtaactgctctttaggcatttgccagggtgctttgtcagcgtctgattttcctgactggttctctgaatcctgagacaacatttcatcgtcttctaatagcaatgaagaatacttgtcatcaagtggcttacataaaccaaaatctgaaagcttcaaatgcccacttttgtctagtatcaaattatcaggtttgatgtccctacaggcaagaagaaacaaactcaaatcaagaaccaaagagccaaatagtatacatggacttttaacaatacgtagagatctcttttacaccctaaatcactagcaataaaaatgatgtcaaaacttattatacctgtgaacatagttgtgttgatgaattgaatggatggcaagaatgctctcagcaatataaaaacgggcaacatcttcagaaagaatgtcttctctcatgagtagtgtcatgatgtcacccccaggtaaatactccatgataagatacaaacattcagaatcttgaaaagagtaaaaaagctttacaatgtaacggctgtcaacttctgcaagtaagttcctctcggacctgacatgctctacctagagacacaaaaccaattaaaggaaaaagtgtccaattattcacttgtttcttcacaagcacaaaaactgcaagcaacctagtgaagccagtcaaatgataagaaaaaggtacgaagtttatcagctcatatcaggcatcaatcttgcacttgctagtactactattctcaaacaacaaaaatagaggggatttttgtacctgtccacggctaagcatctcagtttttttcaatttcttcatggcataaacttcagatgtagatctcaaacgacataatctaacctgaaaacacaatttcagagattacaagatatcctgaagagtaatcgattccttaagtagtcaatttctagagaaacgcatagatctctgtataaacaagctcgatttaggaaatagaatgtgatattgtacctcaccaaaggcacctttgccaataacggtcaaaagctcaaaatcatcaatcccaattttacgtctctgaagtctcatatactcagtttcacgacgagccagattcctcatcatctcgtcttgttcctcaacaggtaactgagcttcttgcactttcctctgaaactccctgcgtctgtaattttcaaaaaaaatctcaagtcaaacacaagtcatctttcgaaatgaagcaaagaccagatcagatttgaaaacaaacaaaaatcccgaatccaaacctctccattcgttcgtgcaagccttgcaagtaattcttataatgattctcgatgaattgcttagctgcagcagctttctgacgtgtcactggcgacgaaaccgcaacatccgtctccgtttcgaatccgcgaccaggcttgacgcgaacggttccatcggcgccgtccataatcttcaagcagagatcgtaacaatacaagtaagagagagagaaagagagagagatttttagagagccatggaaattaaaaaggaagtaatcgaggagagatctaaggagctgtcacggtgttggtgaaatcccaaagacgccagaacgtggactatttaccagagatgaactggcaaagctgtctcctctctattaaatttaatcacattaattaacaacaataaacaaattttattagttttttttagagtatggaagactatacatgtgccagtgccatcataattttagtttttattattaacttgcaatctttgatgaagcaattttttatcgtctgactttttgtcagcgcaaggtttggatctatctcctggggcacacacgagattattcttctcgttcagtaaattcatgtaaattttctaacaatttaaccaaaaactaatccaccaacacttgaaataaccaataagtggcaaaacacttcgttagtgtacagatccatagtacaatttttaaaaggaaacactgattcgagtttttaccacataaagatgctaataactcaacgaagaagatcctgaaaagttttcatgaagaagaccgcatgttttcaaggtctgagagcggctttgtgaaccatggtttccttgtgaatttggtggcaactcttttccacaagatctagaagcttctccaaattccctgcccacgagtttagaatctcgttgctgtcctttgcgatctggaagcacacaattccagatggtctgtctatttttgcaatcagtgcttttgacactaccatctccgatagatgcttctccgcctcctgaaatcacaatttccaacaattataacaagcagaagcatagttgatatagccagtgagattagatcaaacatacctccatgctcaggcataaaagctcggcaagtctctttaaggttatccttgcgtagtactttgagacaacgaggatattctgcagaataaattaataactttaaagcatcaatcaacttatgtaaacaagcttaaagacaaattgagagacttacatgttcgatgattctcagtttcagatcttcaccagctttgtcacccaaagaacctccaatcatgcttttctctttctcgaactcatccttgtatttgttccacagagatgtccattgaataacctccattgtcactacctgttttagaagcatcctgaaacgggtgatatcaaacaaagaaaaaaagactgagaacccatttgagtacaaaagaatcagttattgaaataacaaaatttatcagaaaataaaatatacttgaaatcagggatttctgataaattcttgtcttccagagttgcattgagcaagcttgattgcattgggtcatgaggtgccaagaccaagaaccagcagatcttcctcaggacctaatgttttgaagatcaaagaaagttattacactaaccctatagaatgtatactaactatacatccaatcaacggcatgagcttaccggaatccactgctccggagtttcttttactgaagggatatcatatatcgccttgtagctacggcagatttcaatgtactcattgttatgagaatagtacctacatagttgaaattttttatggttaataataaaaaagatgagaatgccacagaaatcaatcatggtacgtcagaattcagtggataacataatgcaattgatgtccaaaatcgttggccatgaaaagagagtcataaatttgacacaaaaggagattcatccaaatttcgatactgtcctccaggaaaaagttgtaatatgcatctctgagaaaaccatagcaagcaaaagccacacagattgatagaatttaagagacagagagagaggtccataattaaacagtcatataagaatttaaaatgccatgataaatgatggaaatacaaatcacgaacaatgtgatagagaagctcaagaaggccgtaccgaatcataagctcgtagtaaattcgcttaagctccaaaagggttggtatatcagcaggagcctcttctaccatgttatcaccttccttaggtttcttcttatctttttttgtatctgcgtcaaaaactctaggattgatcttcctagataagatttgtgcacgaacaaaatcttgacgatccaagcacaagcgaacctttaaagtttgaccacaatagtttgatagttatcacaatgaaagaaaacaccagcaaattattaattgcaacgtaactacacaagtccttacttgttcaaggataaatgcaattttctcagtttttgccatagcaccaaatgtctccacctgttaattatttatcaaattgcaggggttaacaagggaagaaaatttccaggagatttaatagccaaatgcacaaaatcttacagcaacttcttgcataagatctgcagcttcagctatctgaccctgttcttccttaatcttagcaagtttcttggtgagacgtgccctctcgatttcaacatatatctatacatgtaaaatgcaatggtaaacaattacacagaatgatgaagttattataaagaatacaccatcagtttcatagtttcgcacctttccagcagatacattgttcagcgtcttgataagctctatccgagtttcaatgtctggtgtctgatcgatatactgcattgcttgctgcaccatggattgcacagcctgcaagtggagaagttcacaaaaaaaaaatcagtgatgttgacttatcactttgtatccttacttttaactataattttgtacatggaaaggtgaagctaattctgtctgaagtaactagaccaagaaaacacgcaaagcaaaagtaaaaccaacgaaacactgaaaatcaaactaagttaagtaataaactgaactaaatacaaacatcactatctgcaatgacccaatttagctttaatatttgagtcaacagtgaatctatcaaaatcatagagaggaatcgtaaaagcaacctatcacaggacaacatcccacaaaaagaagcttgtatccaacacaaagtcgaatcctcctgaatttgtgctaatgtccttaatctctttccaagattagggttaccaaaaactaggcctatgcaattcctaagtcaaatgtggaacaaatcacattcaaaactcaaacaaaatatccaacttaaacaaatccttcaaattatcccaaaccaaaagttcatgttccttaagagcttaaaccacaaacactgataggatataaccaaaattccaagtacctgtttgagctgaccacgtttcttagagagattgagaatctgctcattcagaagtttccaatccttagcatcgaaacaaagctgaagaatctcagtggcggctttccttgtaccggctacgttttcggcgagtctcatctgcttctcttcattcagaagccgatctatcgttgcctcaagcttcccgctgtctccctgaaatacaaactatgacggaatgagaagatgcaaaaatttcgaaaacgagaaaaaaacttaatatcagatctgagtaattgaagactcgccatcgtgagaaatccaacgagaatcaactcaaagtagttgaaattctggtgacggaacgacgaagctttaaactatggagaaagaggagacggacgagagagatgagagagcttttgggagtagctgagcacagataattcgcagagttcccaaccccttgaacaagaaatctcagattcttcggccgatggatctttttacatgggctgctaatgggccattaactaattgttttgagtcaatcaggtttggtatgtaataccggtctagttatatggtatggtgttggttcagaagtatcgaaccgatcccattgattgaacaaactcacgtcgttcgttcttccgcccaaatctcatgatatcttcgaattttcgtagcgaaaccagagattctataatgtcgatcgagaactccctgtctcgagattcaatggtttaccttgattactggaaagatcttttctgaatttttttcatcgaggagaagaacgttaaggaggaagaaggtgaatcttacttctgtgaaactcttattacgctcttagaattcgaatattgatcctcttacatattccttagattcgctgcttacctccatcaattgtgttaacttcggtattggtttcgatttgtgctctagagattatttgcactaggaaggtgaaggaactgtagccgagactctgttttgcaatgtgcaaggtgatggattagaataatctgcttacagctaggaatcagagtttcgaaatgatgatttctggaagcttctcttttggtcgaagacgcgactatgggacttaatttcgcagtgccgattttgctggagtaatcaaaatgcggttttggagggaacgtggcagggaaaataaggaacatatggtagcgccattatgcggccaaattcgagtattggtggttggtgattcaggtaatattaacaaattctcgtttccatagatttggtaatggttctagctttttaagtagccatttaatggaactaaagaaagtttgtcgtagtgcacaaactcatccttaaagaaggagctaatgagaagatttctcatgatgattggatatgagtttctacttgtggaacctaataagagtcaagtttcgtaagtctactacatcttctccactattgagcaaagttttatctctggatatcaaattaggtgtgggaaaatcatctcttgtgcatctcattgtcaaaggctcctctattgttcgcccatctcaaactattggatgtacagttggtgtcaaggtaacttaagctgttctataaaaaaaattctcgatatggttaaagagagcatgggataagtttccctacttagtttctggaactctctttggtgcagcacttaacttacgcaagtcctgctagttcttcaagtatcattaaaggtgactcagagagagatttcttcgtcgaactttgggatgtttcaggtcatgaacgatacaaagattgccgctcactgttctattcacaaatcaatggtctgtctcaacaaatgtcatctctgtccctgttttgtcactgatgcgactgtttgattatgcaggagttatttttgttcatgatctttcgcaaaggactacaaaaactaatttgcagaaatgggcgggtgaagtttcagtaactggggagttttcagctcccctttcttctggtgggcctggtggtcttcccgtcccatacatcgttattggaaacaaagctgatattgctgccaaaggaggaacaaatggaagcagtggcaatcttgttgatgcagctcgtcattgggttgagaagcagggtctgcttccccatagtgatgaacttcctctctctgagagcttccctagcaatgttggtctcataatggtaaccacagactaaattacttgctttatttgaatttagtgttatgcggtatgtcatataattttggtaaaattatgcacaggctgccaaggaagctagatatgacaaagaagctctgaccaaaattttccatatggttggtgtcatttctgaccttgccatgttttacaatagctctctccctctctctctttctcttcaacctaatgaacgtttttcgttttcagttgataagaagaagatatttctcagacgaactaccgtcgccttcttcagcatggtctctttcccatgcaccttcccagcggttagatgagggcacaagtgatgaagatcagttctataaaagaacaaggtatatatatttatcatcctaaaaaaaatcggatttcttttctttatcgggttttggtcttttgaattttgcagcctaagggaaggagatgcttacaaatataacacattaccgcaacacaatctcatgcagtctcctacactctatccgcagcaaccacctgaccgttacaattacgctattccgagattctctctttccagtgtagaggaaaccagcaatggtaatggcaggtctaagcggatggatattaacgtctgaaagtaaaacacagatcaaatctcacattattttcctgtaatcttccaaacattatcttcttttatttgtcaacactccaaacataatctaagtattctttttttctaaataatacatgattcgtgtgataattatcttaatcatgtgaaaaaaacttgataagttttttttttttttttttttaagttggtaagtataagcttgatcagttagaatttagaatcccaaactaaatcggattgtaaacaactcagttccttataaatacactcgaatcataattgtaagacaaagaagaagaaaaaaaacaaagtgttgtatccaaacgatgaagacaacaaagattgagagtgaagccgtatgtaagcattggtttttgtatatagcggagttcatcaaagaaagactaagtgaagcgaaactcaaggaatacatggggttgatgaaacaatttaggtcccggcatatacaaggagatgaactcataaagtctcttcaaaatctgtttcaaggagacgtggttctttctcaaatgttcaacgcacttatgaaaacagagatccaagaactgcaaggtaacgaaaatccggaaacagtcgcaagaaaaagaacaaggagtgaagcagagaatgatgatgggattgaagaaggtgaaattcgagaggggcattgcgattgtcctcgttgcaagattggtcgggaagaagcagaaaggcgtagtatacccattaagaaaagaatttgtcgtgggttttagaagattttgttttgttcttaatatcacatgttattcagtttgtgcttttcaaatatttttccaaattctatgttactactcaatttatgttaaatcataaaataacttgggttttttttaatcaaattatattatgataaattttgttgttcttctctatttatcatcaattataaatatatttctaattaatcctgttatgatgatattcaatttcttgcagaatatatgattgtagtaaacaattttgatctttttttgctattaaatcaaaaatttataccaactttatcaaaatcattgcctattcaaacttgatgattattattcggtttatttcaatttttctctattactaacatagtaacatttatctaattaacctctcttccccaaaaaaaatctaattaacctccttggattttccttttttaattatagagtttgcttctttttttttatatataaccggtcaaagcttttgttttgtctcatattcatcactttcgttgttaagacggaaaaaaaaaaaaaagaggcagaaccaaaaaactttagggttcgatttcgctccttggtaatcaccatgtccggagaagaagaagagaacgccgccgaactcaagatcggagatggtacttctctattctcttcgccatatcccccgctgtgtacctcaaaattagggtttctttgcctcatcgaattgatcttaattcaatacgatttaattgagcttaactgtatcgaaaatcccttaattatttgagatttatcatcgaaattgatgggttttattctctttgacaaaagagtttttgaaggcaaagtgcttaatgaactgtgaagtctctttgattcttgagcacaagtttgaacagcttcagcaaatctcagaggatcctatgaatcaagtttctcagtaagtataattgtgtttcatagagattcattgtatattagccatcatgaattgaagaatttagtcagttttatatgttacttctaggttagtgaatcaatgttgaatattgttgaagaagttatgtttgctccttgcagagtgtttgagaagtccttgcaatatgtgaagcgattcagccgctacaagaatccagatgctgttagacaagttcgagagtatcctttttctgaattagtttgattcaaagtttttaagtaatcgttgctttgacatgcttccttcttgatgagtgagattttacagtcactggtttaattctatagttttgtgagaatatgctattccttaactcaacttttgcagaatactaagcagacatcaactcactgagtttgaggtacaatgttaaatctcttgagattggatttttgtttatcaattaagtcgtttcggtagaagacttaaaacattgcattgttcattattgaacagctatgtgttcttggcaatctctgtcctgaaactgttgaagaagcagtggcaatggttccttctcttaaggtaaataaagattctactttttctattcagtggagataataagataacctcaaaaggacaaattgtattgttatgtaagtggacttttgagatgatgtaagcttctcttttgtgtagacaaaaggaagagctcatgatgatgaagctattgagaagatgctcaatgatctctcacttgtcaagagattcgagtagtgcagaagattctcaagatctaagattctgaacatttagcaggatgctttacttgccttctagctgatctggagttaattcgccacgtctgaaattataaagctttaatgcctagaatttctggaatgataccttcatgttaaatgaatgtaatttacaacggatgatccaagcttttaatgaaatataccatctctttttcactaaatcaagtaagggatgacactatatacatactacacctaaagcagctatgtgtgaactgtgaagctttaattccatctcttggcatttttgctggactttgacttctttttggaagcttgaaacgctttcatcttttgcttcttccgtgcttctctctcagcctttgacatctttgactttgctttcacttttggagctttttcttccaattctgcttccctctccagctcccttgctctagcttcaacattcttctccaggaaatactgagaaacagttcaaaacagttcaaaacacaacctagaatgaacaaatttggcaaaggtctatttacaagaggaaactaggttgagagagatttcattacattgtagtctcctgcatagtccattaaaccaccatctctgacttcaataactctgttaacaatctgtttaatgaagtatctatcgtgtgagactgtgatgaccgtgcctttgtactcatttatagcttcctgatgaaagaaggaaacagagaatcagatcatactcaacctccaagaacagtttggcctattgaacagataagagtatggttagagacctcaagcatttcttttgaaggtatgtctaagtgattggtgggttcgtccaacacaagtagagtggatggtttcaccatgaatttgcagaaagcaaggcgtgcctaagaccgcaagaaaaaaggcgatgaagaacatgatgagtattatattgaggataatgatagacattatgttaccttctcaccaccactcaaaagagagacctttctatccaacatgtcagctttgaagttgcaccgaccaagaagagcttttatatcatcaattctccaatctacagcagcttcaacaactgtctcaatcaccgttttatccaaatcttgagcctctgcctacagccaaacaaatgagtaaaactgtattttctgattcctctaaaaagccatttcttcatgatagaacaaacctgattctgctcgaagtagtttggcaatacattgtgctccccaagtatcacctcacctctcataggcttctccaaacccataataagtttcagcaatgtactctttccgcacccgtttggaccaattatagcgactttctctcctctttctatagctagattcgccttgttaaataacatctgcttgcatcagaaatacagatcaaaacacaagcaataaaatgtactaccaacagcatttgactaactatatcatctcaccttatcatcaaaaccaaatacaagattcttaacagtgactacagatcttccacttaatccacattccggaaaccggattttcatttgtttccgctgaaatggcttctctattagctcctcttcctgaagcttctccagtttctgtttatataaacacaaattcaagtaagtttcatacatattctctgcttcataagtactagttaataccttttctgctgaagaagctcgaccagaatttgctccagcacttagcctactaatcaaatcctttgttgcttcaatctctttctgttgcttctcccaagcagcatactgagcttcaaccaactctgcctttgaaattacatactgagagtaattaccatcgaaagtcctcgaaactcccatttcggtttccacaattttagtacacaactgatcaagaaacgccctgtcatgtgatattatgaccataggcacatcttgcttaatcaagtaaccttcaagccactcaatagtatcaagatccaaatgattcgttggctcatccaaaagcagtaaatctggattctgttcacagaatcacacattagcgtagctctcaatacagagttaaaggaatcacatttctcattactactacctgaagcaaaatcttcccaagtgacattctcatttgccatccactgctaaaagaagccacaagcctatcagcatcctccgacacaaaccctaattccgacatcagcttactgattttagcatggatagaatccaaatcaacctcttgagctcgtctctgcaacaaatcgaattcgtctagtaactttcccattagttctaaatcatcaacagcttcttcaatcgccttctgcaagttctcaagcttcctcgctatttccatctcttccttaaacgtacacatgaactcttccttcactgtcttccccattgaaacctcgaactcttgactcaagaaagcaactttcaaattgggtttggcccaaatcacgtttcctgaatcaggttcttcttgacccgttatgatcctgagctgtgtcgtcttccctgcaccgttgacgccgattaaccctactttttctcctttcttcacttcccaagtcacatcctttagcaccgtaatgccttcatagctcttactaatgttctcaagtctcactcccgacgaaatcgaagacgcaccattgtttgattgcttactgatcagcttccgatcggtagataagagagattcgagctctgaattggagctggctgcggaaacgtgagctctaatattggggaatactcgtctagggttagaaacagaggagagtttgaaggtgaaaagtgtagggcaagtaatagtattagtgaagaagaaggtcgaacgaaggtttaagctatagagattcgtcgttaataccattgttggtataaaatgttagacatcaaacgattaaaacgaagctattttgattgttaaagaaaatgtaggttttgattgttaactctcgaggcttctatagcgtgtgagcgaagaagtgtcacgaacacacacgtatgcatgtgaagctcaaggctcataaattgccacgtgtcaaaccgcataaccactatttttctagattaccacgtcaccggattgacaaatcgggcactagtctcacccgtttgtgcacattactttggtttctaggttattattcgtgcattaatcattcaccgatagcaaataaggaaaacaaaacactaggtttatcaatatagtcacactcattcctaaattatattaagtaattaaaaaagcgtcaaagtacagtacttatgtcgaaatcgtacaatatctaaggtaattaatctatgtcacgatcttaagaaagaactatcagtctaaatattatatttccctagttagaatgtctaaattaccttatataccgtttggcttaaaacaaatcaccttatatagtgcaagtgaatcactagaatcttctccgataatcacaaactcgaaaagaacaaataagctttccattatagattaggacattgaattagaacactaaagtaaaaggttagctataaatgcatacaatctatttaataatacattttaccgccttataaatgatgaattcccacatttctttattcttcttcgtccttcaagatttaacaaaacacacaacaacaaaaaaagacgatggtgaaactcatggggatggtatagcgtgaaagatcgtaattttgaggtaaatgtttcttctagtatatctcctctaattatgaaaataaatacattattcaacaatcactaactaaaagtgtaactttcacactttgtgcagagcatatttttcaagataatatacaaaaatgtatcaagaaactaagcaattttatcatttatggctacttgctgtccaagaaagagacgaagcaagagaacatttgaaacaatcactcgtcgaactgtctagattacaggaatgtttcaacactattcttttgtccgaagaccaacaaataccccattattcttactcagaaaccacagacgaaacccccgatcatcaaaaactgtatagttacaataacttctccaacgagtctccttcgcgattctcgtccgcatcgtcgatcgatctcgtctctaactcaactgtctattcctcgccggagacctacgactctgattgttacagcctccggacgttgcagatgggttttgcatttgaggagaagaaagattttgagacccttgtgctggagaatataggactcggaagaatgttgccggagaacggtaagttccagcaagctatcattgaagctggatcgttggttgactcattgttcataaccggtccgattccaaaatggagaaatcctccggttcaaatgttgagtcaaagaccgcttctgagtcattctatcggaaaatggaattatggtggtcaggggatcataaaccggtctttctctggcaaaatgccacggttaagcttgatgccttaagtttcccttgaaattgattttatcatgatgtttaactttttttttgtattttttactagagaatttgatgcaattaatcaaataaatcatgttatctttttatttatttatcatccattctttacagtacaatatgaagtactaaaaacaaagattttaggaagaaaattcgtctttagagccaaagcctcgaatcctatataaagagcataaagataagaattcatattcaaaagacaaagaagaagctaagtgaattttacctcataccttccactcttccagcagtagctactgttttcttgtgtggtggtagcctccagctgcagccactaggcgacgcagcataacttgaatgtgactcaccattcagacctttgtagcactgagcaatagaatccacacggaaaaataagtcagaattttcatcgtctagttcaagacaaagagattttttagagcctcattaacaatataagccataaacctgcatctacattcagaataaagtgtgatccttcagagagctagagatcattttatgtaagacatgagcacctcatttttgtaaaccttgagaaaagacaaatccatctttcagcggcacttgcagctcttcaaacgcacaactcacctacacagaataagagaagagccattcagtttataaagaataagcaataactatatccaaagttttgcgattgttaagcaagattttttgggtcactgttattggaaaaatccactcaatataatgtcatatgagccttgagctttttcacacatattttcgaaaatagaaaatagattcttaacttgccagacaaagtttaaggttaatatataaaggataaaaattgtaactcactgatttgatgcatctgaacttcgcattccatatgggaaagaactatggtttaagtcaatgaatgctgaatccaagtaaaatcatctgaagaaacagagcatacatgaataagagatttaaaaggaatctcgattggaggttgatggtcttcatacctttgagactcatggtatcaccagaaatcactacaagaacatgcaccgtcttgaaaatgatgaaacctgtttgaatcccttagaattatctgtctcccttcgatctttgatatatacttgaaggcagagtggcaatcaccgcaaactctgaggttcttcattattctgattggcagcgtagagctcctctgggctgcgagaacaaaagctacagcgagcttctcgctgtgatagctcagaatctcttccttgttctcttgctctagatcatacaaggcaaatcctgtctgtggcacataacctgcgtctctcatctttctgttgagctccttgagcttcttgtagatcacatcagcgtctgggtgtgacttatccccagcaacaaacatatggactccatccttcatggtgacccaactataaccagcttcctttttcacatctgcatctttcattttctttctcgcctttactaaatcttcccatcttcctccagcagcatacatgttaccaagtagcacatagtttacagcgttttctggctccaattgaaaaagcatttctgctgctttctttcctaattctgcttttcgaccatttgctctgcaacaagccccaagtacagtcctccagatgagaacattaggcttcattggcattttctcgatgaaatcttccaacttatcgagttcacctgcacggcctagcacgtcagccatacatgagaagtgttcaatcctaggagctaagccatatgaatcactcatagattcgaaatgtttaaacccttcttcaagcagacccgcatggctacaagctgacaagactcccacgaatgtaacatggtcaggtggtgtttggccatcgagcttcatagtttcaaaaagcttcaaagcttcttctccttgcccatgtcgtgcatagcccgaaatcatagagttccaagaatatgaatttcttacaggcattgtgttaaaaaacctcaaagcataatctagtcttccacatttggaatacatgtcaacaagtgcactcccaactaccacgtcagattctaaacaagctctcaccgaacaagcatgcacttccataccacgctctagcgttgcaacagaagcaaacgcgctaagaacagtcgcatacatgaaactatccaatctctgacctgtctgcaacataaaccagaccaaatccaaggccttggcaaggagctcgttatgtatataccccgagatcattgagttccaagttacattatctcttctctctgccattctagaaaatatcttctcacacccatccatctccccacacttcccataacaagctataagcgcattttcagtggttgcttcatctgcaatattgttctttaaagctagtccgtgtatctgcttgcccagttcaccaaatgaaagggatgaaacggctgaaagaacgcttgaaaaggttattctattaagtttctgtcctgctcgttgtgcattcaagaaacataccacggcttcaggtaatgaccgttctgaacgggctaaagctcctattatagaattccaagacacctgatcatgctctggcattgaggaaaatatcttacggcattcattgagatagccggtctctgcatacagtgtcataagcgcatttgaaactgaaacattcaaatcaatccccaacttgaggctctctccatgaatctgttgtcctaattttgcccatttcaagctcgcgcatgagcttagcgaactaatcagtgtgaaacttccaggcaagatgtcatgtcgtctcatacttttgtagcgttcaactgcttctatgaaacagccgttttggtcaagaccagtgatcatggagttccaggagacagaatctttatcggtcatgaaatagaaaacacgtctagcgtcagctattgagccgcacttagcatacatattaacaaggccatttccaatgccaaccatgaagtcaactaagccagttgttattacatgtccatgaacctctctgccttttttcagaccaacttcctctgctagagaatactcaggaaatgagctcaggagaatcacgtatgactcaggactaacatcaatcatgctattcatatccataaagagtttagttgcttcttctccccatttctgtcgcaccagaccaaccattagaccatttaaggtgaccgcatttcttgtttccatctgattaaaaaccttcctagcataactcaatgaaccagactttgcaaatgcactcaccagtccgctgccaacaaaaagatctgtgagcaaccctgatttctgtatggtgcacatgatctgctcgagcaaacgaacatctggttcagtcaaagaacaagcagtagttacaagactaccaaaagtgtattcagttggtctagaaccatcatattgcatgctagagaaaatcctaaacgcagatctctgatccccagcctgtgaataaaccgaaataatcgaattccatgaaacagaattcttaacttctatgtcaccgaaagcacagagagcataaccgacagacccgatacatttccagtacattgatatgagcacattagaaacaactgcatccactgcataagaaagtttgaacatcaggccatgaatttgtctcccgaaaagaatcccaacagaacctatctcctgacaagcccgaagaacactaacaaaagcgtattgattagaaaaaatcccttctttaaccatatctctcaaaaacactaaagcttccttatgttctccattacgactatatcctgaaacaatacacgcccaagaaacacagttcctaagaggcatttcgtcaaacaccttacgtgcagaaaccgaatcacccgtttcaagataagcattgatgaggttgttgcacaagtagacatctttatctaacctattcttatataatcgggaatggaagaatctagcagctcctctatgtccaacgcagctctgaacaaaagaaagaggaacacaattagtcattaaaaatctctgtactccaaaaccaacaacagggtttcgtttagtggagaagacttacgtttagaaacgacatgagggaagctaaatcaaatccaaaaccaaaaaaaaaaaatcgcgcgaacacacaaacagatcctcagtggacgttaactggcctaaacgtcgacgtttcataattagtttgtgagacttcccagaattttaaatgggcttatttagtgagcccaatacggaccaataatggagatcaacattcataatattatattactattatgccctcgacatcatatcatttatttctggccaacacggaaaggaaaggataaaaaagtcgtaaatggcattatcgtgattattagacacttcctcggactttccgtaattatctggtagtatcattgctccataaagaaaaaaatgaaataaaaatgaatagtgattgctgattgggtataattcgagctgtttttttgctgtaataatttcacaattctctttttttttcgcttttaaataattttgtctctccatcttcttctcttttgctagtctctcatatcagctaagaaaagaaattcagaacaaaaaaataacacaaagctctgtgtttctgtctatctgttgaatcaaatcatatggaagacgatcgaaaagaggtataaccatctgttttattatctcttgttagtttccccataaagtttctttaggaaactttgattttactaagaaatcgagatctgcttgtttggattttttcgagaattgaacattggttttgtagagctaatcaagctccaagcactactgatactgtttatattgaagattttgattaaaaatcagcactaatcttggtaatcggaaacaaaaaaaattgagttagtagtatattctaaagtttcatcctttttcacatctcgataagctgaaattttgttatcacgaggtatattttctactagtacttggtaagttcgaaactttattggattgataaagaaaagatcttactttaccctgattttatcgatcattgattaaaccaaagcttgtaaattgtcccataaagtcaagaacttgactttgtttcttagagagttcgtcctctttcttcttcacttgcttgctcatgatgcatcgttttgtaaatagctctgtttttttttcctttaagtatatgcttcattatgatttatgaaacctttttaagtttggtaatgtttgtttcgaaatgtctttgtttttgcagaagaacactccgtggctatcagtgccacagtttggtgattgggaccaaaaaggaggaggaacaatgcctgattactctatggatttcactaagattagagagatgaggaaacaaaacaagagagacccttctcgagccagtttaggcaatgaggaagagctcattaagccacccgagtcagcaacatcaactgctgagcttaccacggtccaaagtgaaaaccaacgagagttctctcccagccaccatcatcaaccacattctccttctgtaagattcttcaccattatttggtttatatcatattattccttaattatatttgcattactatcattaagacatttagaggcatattactatattagcacatggttttgtaatcttgcaatctatatacagtattaaaattttgaatagttgtatttgagctggtagtgattatcactgtggaatagatgagaatttggtgtggttgttttttttgacagacgaggagaagtatgttcagctgcttcaactgctgcgttaaagcttgaagatttcttcttgagcaaagtagcagttttattattgacttgtgatttgaatgtggaaatgtgttaatgtcatgacactttaatatatgttccaatccatttttctttttctttgggaaccatataagctctattacaaggaaaagattatgggggaaattaagtatacacaaaaacataatcgtctctattagtacactctctgttttatctaaggaaaaacatggacagtgatccgaatgaaaagtattactggccacaaaaacataatcatctctttgaaatatgcaatgggcctgtagagacaaacaaaattaaaaaggcctttttgtttttaaagggctttaatgggcccaacaagtatcttcatgcaaggagttggagttaacatttaatttaggattgaatcttgaaacttgggtctaacctgacctgaaacattaggttagagtttttcggggcttaattcgaccgaattcgaaaaggtcctagaagcccaaaataatcgaggtttgtttgccaaataggaaaaatcaaaaattatggaacgtttaactatgtttagtgtaagtttcttactttatgttttaaatttcaatatataaccatttgcattattttaaacattttggtttagttataatatgatttgaaaatatatgacaaaaggcaacattgattttatttcaaatacgatactttagcaatagttattatgagagatatggatagaaaaagtggagattcaaacacatcaacgttatattgagttaacttgtatgatgtgtgatgttccaaagtatgaagtatctcaataattccaatagcatcgtattaatgtgcaagtttttaagaataaacagaaaccgtaattttccaagacacaaagaaacatgcacatggtggttgtgaatttgtatagaaaattttcactttcttgattcgaagtgtgtttggttttcttactttggcatttgaattaacttggatttgaagcaacaaaaatattgattgagataaaataaaaacaaacacatgcctatcttatagtcctatttagacagagatcggagtagcccaattgacatgtctacactctgcctaaattatatgaaaagttggcccctactagcatgacgacgtggcagagatgacgaaattgtcgactgtcaacatcatatgtttagtcttgtttcagcccaactcccatgtccctacctgccttaggtttatttctcgttacatttatgaaaaccaaaattttaatagcaatggtgtaaaaaagatgcccaaaatgctgaatataaagcttaacctacacaaaaataattattgatagccgactagctagtgatatagttgtttgggggtctaaagattttaggataagccgattacgattagaacaccactataaattgttgtccattgatgtactttgtaacaatatgttaacgtcattcaaatatatgaaatcacggacttaaaatcatgaattatacttgaattaggatttaaaatatgtcatattctcgttgatatcatgtttctacctttattcttgcgtaaacaatacaaaacatgtggacgaccaaagccttttccattgcttgctttcaagaagtcagaagggataaaacgttctgaccaaatcagacggactctcgttcaaaactgacacgcttgagacaacattacatagagaaactagcttgtcagtgaggtcaaacgttcataagatagtttttttccttggaaaatttcacgttacggtttttatgattcacttgtcgcattaattatacaatcttggtcttgttgagatcatgttttataccttagttatcgtgccctttgaattatagctaccgtttcaatttatattagtcccatcacgtatcattagattttccttacaagcctgaaatatccaaaaatactcttcattaaaatggtaattacgttagattaacgtgaaatttgtcgccacgtcgtagaatgtatacgtagctcattaaagatgcatacagttttagtattattacctgaatcttagaagattgtgaaacaaagatcgaatttctaggatgcatatagaaaggtacaatgtactttgagtacttaggggacattaagatggttcatgtctcctatcatttactcttatttgtcgacccgccccattccctgccaaacctcccttcttcaccattcacacttttttcttttctttgaccaattgaaaaattatttatatacattaattaatagttaaaagtaaacaaaatgagaagcaccaatctattttggttaattttccatttagatgtaactttcatgatagatgttgagattcaaacctattacctaatatgttaagcatgaagaatggatgatttggtgcatcccaacctcggcctctaagattccacaacggattcctctaactttcaccaatttgttaggcttttttattcaatattttcacaagcattatcttcaaagaaaacggtaaacgacgagctagaaatatgcaacatacaaattgcatgagacgtttagttaactggttttctaatgtgatttgattgtctcttgttcttattattaaagattatatattctcgtaaatgaaaattgttttatgtgaaacggcatttgcttaatctaacgcctaagtaaaaatctagtgttctacatcatgtgttcgaattagatctatgttcaaaatgtgcgatgtgtttttacatattattattgtatatactactgactacagtttgtcgtagtatacgtcttatagaaattttgattgagcattgaggagttcttttgagtaatttgtatgttgctatttagattatgtatttgcaaattaaattgttagatttgtacgtcgtaaacgatataaatattttaaatatgataagtgataaataggaaaccatttccattacttaacatcattgatacaatacaaagatttgaatctcacgataagaattggttgctttctctattaggatcactataaaaacttgtgatcaacgagttttaatgaataatatcagtattttttgtaaaaaaaatagcgataaaaatattatattaatcgttgattaaatataatatattgttacgatcggataaaaaatattaatttattaatgatcgatcgataaatctattatttaataaatagattatataagacaaataaatagattatataagacaaaaatggtcaaacgatattaaatataaataaatacatacatcgtgtttttcgagttggatatatgatcgttaattaaatatattgttacgatcatataaaaagatcatttcttagtaatagttcgggatggattggtgttgttcctctacgcctaggacaccagaatatcgaaccatgaatatcaatcgataaatatattatttaaataatcgcttatatacgacaaaaaaaatcaaaatgatattgaattaatatagataaatacatacacaaatctggatgcgatagcaaaaacctagaacgtctatttttttttttgcatttcctgaatttttttttaatcagccatatactcataagttttacaaaaatgtctcctttatctcatccactttaaaattacttattcatcaaattttaacagtagaagacttaaaactacagtttcttagcaaaaaataaataatttacatagtccccaattatatacttcgaaaactatatattactaaaagctcaaatataatgttcaattatactctcatggaaaattataattctgttctactacaaactcaaaaaatatgaagataattaatcagggcaagtatctcgctgcacgtcacaactatctaaagccatcgatatctataaccgactaatattctttcttctctaaagaacatattcattggtttgtcctttcgtattctctaagccgaaatatacggactcattgaattcttttttcggtttaacgaacctcattgaattctcacatcgatgcaaagtaacatcacaacccaagaaaaaaacggtgcaaacataattaaatatagctaattaagaaaaacaaaataaaaatgccgaattcattgtcataacgccctctttcacacacatatctttcatttcatccaacaccaaaccaattcatgcgacccacctcctccctccacgtgaatctctcccaattttaaccttgccaattttcctatattttacatcaacattacttatatataaacgggataaattatatagaatcatttcaaaaccgacgtctttcttcccatgcattgcgcatttaattaacgctgccaaaacatacatgtggatatatatatagtttttttatatatagatgtacctttaccttcaacttctccattgttcttctccaagtacttctctcttcaaccaaaaaaaaagagtactttccttctcataggatttttttgctttctcttgaaaaaccttttgttattgttattggttcgtacgttgttcattatttgacaagaaacaagattacaaaaaaaaaaagtacatcaacccaaaataatggagttgatgaatttggcttcaaaagaaacaagctattggatgattgcactgcctgccggttttggatcccaaaacctacatgatgtttccaccctaggctatctattccttgccgtcgtttttctctctatagtcacgtgggctctcgccggaggcggtggtgtcgcttggaagaacggccgtaaccggttgggtcgtgtcgcgatccctggtcctcgtggcataccagtattcggcagtcttttcactctcagccgaggcttggctcatcggacgttagcagccatggcttggagccgagccaacactgagattatggcttttagccttggttcaacgccggttatcgtggcttctgaaccaaacatagctcgtgagattctgatgtcgcctcacttcgcggaccggccggttaagcagtctgctaagagcctcatgttcagccgagccataggtttcgccccaaacgggacttactggcgcatgttaagaaggatcgcatcgactcacctatttgctcctcggcgtatcttagcacacgaagctgggcgccagctagactgcgctgaaatggtgaaagctgtgtcagtggagcaaaacggcgctggatcagtcgttttaaggaaacacttacaactagccgccttgaacaacatcatgggaagtgtttttgggagaagatacgatcctctggctcagaaagaggatcttgatgagcttacatcaatggttagggaagggttcgagcttttgggtgcttttaattggtctgattatcttccatggctcggttatttctacgactcaattcgtttaaaccaacgttgctcagatctcgtccctcgaattagaaccctcgtcaagaaaatcatcgacgaacatcgagttagtaactctgagaagaaaagagacattggagattttgttgatgtcttattgtctttagacggtgatgagaaacttcaagaagatgacatgatcgccgttttatgggtaagaattcgtatgaaattgaaatagtactagctagtcacattaaatttaacggtatatttgtaacgatctagttgtaatgttttttcttttgcatttagtgttgctaatattttattttttaatgtcaatataggagatgatttttcgagggacagatacaacggcgttattaacggagtggaccatggccgagctagtactgaaccctaacgtgcaaaccaagttacgagacgagattttaactgctgtgggcgacggcgccgacggagacgtggcagatgctgacctggcaaaactcccgtacctaaacgcagtggtgaaggaaactctaaggctgcatcctcctggaccactgctttcatgggctcgtctttccacgtcagacgtccagctcagcaatggcatggtgattccaaagggaactacagcgatggtcaacatgtgggctataacccacgaccagactgtatggtccgacccgctaaagtttgacccggagagattcactgggaatgctgacatggatattcgtggtggggatctaaggcttgcaccgtttggagccggtaggagagtgtgtccggggaagaacatggggctagctactgtgactcggtgggtggctgagttggtacgacggttcgagtggggtcaggatcagaccgagccagttgatcttggtgaggtcttgaagctttcttgtgagatggagcatccgttacgtgccgttgtaacggaaatattttaagtcaaaaaagggctaagtagggttttgatttttgtcaacgttttggttacttataatttttaatttaacgtttttttgttgtcgagaggtatgaattgcagaatgcttgccgttttagtattttatcgagagtttttttttctttcaattggtgacatagtgatttggtttgatatgtagtatcaatgtaccattatcttgtgggtctaaaatctaaatggagtaatgagtaagagatatcaattttggtcttttgttcttgttatgactttgtctacatactttgatttacatatttctaaaaatatcgtaatactaaatattaacccgcggtataccgcgagcctatatttttattaaataaaaaataattaaatattttttaggatgatttaataaatttatgttattgtttgatttaaatgtataattcaccgcgagacgacattttataactcaaattttaaagttttaagttgtatttgtttattttgttaaatgtttaatattgtataattgtattttgattgttgtttttcggatttcacccgtaatacaccatcccatattaatatcgaatcaaacccgtcaattctaggatttcgcccgtggtagtatttaattgtataattatattttaattgtcattctaggatttcaatcctaattctatcgcaaattattatcaacccaaaccagtcaattctaaaatatcacccgtagtacaccatcccatattaatatcgaatcaagtccgtcaattctacgatttcacccgtggtagtatttaattgtataattatattttaattgtcattctaagatttcactcataattctatcgcaaattattatcaacccaaaccagtcaattctaaaatatcacccgtagtacaccatcacatattaatatcgattcaaactcgtcaattctaggatttcactcgtggtagtatttcattgtataattatattttgattgtcattctaaaatttaactcctagttctatcgcaaattcttatcaacccaaacagtcaattctaaaatttcacccgtagtacaaagtttaaatatttataatgtttaaatttcttataaaagaatcaaaatgtgttttaaaaaaattaaagttttaagtgttttttttaatattgttaattttgtttagtgtttaagattatataattatattatgattattattatatgtttttttccatagcatactatcccatgttattatctaatcaaacccgtcacaccatataaccccgtcccgtgaaattaaacacaaatttgtcatcttattataaatttcaaatatttataaaattagaaacttcaaaaaagattaatattgacccaaacttcatcattgaattttgagtgttatatctaagatttctctcgcagtatatcgtcccgtattaatatcttttatattgtttaaatttcttgtaaaatttaatttataattttttaaactttttaaagtttcaattttttaaaataaataaccctagtaaacaaaccattttaattttggacacctcataaatcaagtttcatgctcattcgtaatcgaaatcattttggttctttttatagtatgactcttgaccattttccaattttttaagcaatgtgggacattgtaaaatcgtaattattatccacccaaatccgtcctaccatataacccagtcccgtgaaattaaacataattttgtcattttcttataaattttaatattataaaatttgaaacttaaaaaaatacaatagcgacccaaaattcatcattgaattttgattgttatatttaagatttttcctgtaatatatcgtctcgtattaatatattttttatatatttataatgtttaaatttcttgtaaaattcaatttataatttttaaaactttataagttttaaaattataaatatttaaagcattttttaaagattttaaaattataatatttaacttttgataaagttataatatttataatttcttgaaatattttaaagtttcaattctttaaaataaaaaatctgagtaaaatcggataactattttaattttggacgcctgataaatcaagcttcctgctcattcgtaatcagaatcattttggtccttttataatatgggtctgaaccattgtctaatttttctaagcgatgtgggacattgtacacatattgtttcttcataagttgaataatatatgtccgttttaaaaaatttgaattacatcatattcagaaaaaaatataatattttattaattatataaattttatataaattcaaaataaataaagtataagatcaaataaaaatgaaagaagaattatatatttatgtttaaattaggtaaaaatattttaggaaattagttaaggtaaataagaaatatggttagtttagagatattgtttatattaaatttggtaattaaatcattaattttcgtttttaattattagttgttaggtaactttttcaaaaattaatgttatccaagatcagaacagaattaaacatgttattcaggatccgaacagagttaaaccgggtaaaacccacccatttgaattaattgttgaattatggctcaaatcttcaacattatcttcaaaaatcccctccaaaaatgtatatatagatttgcacttgttttcctaaaaatgagatattttagaatcaatatagaaacaaaccggatgggacatggacaaaacatcgagatggttgtgttataataattataaactggacgatctaaattcaatttaggtgcatatactcggtaatttctatccaaatagatgttgtcattttctaataattgaggacaatgcaaatgatatcatgtgtactcattaatgtatttaacattagtatgcatatttatgatatttgtgttgtcatatttataacgattctgtttgtgaagcccgttcttatggctaaattataaccttttcaaccatcatttgaaaccattgaacacagcacatagaacaagaacaagagcaatggcatcacactctaattcagggatggcgctatacacacactcttttggagtgtttggtctgtcggtggaaaaataatttggaagtcaaaatcagtgaactgatttaactctgtcatgctaagacaaaatctgttaactttgctggacaaaaacaaataggctcttagtaagctatgatgatggcgaaggattccaaagacagtgacgttgcgtacttttctctaatgaatagatatttacatgacataatattttggtattggatttgttgtcgagtataattcagaaatcaacgaaagcatgccctaatatcacaatataaaattttaaatatgttatttcaaaacctgattttaatttctctttaaatacatgcatatatatatatatatataaatctattatcacatacaaatttaaaaagtttttaaaaacattatcgtatctttagatagcgtttttcctaatgtgaaaaatacttgtttcctctagtgatttgatattgtattttgaggtaaaatctagattaagatttcatatggtattaaccccactagttcaaataaatatgaaatgagcttaaatttaaaatttagacctaaacagttttatctaaactatttcaacatactatttcaaccgtcagtgtcattttttctcttttaatcacacgattagattaacataaaattctatgattggttgtaataagagttaaacttagaagttgttttatggaaagtaagttgtaaaacacgtttatgattggtcataatttaacatttttcgaaaaaaaataaaaaaaaattcacaccacttaacaaaaaaaaaaaacgacatcctaaattcctaatgaaatctgaactatccgtttcgaagtctatagtctatactatttatacatccttagggaaatcatagtgaacatggcaagatatgttaatttacatgatgtctacaagtccttgggcgttaaagttttatacttaagttataactataagagagagggaaacaaaagaaaaagagtgagagaaaacagagaagtaaaatggaggtggagaagtcataggtttcgtcgcagagagtctgatgatatacatgtataaattaaagacaccgaaacctgtgcaaggagacgtatctctgaaacttggctcgtgtctttgtctcttcactatttattttcagacactgacttctcactgcttttaatttagtggctgggggcagccgacaattcttcaggtgacattgacccatctctcttttctttaatgtatagatttctctattactgacctatattgattaaaatatgttgatagaacaacaagttgatatggccgagttggtctaaggcgccagattaaggttctggtccgaaagggcgtgggttcaaatcccactgtcaacattacagtttttttgttttgttttgttttgttttgggcttaacgataagttcggccccaatttaattgattcgattaggcccaataattggcttgtttgatttctcgttttctttctcaaactcaggtttgattggttcgtatgcaaccatgttcgcggacggttttggctgtacgtgattttagtaattcggccaacatgattattatgtgtcatctcttatttgcatttaggatttttttttttgccgaaagacttgttgttatacttagtgcgtgaaattattcacctttttgaaaggcttatccccaaagattaaattattattagtaaaggccatttcacgtgctttgcttgtgtgctgaattcaatttatcaatctatggatgaattgaaaactcaagaaagtcaccaatagtgcattgaaaagttttggaaatctgagaatagtgaagaaatattcaaaagcttattactactattaattttgaccgaccgacaactaatactaaggtttagaggtagacatggagtatttctcgtgacaatgttttaaaaaaaggacattcgaagacatttgagacagaagtatcatctcactactcaaatacaaatctaatatatcatccgagttccgacaattagagtggatctaaatggatgaagagagacgagacgaagaagaagtttctcatatttgtatcccttttcaattcttgaacgaagctctcaagaccttcctaaagtgtcttggtctccatatttctccttctccttcaatttcctcggcatcttcggtaagcatttgttagaaagccatcgagaaagaaagttaaatagaagatcgatattatgcatatcatacaaatttaattgtagctcatgtatatgcatgtcttttcatatggacgttaatacccatttgagaaataatatatatgaggagttttttttaactataagtttacaaatgtaggaggaggctacacaagacgttgtgtcaacaaggggcggcgtgatagtcaaatcgaagaaagccgcgagagagctacctagctccggaaagccaggccgccgcaactaggagtttgattggttttcttgcagccgccaataaaccctttattaagagatgattgcggttgcaagtacttgactcataagtcctaggctcatagcatctcatattgatctaaattaaaaaaagttttgtttttttaagtgtttgcagtaacgaacattagtgacactttttttttagtgataggttacaataataagtttttctaaatttatgccaaatttgtcaaaaattcccatctttcaagtttcaacatgatctatttatcttctatcaacaaatttcatataaaaaatttctatacttttttttgctggtatcaaacttttctatacttgatacgtacgtacacatataatagttgaatttttgactaactgtaattacggtaaatattaattagtttcacacatgcacccgttttcaactgctatatatgttaatcgtataaatcgttagtaaacattttttttcttggtaaggatcgttaataaacattttagtaatgtttatattcacaatttaattaaatctattgcagcagctggttttaatttgttgacatcatcattagaatattatgttagcttagctcgtgggtcatatattaatcaatcataattactcggcgtttgtaacgcattattccccttagcgagacatttttgtcgtatcttattgttatatgctacgttctataaacatatccctaattattgtgtaaatagtcaacgtttgtattgttacatatgtacatgtaaatcagtaaataatgactcataaaagtgcaaaatcgtttgatgattagaccaaaaactgtttatcaaattacgatttatgacaatataatctaattaatgttattatactttgtttatcagtattatggattgttttcacgtttcaaattcggtttatattattatgatcaccacagacgagtatatagtattcaatttcactactttttttacacgagtacaggacataaacaaatcgtaaacaggaagatgcaatataggaatagatgcgaccgataagctgttacaatcagattagtatatttaattatcatattttagttataaccactcaatgtaattgctgtaagttgactaagaagaaatgatgagtgatttgaactctatttatgacccaatctcttgtagttagaagaaagaagaaaaaaaatggagggagagggaagaagagaagatggagattgctcttatctctgcatcccttttaactccatccgcgatatctttcaatcgttcttcactaggtttcgcggtctaactcctgataattctccggtgacggtgagtaatatgaatcaacaattcttataagttaatatgcacggattcatacaaaatagatttatgatcacttctatcaaaagcaattttctcgttttccttttaacgtgaaattcacaatcctatatcatatatattaaaacgatgattaatttgtttaatattcgtcagtgttatgaagtaaatatttctgataactgtttgtaatttcggagtttctttaatcgttattttttgtattttacaattttacatacttgtggaattttgaataactatttgccaaatgatcatgttcttaatcgtgattaaatttactcggatgggtacgatattaatatatggtagttggtacttgtataaagaaaatggtaaatggtttcttgagctcattcatataaaatcaatcatttaaaaaatcaaatacatgtttcgaatccgtgggctaatttatgaaacttgatttggaaactaagtctaaagtacgacatgaatgtttttttttttgtttctgaattattgtcacatctttcttttcaatatgaaatttctaatggaaaatgtgtatatgtaataatgttggtgacgaagatatcacaagaagtagaggaagagacagaggtagtgaatataccgaggagtgtggtgtcggggaacgttgcagcgcgaaagggtaagcagcaaacgagttccgggaagggtggaggtaccaactaggcaccttcctaattttagcttccacaagtcttcgtttcaacaaaaagtcaacttcaacattaagttaataatattgttaacatttacaacttctcaagcttatgtatattgttataagtatcttatattttatgtgaattatgtgattattgactgtttgtaagctctttgagtcatttcatgtatgaataaaagataaaagcaaattccctcttatgatatatgaaaaagttgtaaaagaaaaaataattaaataaggatgaataaaaagtttgggattgtgactgtaaataatagtgctggctagttaagattgtgattcagaactacagatcttggccaaggtgaataaaaagtttcacaaatgggcacaagaatgtaaaaagacaatgagttagataaaaataaatcaagattatttgttgtttttatttataaataataataaaagttctaattgttttactgatatgcaactacaaaactgtagagtgagtgggtcattcgtacgcaaaccaaaatattccctttatctgtcccaaaatgaaactaaactccaagggttttatgggtttgcacagttggccactgatctctgcatctgaaattcaaactccacattttccattgtatgtgaatacatgattaaataaaaaaacaattttgccaaaaaatgaaactaaacactctacaagtaaggcagcgtaacaatatcttttaaagaataataagaaagcgattttgtccactaccttgaatatttttatgtcttgatttctatagtagacttttttgataattcccaaaaacagtgatatttattcttttaaattaatttatatatttttgattgaatagtttgataaaacttctcacagctagtttatatatagaagaaagatctaataagataaattaagactttcatcgatcattggccttcaaaaccaatttgatctggtcaaccttattgtaagtagagcacatgtgtacatcatgttgaaaaacataaataaatagtaatattttataccgaacatgcaataatacgaaaagacgcgccaaatgagctgttattagtagattaatatatgtaattaccattttataataattagtgtaaattactaaatactgatgagcctatattaataaactcaagtcacacctcagtctctcacttagctctcacgaagcagaattgaagaaaaacatggagagaggagtttcttattatctatggattccttttaagttcatccaccaaactttcggatctcttttactcaagcttctcggtttgcgatctccatctgatcatagttttccggtaagtgatttctgtgataaacgaccataattaacattcctctgtgagcgttcatgtgattagatctcgtcgtctcaagatgatgagtttcatatattggattgagctttggtaaagatttttctctttcggtagagattgtaactcttgactattgaaggaaaattagttgtcaagattttgaatgtatttttttttttttaactatgagttgaacgattttatggtttttaactcttaactcgaaattaactactaataagtggattagtccaaatttcttatatattattctaagcttcaaacttcatatatgattgctaacacgcattgtacatatatatatgatggattctttaggcattcatatcgacaaagcttaatattgggttggtttggttagaacaatttcggatcggatcctatttacgtgaagtcatatcttatatcttaaaacaagactgtaactactaactagtgagctgcatgtttttttggtggtctagaaaaaaaaacttgttaggtgaaacttaaagggattttaactttagttagatgctgacacctcataaagaatagatcatcttcagttcttgcgctgacacatcaccccatcaactttttttgtttatttgtatgtatgcttaaagatatatctcctttttaatataaacttcaaatttatcacgacaggaggatggggaggaggaagttaaggttgtggaagtgtcgtcgaggggtcttcccgggaaaaagaatgtactaaagaagtcgagagaaagttccggcaagccgggaggcaccaacaagaagccgttttagtttttcacttcaactaataatatttgacggagaaattcttccttacattttcatctatttagtgtaagatctaagagaatagtttcatatttgtatcgtataattcctgaagattgcaactcctacgagtcctttattttttttctttaagacaataactaaagagagacgtgaatcatacttaatttcttgtgagaaacttgtaaaagaaataaccgatcatatatcatcttaagaaacaaacagatcaattcgatctcttacctcgaaaaatgtagaaccaaataaataccttatcataaacaaaacaaaaaagcaaattaaataactaattggttttaaaaaaattatttgcatgtatattctagagtcatgtggtggtgtctcgctctcagtacatatatccaagaaagttgaatgaatgatgaggtgggacttgataaataaggaaatctatttattatctttcggctttggctatatatacacctacccctcgaatataaaccattaattgaaaaatacaaatggttgagacttgaatgttcggaatgtaaaaaattagagtttagagcttgacataatttgaaggaaaaaagacaaaaagtatgtatatatcgattaaggaaaacttaaatgtcatgatgccaatcttagtcgaacaaaaaaaattcgaattttaggacataacttatggaattgttggttttcttatagcctcagcttttaacaaagaaagagacggccactctaaaagatggtgcaatgtttttaaaaagagttggttataattcaccgctttataatcacagtttaagcatatgattgatcttttggtgacaaagaaaatttgaggagaaagtcacatatagaggaacttagaagatagcgaagatgcagcaagagagagatcacaaaagagattgttgcaagctcatgcctcaaactgtcaaggctttcttcaagtgtctgagattcagacgttcttcttcttcttcttcagacatggtgaaagctagagcaagaaatgtaaaaactgatcattctgtctctcctctgtaaactcaaggatactttctttctgctaagctactattatctttttttttttgtgtgttgcaggaagagaaagaagaaccttcatctatcgaaacttcaactaggagtctcaacgtaatgaggaaagggataaggaaacaaccagttagctcgggaaaacgaggtggagttaacgactacgacatgtaactagaatcttgatgtagaattggataatcttgtttggtagttactctacaacatactttctttgcatctcatgaatcatcatgatatattgatattaatatcataatttcaaatcaatcaaattacactcttaagctagaaagactcaagcggactctgaaaaagggtaaagagaaaagtggcatctgattgatcaccttctaggcttctactgcttagcacgctttgcaagataacttgtagtgattttagagaaacgagtgattgtggagaacaattgccataaagagcgtcccttaacaacaccttctctaaagctcctcgcttgtttagccaacattggttctgtttcatctgtcttggtttgacgcatcacctcctgcattgaagctactgatgaggtaaaaatggagttaaccatgaaagtccatagttcgaatagaagagttcagaagtgaaaggtcagacctggattcatgtttgttaaccgtcttagtctatcttcagctacacgaatagcccgtgtcgagcttttaacaccttgagtgataccttggctacacaaacactgaaagagttacaaaacagatatgaagaaattggtaatcatcatggtgggatgtgagacaaaccctaaatcactgagctccatagttaagtcactgatctccattcccgataaacgaacagcagccattgtatctggtagctcttctctagttacatccaaaagcttttcaagagactcagctgctttcttgaaagcctttctcaacattccaaagtaaaactcaaatcaaccttcaaaatccatcaaagggttgaagaaatctgtaaaagcaaaatgttggagaacgaaccagaagagtaggaatcgcagcaaagaagagccacgatgctgaaattgctgtctgcaacagaacccatgatgatgattgtttacaaagtgacataaagtccagatctttattgagcaatttgaatcaaaacctaaatccaagagaggcttaccacgcaagcgacgacattgagcaagacgaagtgcttctgtgtgaatgtccattgagagagttggagaggaggctgtcccacggacgatgttaattgggaagagatcgatggctcctgaggattcgagtacaatgcagagggagtagaagatgcgattgagtctgaacccttggtcaatcgtgaaatcggtgaagctagccggagagtgacccgtcggcgaaaggagagatttttatcgatgaatccgttatggagaatcggattccaagagattagagattggggtgattgcaatttcgaaggcgagaataacattgtgaatggttttagctctattcgtcagaaaccattgttaagcttcgagtcgacgataacaatggatttcagttgtgtcagcgagaaaatttgcgtcaagtttagaaacaacaatatttcacgaaaagtcctctgtttatgcgttaactattgaaaataaccccattactatcatttgagttaatttgaccttctttgcgtcatatgcaaaatcggaacaccaccacattggtttggaggtttgtgagctacaagcctataaactacacgtagcacctccctatgcacgtgtcacatgaatgattttaagggtttgggctgatgtttgagctataactacatatatacatttggtttgattcgtttttcttacattatagtttcatcaaaagccaaagcataattgatggatcaagtactctactcctcttacatcataaaaatccctgtaatatcacgaatatcaccatcacaagctcaacttacgaccaggctcaataacacgacttattttggcttgtcatcgtcgagaggcaattttgggaaggtgtttgcaaaagagtctcgtaaagtgaaactgattagtccggaaggtgaggagcaagagatagaaggaaacgaagattgttgcatacttgagtctgcggagaacgcgggacttgaactgccatactcgtgtaggtcagggacttgtgggacatgttgtggaaagttggtgtcagggaaagtggatcagtcactagggtcctttcttgaggaagagcagattcaaaaaggttacatcctcacgtgtatcgcacttccactagaagattgtgttgtttacactcacaaacaatccgatcttatatgagttacacatgcctgccttgaacttttgaaatctcagtattaaaatatgtatttcagtatttgatgtgttttgatgtatttttatgtattgatatcattttacatacgttgattcaaaatatttaaatcggattccacttacaaaatcagactagtaatgtatatgtgcttcgatcatctttgttcagtagttgaggcttttatccccatcatgggtctgtaattggtatcaaatatactatataggcccattaaggattcgtaagatatgggaaataacgttgggctttatttcgtcaccatgggtttagttgttgttgttgagttgtctttttcgcatctggacggatattgtccgtatgaatttcttagactataaagattaaatgtaatttcaaattattatttgatatacttaattcaattttataaatttaatatcttcaaaaaagtttgtgtccacaatataacaaatgttatcaaagcaaaaaaaaaaaaaaaaacttcttctaatataacaaatttccctaaatagcttgcaaattatctgtaaacatgatgaaaatattaaacatgatgaaaaatattaaattatcatattattcaaaaaataattaattagccaaaagctatatatgaattttgggccttacaataatattttcgcaaacggcgcctaaataatttgggggaaaaaatcaaaaaccctatttccttttcatgaagagcgctcgttgaaatcacgcaataagtagaacacatttggacaaaaagaaaagataaaataaaataaaaaacaaaacccccaaatttgtgtctcctccggaaaaaaaattcgaaattccggatccaccgccatcaatccctagctttctctctctttctctatcttcgccggcgaaaccagtagggttgctcaattcgttggtagagtactgtggcaatgaagaaaggagcgaagagaaagggtgtttcgaaagcaggtcgcaaagctgctgttgcggagactcagaacgatgaggtgatagaggagacgacgaagacgacgcaggaggagagtcaacagcatgaggaagaagtcgtcgacgaggtgaaggagaatggggaagaagaggaggctaagggagatcaagaggaagaagaggatgcgaaacctgattccttagaggaggatgaggagaatcaggaagatgaggtcaaagctgaggaagtaaaggaagaagttgagaagaaacctgttgctcgtcgtggtggtaaacgaaagagggctacgaagaaggatactgagattaaagatgagaagaaacctgttccgaaagctaagaaaccgagagcggccaaagttaaggaagagcctgtctacttcgaggagaagcgtagtctggtatgcttttgttaaccttagcttgagatattatgtaattataattaggattcagcacttatgcaatatggggttagttatgctaatttgatgactcgaaattctctgtgaaaacaacaatgagatacgtttttggacctgtatgttcatcttatagcttaacttataatgtggatctgtttagtgttcttggttgcaagaacgatacacaagatataactttgttggtggctttatctatgagagcaattgtgcgccattatacttattgtgtcagatatagtatgtcattccaaatgagtggtgtggtgttatctcattatcaaaaatatcttcaatacttcagtatttttaagttctaataaaagaggttgtttttctggtcttatttcttctgtgtatgttgcaaattaacatgtgcgcttgttttgtgtgtttcaggaggatttgtggaaggttgcatttccagtgggaactgaggtatattgtttttgtggaatttggcttcaacatcagagctactgtttccattgatagtccttgcttatgtttgttacattgtgatggcagtgggatcaattagatgcactttatgaattcaattgggatttccaaaatcttgaagtaagttgtttggattacgttctctattgtttagttgacatgttttccggggtggacgagagtctgatattttcttcatttgtatgtcaggaagcattggaggaaggaggaaagctctatgggaagaaggtttatgtctttggctgtacagaacgtaagctacttctctcgctttttttaatcttgctttgattataggtagtttactgtcttcttatcgtttgacttgtctaaataatcctcggctcttgtggttctttctaatttacttcaaaaatctatgctctcttccttttcttgaacatttgcttcttgttcttgtctaagtttttctttttaacgttacagctcaactagtcccctacaaaggcgcaaacaagattgtccatgtcccagctgttgttgttgtaagttcttgttctatttaagttggcttgctgtcactgatctctgaatttcagatc

SEQ ID NO: 707 - DNA, 79590 bp, Arabidopsis thaliana
gatcattttagctttcaattcttctgtttattatctaaaataaaaaggtttaaaaaaaaaaaagaatataaactattacactaatttttatgtatgtattatagagttacacataaattttttttaaaaaatctttcgttaaaaaccgttacactaattctaagcacaaattgaaggttcaatgtaaagtataaatgttataggtgaacaaaacatcaatgtttaacacaaacgcataggctataaatgcaagcataagcacaaacacaatagactaaacaaaagctcttaataaaatccacaaacatgaatttttagggtttcaaagctaaaacgccaaacacaaatgtatatttcttatcaaatgtatgtctcactcatgtactattttaggctcaatcagctcttgcaacgtaactattcgattcgtgcttttctttaagttttgaaaataatattgttgagaaggatccgatccgtgcaaagtaaaatgatttgcgggagataattatgtgaaataaagtggttgatgatcccaaaggcaaaaaccccaagctaccaacctttctctttttctatgtatctatcacatgctttagatccaaattttcatgaatgctaacactttttcaatataatttcattttttcatttctttacacatttaatattaagaaaagctcataatttatttgattaaggcttttacggtgaaatggaaatttagggcagcacagctacaaaatcaacaactatacacatgcctatacaattggtcataattcactaatatgatgtgcatataggagcagaacattgtttcgaaatcatattttttgtccaataaattgaaaaacacgctacaacattggtccatcaagtagtattcatgtagaatgtacgtttgactcgcttttcttggaaaaaaacctatctttaaaatagttatgtttaatttcaccaaaacaaccgttttgatatttttacatgcatatgtatatgtgaaagtaacacatgcatgttgtatatatcttatagtataataaagcatgttgagtaataaaacatcgaatcgatgatatgtacgtaaaagtgttttgttgtgtataaaaagaaaagaaagatgggaaatcgagaaattcgatatccaaatgagaagcaaagggtgattgatgaggatcgtgaatggacacattaaagcttaataaaatcgaaaataaatttaaaaagaaaaagggtaattttaaaataaagtgaaagtagtatttgtagcgatggatgaacatgaagtactgatatgcttccatgggaacagagaaagtcgagagcttttgctttacttctcttttttcactttgatcatctttaaaagttccgattacaatcttctccattacttctcgacaataaaaactaatacttcctacacggacggtctcacgtacacatgacccattttcagttccgtgtcaagtcattttgatttttgtttaaaattgttggaggttgataccttttagtttaaatattgctttgtaatgttagctttatcatttagttttgattctataggatattttgcttatatcaaagtaaagtgtatttatcttagatttgaaaactttgctggtgtgaggaagtttttaataagggtaattttatagctataaccagacttctaatacatgcctctttatacaatataggcgaacaattcaatattcaaaccccccaaaggcccaaagcatgcatatctatttgcctttggtagtgcttgttttgcttgctcctgctaatattccttgactttaattctataactgaaattactgtaaatttataattgagattaatattttaagaggagacttatcattttatcaaaataaatagttgtatggttgctttttatatcatcacaaatgctactttttccatactaaactagttaaacaaaatgaatagttcgatcatgaatataccattgcgtatttctatccaataatgcggcggattaaattattccgtcaagcaagcttattgcttgttaccaaaatcaacaactaagtatatttaacgaagtagatgatttaatcaaagatcgtgccatgtatttgcacacaacaaaactccctcaaactcctaatgattgcacataatacgtaatgaattttaagtaaattatgttgtattaagataagtggatgaggattacgcgaataatacacatatacacataaatattgcataagtttcacatgtgacatgtcgggggatgtaaccgttcttgttggaaaaaatgaatttctctgaaatatataagttaccaacttttattgaaagctgattgtttagtttggtcaattgtggctattaaaatatagtgcatagtaggtcactaggttggttataatatattgttcgttaatctatactttgattaattatgagtttgttgttttggatcgaacaacgcaacaaccttacatttaaatagagtaattaaatgcggagctaataatgttctgtaagtgaatagcacgatatggttttgttgtaggaccaaagcgacgtaaccctttgagcatgtaaatcaagtcaaaagatgacatattactttccactaacttaattcgttacgtaatcagtaatcacgttatgtcagaatcatactattatcgaagggggaggaaaaccgaaaacgccaaactaattcataaaacttttgtgtggcccaatgggctcattctattgctataaagattttgcatggcccagatatgcactgattcctgataatgtctccagctgctgtatcgcctctgggtctggattcctaatactacgtatattgtttcagaaaagtatcttttgagcaaaatttagtattaacatttggcagtaaaaagatgaattattgtacctagcgtcggtttccgaaagtgacttaaacatacagtcaaattataacatcggtttaggaaccgaagcaaaaaattcttaacgtgaccttaataataagtaaaggacgttattatattgaagccagttctaacctgatgttagacttaataaaaacagacgtaattcccttcatttttgtagaatgatgtcattatgagactatacgatgttgccgatatatacagccaaattgccaatatataacacttccttcaaaccaaaattccgaagatgccttattagttatttactttaacttagcaaaaaattgttacaaatctcaaattctcaatttacttactagattacagccttacaggtcgttggtcaatttagtttcctctaatgttgcacattaccattataccatacaatgtttctctctttgtgataatatataaaacattaaaagccatataaaagcagtctaaaattttattcttggcaacacaacaaatttatgtccttagattcccattccaatcataacatatattaaatgcatgatcactttcactaaacatgcatggcccttgtatgcttatatcccagatacaattgatgcatgaaatatgactacgaacaccatctctgtcatcatcgtaaatgtcaaacctttttgattgtccaggccatgtgaaatgacaatagaaaagtgtcgttccaacaatacttgttctaaacttaaacgaccaagaaccattcggagcgaggattttgaggccaagatcgtcatctgcggacttacaatgaaggtttaaggtcaaaccatcaccaaggcggtttgtgatcctcaccatttttgaagtagaccaattaacatcaaaatcggttttcacttgtgagaaagctattttgatgagtagatatattaccaccacatgaacttgtgtttttaggatgtttttcattttctgttaagctcaaaaactgttttctactgaatactttttgttttgatttgcattactatatataggaagtattcgatgagatcgtccatgacgttatgagatttctttccaaaacggttgaccttgactacttgactacattgtatcgaaacaaaattaaggaaacttaacgaggatgctagctagaatatcaagatttatccatttttgttacaaaaagatataatactatttgtgggttattcttatatcttgaacagaattatattaatctttttggatcttcaaatcaaagagtcaattgtcagttataaaatctctatatttaacaatgattggatcataaacttttattaatttatttatgatataaattagtagataataaagagattttgttttatacattaacgttttataaaactatgaatttgagacaattagcgttttcaacatatttggaagagtttcagaccgacaagaaagaatttactaccttttctttatctttaatctctcgtaatgtaaatgttaaagcaaatcatttggcacaaaaaatttgtgcataaccgctacacattatttatgtaaacaattttccacaattttagttcgtttgagttctaaataatatctgatgaccaaaaaaaaaaaaatttgatagaattctaactaaaataattgttttggatattataaatttgtagttttgaaattattattttttcatatttataagaaaaaaaaattcaacactaatacaaagactttagtttagatgaattcacttataacaacactataatttaaaaacacagcataacaatgtaaaacacatgtatagcataacaattgtgtttatacaagaaaatttagaaatgcgctctaaagaaattataacagtttgagaacactaaaaataaacactaaaagcatacaaattatcataacaacttatatgatattaacggaccatattaagtaaaacataaaatcaaattataaccgacggtactaaaaatcgttaaatgtaacactaggaaccgaagcaaaagttcttaacctgacctttattacgtaagtgacgttattatatttaataaaggcagatataaactgatgttagacaaacttaataaaatccgacattaaagcccttctttttgttagaaagatgtcattatgtgattgtacgatgcgaccgtcaaaaccaaagtcttaattggttttataaccatatatgtatacacatccaataacactttcgtcattacaaaaactccgaagatgccttaatacttagttatttctctaacttagcatataattgatacagatctcagtttacgaaattacgtacaagtctttggtcaatttagtttcctttattttagcacattataaaatgttctttcccgtcgtaaacaaattcgaaggtttgttctttgtgtagtttatacttctttttttttggacaattgtgtagttcataccaaaagtaatagaacaacaatttaaaacgaaaacaaacaaacaaacgaatgattcttgtggttttcttggcaacacaacaaattatgatcttcggtttccattccaatcataacaaatattaaatgcatcatctatttcactaaacctgcatggcccatatttgcctatatcccagatacagtagatgcatggaatacccatacgaacaccatctctgtcatcatcgtaaatgttaaaccattttgattgtccaggccatgtgaaatgacaaaagaaaagtgtcactccaggaacaatacttggtctaaatttaaacgaccaagaaccattcggagcgaggattttgaggccaagatcgtcatctgcggacttacaatgaagttttaaggtcgaaccatcgccaaggcggtttgtgatcgtcaccactgattttaaagtagaccactttagatcagaaccgggtttcacttgtgagaaagctatttggatgagtagatatattaccaccacatgaacttgtgtttttagcatggttgtcattttctttgaagatccgaaagcgttttctacttttgtttttgatttgcattagtatatataagaaatcttcgatgttgatgcccatgacgttattagatttaatttgtttccaaaatggttgactacattgtattgaaacaaacttacggaaagttataacggtgatgcttgaatatatcaagatttatacattgttagaaaaaaacactatttttaaatgggttatttacttattcttagatcttgaacagaattttatattaatcttcttgtatctttaaggagttgttaattagttatatttaggggtataaaccggccttaatcaatccaccttgcttgtgatacaagaagattaatctaattttgtttaatatctacattctacaattagatccttatttttaataaacaatgtataaatattggtatccttaccatagtaatgaatattgcgatgttttttttatatatatatacaaacctcacataagacttttcttcttattttgtaacaaaacttttgtacaatcaatacatgacaaatcatttttgacagatcttgcattttattcagattttcaaagactaagatttttatccataaaatgcctaattttgtaaaatccataaaagttgagtcggtttagaaaattgatttcatcatctactctaaaagccttaaacaaaacagtatcacaacgtttggtaataataatgtcttataacaacggtttagaaaaaacaccaaaccggttttaaattggttctcatcagttcttctttgtgagattaatgtcttgaggaaggagagtgtagtcgatgtgaaggtcctccaacattctcttaatggccaaagaaagttcggttcttctaagattcctctctctgttttcctgaaacgtgatggtgtggtcactgtatagggccatcttcagcttgttcatgttctctatctccttcaccaccaccgagtgaaccggtgcccaatgttgcgggttctgctccaagtacctgatccacaaaccaaagaaactcattcaaagacaagatctttaggctcagtggttaacaaaacagattcaaggtacttactcggcgattctttctttgagatgtgctatcttagagactggtgtcgagaaagagatagagaattccactgtttctcccatattcggacttctgaagtaattgcttatcggtttcgtggccaaaacagcgttcggataatacactttctcgttgttaagcttcaagaacactgtcgttaagagattcatttcttccaccagcatctgaaaaacccccacaagaatgtgtttgtatagagtataaaaacatatatatgagtttaaaggatctttgatgttgaagtttaattaccgcgacaccgtcaacaacacatcgatcaccgacatcataaggatgcatgacgaatacgaacacaatggattcaaagaggtttttgcatgtgcttccgattataaaagccagagccacgagttgggtggagaagaacagcaaaaccttagtcgttgctacttctagaaggagcagccaaatgacaacggtaaccaccatcaagattgctgtcacaagtttgtttaactgcttaaccgctgtttttgtgtcgtttaaggaatgcgctaaagctctccggctcgtgtacaccttaacctgatcaagttgcaacacaacataagtcgttaaaaccaagaaacacatactctcaaggcttttttttttggaataagccaattcatttggcgtgacaccactaaaaacagtgattggtgataagaagaacctgcaggtctgcggttacctatcagactcacaatctagtagttctcacttctccattttttcataccattattttatttttattttttttcataccataatttatctttaaagaataaaagcatgaaagtgttctgaggagacttaccacccattctgtgaaagcttttcttgtaattctcccggtctcagcggcaccatcaaacaatgggaacacaagatcaacctcttccttaatcataaacctaagcaagtcctcttcctctatgtaactgaaaaaaaaaaaacaaatccaaagatgtccatcagcgaatgcaccaagaaagagaaggaaaaaagagcaaatcaagattgttttcctacttgaagaagggctgagcaacatttctgaagacatggtaagcagcagccaaagcctccatctcactagtaatttctctgtcagcttgctctttcccctcgccgtatgctgtttcgtccaatgtgtcagagatagtagagagacctgaagttctaaccgcttccatcaaaactcgcatagtccaagccgaaactttctcccgcttcatcttatgaactttccccatatcaatcactttcttctctttaaccgttccttttttcactacagtcgcgaaactcaaatggcctgtgcttggctcacgcccgaccctctctgcctcttccataagtggaagacccgagagcgtttgtagaacatactggtggaaaacagaatcttgaatcctatcgaaaaagttattgacgttgaaattcgctgcaaggattttcaacaagagtgttttcaccagccaaaagaatgcccctgtaagaatggaaataagagtcctggtaatacatttgaggactttggtggctgcgggggaccgtttcacgtcgtggttgaacaacaatatccaagcaacaagaatcaagcagagccaaatgaaaacttggacgctcttcttcaagccgtgcacaaagtagagcacttttctcctcaaaagaaagtttgtttctatgaggaacacaatcaaacgcatgaaccagtttgtcaccaacattccactgaatataaccatcacaagcacacaccatttccagacttctagcccccagaaggtgtgatgtttcaggacattaatggttaaactcgcaaccaaagcgctcaaaatcaccacaaagaaagctgactctatcaaagccaatgtacttatcttactgcgcatctctctgttcagcttaaccttcttgtagatttcctcatcctcatctttctcaacaacgactttacttggagtaaccggtgctggtgacccgacactcctattagatttgttattcggagaagctctactaaaagaaaaaccagcaccaagttgctccctaacttcctcctctagaatacttgtgtctacaggacaagatggatcaacaaaccgggacttgggttttgagtaaaccgaccttgcaaaagatttcctctgagttagacccacattgttctgatttggagctctaggaggcttgttaggactaccaacaagcttagagatttcaggagaagggcttttactaaagggaactcctttctcagactctggtgaagccatttccttggaacgccttgatgcttcctcaactggaacattgataacaacatctcctcctcctcctcctccgttactactcttttgttctgccattccaatgctactaccatccaatttcacaacaatgcctctggaaaatttccaaaaaatcaagattatagaagaacactgtggggatgttaaagtaccaatttattttagcttgattcaaataaagtaattagattttgattcatcagacaaaaagggtttaagaaactatattttattaaagtaaacaaagtggaatataaaccctagattcctgaagcatagatttgtaacaaagcatatagatttacagaggaagattaactacagacaacaacattctttaatcctactaaatctgtaagaaagatccaaacttcacaaataaaataatcagaacttcttcagaaaaacaccaaaaaaaaaaccgaatttaaaaattacagtcaaaagagggaggaaccgagcttaccagtagtgaaaaatccaaagaaaaatcttcttcttctgtgagtattagctcattcttgaagaagaagaagaagacctgaaatatagccaatgaacaaacaaaaaaaaaacagagagcttaggagatagtacacaccacgaccacttaagaattatgagagatggaagaattcaaacatttgataaatgataaagaagaaatccgattatacataccaaaagcaaaaaaaaaaaatagcagctaaaaaagcagagctgcagaggcggtgggaaaaaaatggcttaaacccagaaaccaacaaaataccaaaagccaactaaataatagaaaacataaacatggaaagaggaaagagagaaaaagatcttacatgaacaaaaaaacattaaggcgggtccaaagagcaaagagatgtcaagactttataagccacaaaaattaattgggaaatgtaattgacattactttttaaaattggagatggcttgatggtggagtagttttaatcgacctttaaaattccaaaataattaacctttttcgtcaacagaaagattagtactaattttatattagtaagttggatatgaatatgaaaccaaatgtattggggaaaatgttcacacaaaacgtggttattaaaaaatcgtgtaataactccttatgtactatctgacaaaaaaaaacactgttctttactaaaatgttgtacataactttttttaactgtacatacttacatccaaaatttcaaatttgaaaatgtgcacgaaaatcaataagtttagatatcagtgagaaatgaatcaaacataaaatcagttaactggattgatataatacaaaaaaaaaaaactggaaattggttaagaaaattgaaatacattttgttttttggttagacagaggaaacgattttcctttgactagtgaccactgaggcactgaccataccactctctgtctccatcgattccattatatgtctatgtcgtttttctttcttcttttcaactctataatgaatgtctctcgttgctaacgagctgtgtttttaatcattccgttaattaataatgtctgagcatgtttggcatgtctaactggtgattggtctctggtcagctctatcgtgtgttttagttttcaaaaatataatcaataatttacacgacaagaatatttagacaatccacctatgtacaaaattgttacttaggattgaaattaagtaagagaaaaaataaataataataagtaagaggtaatggtgtaacttaatgctaattcaatagtgtcaaatttctatttttttttgttccatcctttgggtgatatatatcatgttatttattaaatgcttattttcaaatatctttatttgtgtgaatgaataacatatataaactgatagtaaaataattataaaaacttaaaatttggatatgttaaacaacggttacctaaaagttaaggaagaaatcattttttaattttcagataacagtttaataaagaataaatttgtctatatgccattcattgtcactcgttagtcgttacctagttacaataatctcaacataattggcacaatggctgattattgatatccctagtttgcaatgtgtaaaaatgaagaatccaacggacaatatttactttcaatggcagaggcaatgtaatgactagattctgagtttctgaccgttggataaatttggtagattctgacagttgatttattgacagcattgtttttggagattataaatcatatatatgaaagttggccaactctctccaaataaatgacacatcatcacacaagaaaatgacatgtgtcattctatattttttaaattaaaatattaatcaaattaaataagcaaattaaatatatcatcaatcctactcttaattgttttcttcaaaataaaaataaaataaaaaattaattttaataaattaagcactacttttattatactctttttattttactattttttttgttgtacttgttcgttacctaacctcttattagtttagtaattttattttgagtctttgataacattgacattcaagttttttcaaataataaacatttaaaacattagacctatcaaataatttaatacacgatcatttctcttatatggatagatgcaatgagagaagatctaaaagtattgacttaaatgctgctttaatttttgctttttttttttattcttttcatatgaatacttttgaaatcttattcagtttatatcaattctatatatttaatcatgagtcgataacactgttgttggaatattatatcaggtgaatacatcaaaccagaaatagtttatttataatcaagttagacaattttcaaatcatttaagacatgatcatttctctaatattgatatatgtaatgacagaagataaaaaaatattgacttaaatgacatataatttttgttatctttttattttttcatacgaatacttttcaaatcttgttcagttgatgtcaatccaaattttaatcataagcctatcacaatgttgttgaagtacataaaacaagatttggtttataattgagttaggcaaattttaaatcatacaagtaacatagttgctcataattttttcagaatatcatatattgttgttatatgtattcatgaagtgaaaatattaaaatcttataaataatcagctttatacatgaaatatataaattgatatttcgagttacaaatgaatataaccataaaatataattacatactattgatctaattttattaacaatacaaaaataaataaagaataaatataaatttgcaaaaaaactatcaatgtaaatattttttaacaattttcaatataaacccatcatctagtatagagaaaaaaaggaaattgaagaaagacaaaaaaaaattgcaacgagagagaaaaataaataaaatgccgacttaaatttaacccataaaagtttccatttttattcctctcccactgcaatttcctttgttctttatagatccaatggtccagaacgtacgaaattgatccaacgcctcgtgaattagatccaagtcagacttgaaccctacaaaaactctataaatatttcatgtttcttctctttcagtacaaaatcctttttcctctctcgctacaattctctctaagcttgtaactcagttctaatctgaagaaaccatggaacaaagttctgtcgttgcaaagatgcaatcgaacgaagaattcgtcaaattaatagagaaaacccaacaaatcaactcagataactttcgattgaataacttgtaatcgacacgatgttcataaaacaccaaatgatctcatgctagctctcgagatgagagaaactagctacaaagtttcagagaaaaaccttagaagattacaaaatgattcgatgatcgaaaacgatgactctcctcagcgtcatatacacgcctaacggccaattctgatctgcaaaccaacacatgccacgcgtcacttccagatccttctttattcttcacttacttcacacgtgccaactcccacgtgcgggttctgcatcaaatctccctccttttgcagaaccttgtcctcaaggtttcaatcaacaaaagctgagaatttcttctgaagatcaaagagaaactcccaggttgcctcctctactggttcattaacccacttgaccaaaaccttagtagctgcacgaccctgtctgttcaccatcttgcgttccagaatagtttcaggtgccttctcaaacacgtccggaagaacagaaggtaagtggtgtgtggtatggacattgcccaccaagaccttcagttgggaaacatgaaacacgggatggatttgagagtactcaggtagcttcagcttgtatgcaacctctccacacttgtcaattatctgataagggccaaagtacttgggggaaagtttctgattagaacgcagaaccacagactgctgcctatagggctgaagcttcacatagacatactcaccaatgtcgaattcatgctcagttctgtgttgatcagcaaaaactttcatctgatgctgtgcacgcatcaagtgaaatttcaggtataacagcatattctctctctcctgcaatgaacgagccactactgccaccttagattcaccgggtagatatggtaaatgagttggaggtgcctgaccatatacaacctcaaaaggagtcatatggcttgaagtgtggtagttagtgttgtaccaaaactctgctaaaggtaaccagaaactccagagatgaggtctagcatgacacatacacctgagatagttctccaaacaacgattgactacctcagtctgaccatcactctgtggatgatatgcactagaaagcttcagagcgaccccttggagagaaaagaattccttccaaaattcgcttgtgaacactttgtctctatcactcacaatagaattaggatttccatggagcttaaagacattatccagataggcttgagctacagttgcagcactatatggatgagccaaagcaataaaatgagcagctttgctaaggcgatcaactacaaccattatcacagacttacccgctgaaactggtaatccatcaatgaaatccattgaaacatcactccagatcgtttcaggaattggtaatggttgaagcaaccctggatatgctgcgttatccggcttacactgttgacacacattacaactcctaatgtaagcctaatctcttttaccatacccttccagtaaaacagacccttcacccgctggtgagtaacttcacgacctgaatgaccaccaacgcctgagccgtgtaaccattgcaaaatattatcctttattttcacatcagcagggacaactatcttgcttttcctgcgcaacacaccttgagtccaagaaaaatgtctcttagcagtaggatctttcttcagagcctcaatgatatcgtgaagacctgaatcagtgatgtaacccgcctgaatttctttgagaaggtcacattccaccacggtcatcgccatatgtaaaacctctgaaccttcaactcgagacaatgcatccgcaaccaagttctccttaccttgcttgtattggatttcgtaatcaaactccaataatttgggcagccactgttgttgaataggggtatttaatcgttgttccagcaagtatttcaaactgcgttgatccgtctttatgataaagtggcttggtaataaatagtgacgccacttacgcaccgcaaagatcacagcaagtaactctttctcataaattgacaaatgcaattgcttaccttttaactgtctgcttatatatgctaagggacggccttcttgcatcagcacagccccaatcccttgcccacatgcatcagtttccactacaaactgtttatcaaaaagaggtaaagctagtaccggtgcatgacacatggcagctttaagtgcatgaaaagctgtttctgcctcgtcagaccacagaaacgattcagtctttgtgagagcatgtaagggtcctgcgatagtgccgaaacttttaacaaaccgcctgtagtagccagccaaacccaaaaaaccccttaactgcttcaaagtcgctggtcttggccaatcttgaacagcctgaatctttgcaggatctgtagaaataccctctgagctaataaaatggcccaaatactccactctactgaccgcaaaagcacacttacttcgcttagcatacaacttgttctcacgcattacctcaaagacaagcttaagatgctgctcatgttcttctagtgatgagttatagatgagaatatcatcaaagaaaaccagaataaacttcctcaaaaatgtcttgaaaactgaattcattagactttggaaattagcaggagcattagtcaggccaaacggcataaccaagtactcacagtgtccactatgtgtcttgaaagctgtttaatggatattaacaggtgccattctcacttgatgataacttgctcgcaaatctattttagaaaagaccacagcacctccgagctcatccattaaatcctctattaatggaattgggaatctatccttaacagtcattccattgagctctctatagtctacacacaaccgccaggatccatccttcttcttaaccaaaaccactggggatgcataagaactggaactaccttggattgtaccagctgctaacatgtcctcaacaatcttgtctatctcattcttttggtgaataacatatctgtacggtcgctggtttacaggattagacccctccaatagtggaatgcgatgatcatgttgatctctgaatggtggaagctcagtaggttcaacaaaaatatcttgatatgtattcacaactctctccactcctgagtctacttctgtctccactgctaaggtgttaagcatacaaagttcactatcaacttcctcatttgactgaatctcttgcacacataccatggctaactgaacctcctcctccttaagtttctgtaatttctgaaccttcatctcacggacagaaccactgtgaatgccatgtaacaataccttttgatttgcaaacttgaatctcatttcgagcttcttaaattcccaagaaataggacccaacgtttcaagccactgtacccctaaaaccatatccacaccttgtaatggaatcaacaaaatatcagactgaaatttagtagattgcagcttccactcaaagtcacgaatcttgccctcaactttcagttttcgaccatctgccactgaaactctcgataaccctgcagtttctacctgataacccagtttcttagccattcttgcgtccaaaaaattgtgagtagagcctgagtctatcagaataaagataaccttcttgtcataagtacctctgactagcatcgtcttgtaatctgagataccagccactgcatttactgagatctgaggcatgtgtctggggtcctgatcttcatcttccaacaagacctcagaagcatcctcaaactcttcatccacttccatacggaaaagttgtgttttcctgtgaaccaagtaatgctctggagtgtacttctcatcacagaaataacataaccctttagctcttcgctcgctcatttcttgctgagacatcttcttgggctgctgactcacaggcttgaaaccaccccgcgacgaagattgatcaaactttccctccttatccttagagttctgagaataaccaccagcttgagtgggacgagacgaccgatttgacactattggcttcttaggatgggctctctcatatgtttttcccaagaacaagcaatgcctaatggattgtggctgaaacatgcgaacatgcatttgggtgtctgttcttaaacctgccaaatacacactcaccaagtactcttcagaaagattgactctagtcttaatgagttcaaacttctagtgataatcaacaataccatccgtttcatgtaaatgtttcaattcagccatcagatcatcacactcatcttcgaacctttctttcaacagtttaacataccctctccaatcatacaaaacctccaaaccaataccagactggataaaagactgatgccatgtggaagcatgactatcaaaatgaatcgcagccattttcaccttcatatcctctggagtcagatccacaccaaagaattcctccaccttgaataaccattccttcaaacgactaccatcaaaccttgggaaatctattttccccaacctcgtcaagttcccataagcgttatgctgatccattcgtatttggttatagcgatcatcacgaaatggctcagcataacccgatctggtgtttgtaacatgagaaccacctggtgtaccacgatctgcaatagaatggtcctccaccaccttctgagctgtcgatctgctaagaacaccgtatagatcagcaaactgtttcatcatcgccttgttctgctctgtcaccagcagctccaacctcgacatccgcgtttccacagattcctcaacctccacttccttgcctttgttatccctacattcaccttcctgcgaacgagtaaccaccatgattccaaggaaagagatggctctgatacctttaatagagaaaacccaacaaatcaactcagataactttcgattgaataacttgtaatcaaatgatcaacacgatgttcataaaataccaaatgatctcatgctagctctcgagatgagagaaactagctacaaagtttcacagaaaaaccttagaagattacaaaatgattcgatgatcgaaaacgatgactctcctcagcgtcatatacacgcctaacggccaattctgatctgcaaaccaacacatgccacgcgtcacttccagatccttctttattcttcactgacttcacacgtgccaactcccacgtgcgggttctgcatcacaaattcttgggaaaaggtgtttatggttctgttgatctcatcagatacactaaaaccgatggttcctcgttacaagccgccgtaaaaacatcttacgctgaagatctcgaagaatacgacgcgctcaaaagagagatacagattctgtctgaactcaagggatatcccaacatcgttatttgctatggagacgatttggaagaagatttcaacgaacacggacacaaagtttacaaattgcttcttgaatacgcaaacgaagggagtttaagttcattcatggagaattatcccgacagaaagttaccagatccgatgatcagagacttcacgcggatgattctcgaaggattggtctcaatgcatagtcacggttatgttcattgcgatctcaaatccgataaccttcttatcttctctcggaaagattctgcttcgtgcgagttaaagatttttgattttggaaactgtagacaagtcggagaagttccggatcactggaaaagtgattacccgtatgtgggaacgcctgagtctttcttcgacggtgttgccaagaaaaccctagatttgtggtcgttagggtgcttagtgttgaagatttatacaggtgagcagccatgggaaagagttactagtgtcgatttcgtgaattttcttagtgatggtgaagctccaaatattcctgaatatgtgccttgtgatgcaagagagtttattgaaacgtgtttcgcaagggaacatgagaagagaggtaccgcgtctgagttgttattgcatccgtttttgtgtcagaagcaacccttgctggtgaagttgaaattgagaatcaaacaagcttcgaagataacaatgggtattagagagaagcccctgacattgaagatgtttctatctaagcctccacaacttaaaaaacttttgagtaaacttttgaggttgaagaagatgattcatccgaaaccattggaattggattctagtttcgtttcttacagtagtgatctctgtttattataagtgtatagatcacaattatgcaaataactcatccctatcaatctgtaatttacgagattagtactgttgagtttagttttgctttgaagtattttttttggataattacgtatttacatctttaaataggtttcactgtgtgttgtatatgcgatccaaggtgctttgaatcgttaaattgatatgatggtgaaattaatatagcttactatctcattagtgcataagccaaacgtgacaaggtaactcatacatggcagagagaacattgctctgcaatagcttcttaccttgttgtgacctgtgatactagtgtgtgacaacaagaaatgaaaaatgtaaagtttccttaaaactttaatcaaacagtataatcaagcaatgaaatgaacaattttgtttttaatttcaaaatgattatcaaagttctattcatgtccgaatattcgttttattttaaggttatttcgttaagattcacttttgcagagcgtcgccggcagctcaacgatggtgactcgcttaagactcgtttcgagatcttctcgttacgccaccgtcaagttcactgactctgtctcagcatgctcatgtcgtcgtctcttctctgcctccaccgaccccgaacccgaatctcaacccgaacaagccccgcctacgaatcccgtcaccggagacgaaaagctacggaatctccgagttcttctccagcagaatcgaatcgaaacggcgcgtggcgttctctcttcgctgcttcgatcggattctacgcctttcgcatcgccgaaagagctcttctccgccttctcgttatcatctccgtcgttgaaacacgatttctcctacttgcttctctccgtgctactaaacgaatcgaagatgatttctgaagctgcggatttgtttttcgctttgaggaatgaaggtatttatcccagctcagattcgttaacgcttttgcttgatcatcttgtgaagacgaaacaattcagagtgactataaacgtgtttttgaacattctcgaatctgattttcgtccgagtaagttcatgtatgggaaagcaattcaagctgctgtgaaattgagcgatgtaggtaaaggtttagagctgtttaaccggatgaagcacgatagaatctatcccagtgtgtttatctacaatgtccttattgatggattgtgtaaagggaaaaggatgaatgatgcagaacagttgttcgacgaaatgcttgcaagaagattgttaccttctttgataacgtataacacgttgattgatggatattgcaaagctgggaatccggaaaagagttttaaagtgagagaacgtatgaaagcggatcatatcgaaccgagtcttattacgtttaatactttgcttaaggggctgtttaaagctggaatggtggaagatgcagagaatgttttgaaggaaatgaaggatctggggtttgtaccagatgctttcaccttcagtattctgtttgatggttattcgagtaacgagaaagctgaggctgcgttgggtgtttatgagactgcggttgattctggcgtgaaaatgaatgcttatacttgtagcattttgttgaatgcgttgtgcaaagaaggaaagatcgagaaagcggaagagattttggggagagagatggctaaggggcttgtcccgaacgaggttatttataacactatgattgatggatactgtcgaaaaggtgatctggttggtgctcgtatgaaaattgaagcaatggagaaacaagggatgaagccagatcatttggcgtataattgtttgattaggagattttgtgaattgggggaaatggagaatgctgagaaagaggttaacaaaatgaaactgaagggagtttctcctagcgtggagacatataacatcctgattgggggctatgggagaaaatatgaatttgataagtgcttcgacattcttaaagaaatggaagataacgggacaatgccgaatgtagttagctatggaactctgataaattgtttgtgcaaaggttctaaacttcttgaagctcagattgttaagagggatatggaagatagaggggtttcaccgaaagtaaggatatataacatgctaatcgatggttgttgctcaaaggggaagatagaagacgctttccggttttctaaggagatgctcaaaaagggaatagaattaaacctggtgacttataacaccctcattgatgggttgtccatgaccggaaaattatcagaagctgaagacttacttcttgaaatctcaagaaagggtctcaaaccagatgtattcacgtataactcactaatatctggatatggattcgctggaaacgtgcaaagatgtatcgcgctctatgaagagatgaagagatcaggaataaaacccactctgaagacatatcatcttttgatcagtttgtgtaccaaggaggggatagagctcacagagagattatttggagagatgtcattgaaaccagacttattagtttacaatggggttctccattgctacgccgtacatggagacatggaaaaggcttttaatttgcagaagcagatgattgaaaagagtatcggtttggataagacaacctataacagcttgattctgggacaactgaaggtaggaaaactgtgcgaggttaggagtttgattgacgagatgaatgcccgggaaatggaacctgaagctgatacatataacataatagtgaaagggcattgcgaggtgaaagattatatgagtgcatatgtttggtacagagagatgcaagagaagggttttctgttagatgtttgcataggcaacgagctagtgagtgggcttaaagaagaatggaggtcaaaggaggcagagattgtcatttctgagatgaatggtcgcatgctaggtgatgtaacagtggatgaagatctatctgcaacagagaagctttgaaaatcaataatgtgtgcttcaagataaatcctttgactcctggttcacttccaccaatctggtcagtccgaatcagggctccgtagatgatttcagtttggtttggctcggttaaggttttgacttatcttatccaccagtagatgtcatgagtcatgaccgaaactttctttgaggaccttaaaagtccacaacgtttttatgggatccatatttatggtaatttacgataggtacaatgactttgagttaggctttaggttgattggtagattaacaaaggtaagaatagtaaaccatttgttctagttatctgttttgaaaatgagatagaactaatttgtatcatacgcaatgtctcaagcttttactgttttttacagaaaacagtaaaccggactgtactagaatgatgtgacataagtcaaaaatcaccaaaacataaatgagaaaaaaacaaacaaacaaaaatttagtagagttttcaaacgtgtgagtggcacggtgggagggaacactctagaaaagaaaattagccccacaaagtcactagaagcatctcttcaaggcattctctggtttaccctattttagagtgagtgagctcgtcttctctccacagaaacttaacttgagctgcatcaatggcggttacattttctgatctccacacagagcgaggtctcaaaaccctcgaggaacatctcgccggtaaaacgtacatctccgggtaaacacgcatattctttcataatttgctatatcattcatcaatagcttagattttgcacagtttctacttacatcttggaactcggttttgtttcagcgatcagctttcggttgatgatgtgaaggtttacgctgccgtattggagaatccaggtgatggttttcccaatgctagcaagtggtacgattctgttgcttctcacctagctaaaaggttcgttttattctcattcgtttttgcttcttgttgatcttctgattgaatggctctttggagaatgatgacttctttgaatgtttcagttttcccgggaaagcagacggagtgagagttggtggtggtgttgctcctccatctgaagctcatccacatactgaggtactaaaagtagtcaaaatatggaatgacgccaatgtaatctgtttgtagaattgaaacaattatttgatagtgtgagatcaagtagaggaaaatgcaattgtggtgctgttggaatgatgattttgtatactgtaatttagctttgcccctcaacttatatctgcaggaacctgctgctgatggtgatggtgatgatgatgatgatattgatcttttcgctgatgagactgaagatgagaaaaaagctgctgaagagagagaagctgctaagaaagatactaagaagactaaagagagtaagtctttctctaaacttggattggatcactgtggactattatagtgtaaattgttagaatcttgagatcctgctcatgtttggttacttttgttattctcttttaacttttttgttaggtggaaaatcttctgtgctactggaagtaaaaccatgggatgatgaaaccgacatgaagaagttagaagaagctgttcgtagtgttcagatgccaggtcttacatggggagcttgtaagtcaaagaatgtttatctattttgcacaagagctcaagtttttttttttttttggtttctgatgtgagcaatttgttgcagcgaaattggtacctgttggttacgggataaagaaactcacaatcatgatgacaattgttgatgaccttgtgtctgtggacaacctcattgaagaccatctcacctcagagcctaacaacgagtacatccaaagtgtcgatattgtcgcttttaacaagatttagacacatgagaaagatgtcgagtttttcagttttggtgtcagtcttgttgtgtttcgctaaagtctcttcttcaagttccaaggccaactttggagttgaagcacattaacttcacttcacttggtcttaattaaaagctatttgtaagttcttgtctaagataaattgcctgggcttggtaacgtgtggaaagaattgcggttaaaaggcctaatatgtgaccacattgaaataccaaacccttatttactgcttaccctcttctaggctataacagaagaaagcacatgatggtgtgatattcagaagcattttggtagctccatgttaaatatgtggggaggatataaaatataaggaaatttgaaagatccattttgagcaaacaagcaagaaacacttgataaaaccagtaaccacaaactcatatcatccatcacctctctctctctcctttcatttatctttattctagaagaagagcattttatcacctttaaagcgaaggaggcacatactgtctagacaaactaaacagatctttaccctcaaaaggcgatgtccactctctcccatttccaactaaagcagcttcctgcactcccattgccacacccatcccattcccattcgtcatcattcttgtccttccattcatgtgcgcttcatacggggatgatgctgcactatatggggatgatgctgccacatactgctggctaggtctcacacaagctaggcctttatctagactccagtcgatgttgttgtaatccaaatgccccagtgacccatccgtgttccagtccagcccagaagaagatgatcccgccagtgatccaaaccccgagaagagcccaagagaagcagctggagccacagcaggcggagcagaagatcctgccattctgtgaccattgttgttcacttggccttgatattgttgatactgaagttgctggtacatcaggtttgagttcagatcattaggaggcagacttcttgagggcaagtatccgttagattgggccgcctcagatctatttgcagggtgccaaccgctgcctgctgctgctgctccggtaaaggatgcattcatggtagagacaggtagcacatttgtgttagcggattgagaacgttgttgttgttgctgctgctgctgcatcaccataactggttccctcatatcttgctgctgaagcctcttgaattgatcgcctagagccgtcacataatgtgtttcttctgttgatcgagacagtggtgtctgttgatatggtatgcgtttattctcttcaaggggggcattttgctgcagtttcatccactgcaacttcatgtgaattctttccaacgaatttacactttggttttcggattctccactaatgtagctggatcctctggggtaaccgagattctttctgtcaagggcttcttccctgcctgcaggatacatacctgagttaggttgtaactggcctactgtattctgacttgtgagcacagaagggactttgctattgttaacagaagtactatcactaatatcctctggttttctagacgcagtagattggtcttgcttctgtcttcttaatgcttcttctgctttctcaatgtccccctctgctgtaaccacagctctttctacatcctgcttggtgcacttatattttgtttccaactctaagattctacccaactcttgtgatatgtcaagctttaagttcccagaggtcggatctagtttcttatctgctacttttgccccaccatcatcaaacagccaattaatagattcctctattttcccttcattcaacataagagcataagttgcccgctcatgaggaatccccatagatataatcagctgagcatgaacttcaagttttctcgacatgagatactgacagcatcgctcatgcaactcctgagctcgcttttccttttgacgctgatgctttctttcattcttcagacgcatcttatctcgcttgtcattgtcagctccaggaatgatttcttgttttgcagcaatactagtactaggtactttctctttgtgatcttcagattcacctgaccagctaccattattagagacagaatcacagtcagctccagttgaatccgactcatcaatgtgtctgaaccggccattattgtgaagagatgatgagccagttgctgaaagcgactcaatggtttgaaatgtccccaaaagtggattataaccaccaaccacaacactacttccacccatggatccagacgctttactaggtgtcttctgtgaatcattcatgaccttcttgtctctcgatttcatcttggatgcactagacatcttctcaacacaaagttatcctacagttttcacaaaaaaatgagataagtaaacacaataatcttctcttaacatctatatctaatatcaatggtgatttgagctccaatgtcaaagatggagattcttcaacatagatttccacagagacgactattattactactacatcgttgatatcacaaacgtaatggatccattgcaagaacgaatcagaaaatcaaagacgatacaacaatctccggagatcaattctgaatcgaataaggtgaaaacgcaaattcgcggcgacaaagaaagcattagcagttgaaatcaaatccataacaagaagaagaaaccatatttgagctatagagggacgaaattcgaacgaatcaaggaaacctaaaaggcgaaaaaggaaatgcgagatttggaagaagaaaccaaatcgaagtaatagatcactgacgggacgggagagagaaagatgaacctggtaggttgatcggagtcgttgacggagaagcgagatccggagaagaagaagaagaagaagaagaaggtgagagagcttcaaggcgatgaggatgaggaacgagaggagagtgcgattatatgaataataccaaaaaagagaataaactcggcgtttcgaatccccaaatcgataacacctattggcaaattagggtttggtttagactaattttgatttgtttccttcttttctttaatttcttaacaaacaaaccgaaaatgagtagcaaaaaccaaaccaaagtctgagccattgatttcttttattagattttttcagttttttttttcttctaggttcatttccagttgtctttgttttgatttcagttgtcaacataactgattaatttaaacatgttagatttacatgggtaggactcggacagaagtattgtagttttaaggattttgataacacacacaactaataaggtttgtacaaatttcaacaaacaattaataattggattctgttagaaaataatatccaaaagtaagaactaagcataaaaaataaaaaataaatgcactttactgaacaataacgtcttgttgaattacttggtggattaaggagacttttcaattgtcgagaaaactctatattcttaagtctctcacatatgaacaacatatggtttcaaagacttttggacaaaccatgacttcatgatgtgtttttttaattaatgagtcatctcgccaatatgcaagtcatactattaatggttgtatcaaaagtcaacccgataacgaaagatctaaaactcattgaagactaatgatatgtttaattagaaccaaactcaatctaaaactgtaccatagtattaattaaaaatctaaaaaaccggaaaactcaaaaccgaaatcaatgaaccagccaaaaggaggggtatcatcgtctaatatctgaaacgacaacgttttgagtggtcttcgccgattgatatagttggggtcactcggagtctgtttttggatttgacacaaaacgcaatgagcttagcttcagttatccaccacggaattctccctccggccaaatcggatcgaatctttcttaccattccggtgttcccgccggatttcagagctcgtggatggactaagtctcctttctctctccttataaatccctctcttgcttcaggtcctccttctctctttctttacattttctatattccttatctgtgtgaatggaagaaggattcatctatctgagtcatgctaatgtgcttctgggttacgattctttcagctgccaatcgtcgtctctctcatcttcctcctatcgcgtgttccagaggtattgatcaggaagatgaaggtgaatgcttcttctccaatattttcttctgtttttttttttcctgaattgtctgtgtcagtcttacttttgctagcaagacacaattgtatataaaggaagaagctttatcttgtgacaataatttgtttatggcatgttagtacagagaaggagagcagagaacttctaccacacaaaaacgatgagaatgcaaccacttcacgctcttcttcatcagtagatagtggaggcctgaaagattatcaacaagaagaaacttacaaaacttccttcaagactgttgccttgtgtgttagtattctcttgcatctactaagtgataatgcgtttttgatctatgtgcgagacctgatttcatagttatctcaataggttggcactgcggtggcatttggaattggaataggtttgaaggaaggtgttggcaaggcttcagagtttttcgcagggtgtgtagagcttactatatatgatatattgattttcacttaactcttcaaggagatatttcctatcttaactgttttcaactcttgcagctacatattggagcaaagcttgtcagtggacaacttgtttgtttttgttcttgttttcaagtatttcaaagtgccactcatgtatcaggtaccaaaactatcttcacagagccacagagatttagctcttgactacagagtattctgattctgtgtccctttctatagaataaggtacttacctacggtatagctggtgcaattgttttccgtttcacgctcattttactaggaacagctactcttcaggtgatttctatgtttacatcaaaatatttgttagtgattatttgtttcatttttctgcctcatttacttttgaattctctctactttctttcagaaatttgaagcagtcaacctactgcttgctgctgtactcttatattcgtcattcaaggtgcatactacctcatcttagcatttatacctataatcacacacaattattgatatggtattagtttttctgtcctcaatgtgttaatacagttatttgcaagtgaagaagatgatacagatctatcggacaacttcattgtaaagacatgccagagatttattcctgtcacatgtaatatacccggtctttttctcctttttactgtttggtatgcttccatagctgatttattcctcttttcttttgtttataactgcttgcagcaagttacgatggaaatcgatttttcacaaagcatgatggcattttgaaagtaagtatatgacaaaattcctcctatatattcaaggtttatgtataagtcactgttaagttttattgcatgtggactccatgatcaaaacattcatgatagtacctttgattacttctaattatttcaacaatattttgggcaggccacaccattgctacttacagtagcagtgatcgagctcagtgacatagcatttgcggtaacttccgtcaccactttgtgaatctgtttttgtctctttagaaatgaagcaaatcactgatactggttgcccattttcttaggttgactcaataccagctgtttttggcgtcacaagggatccttttattgtcttgacttctaatctctttgcaatcctaggtattttttccctaaacacaatttttgttaacttcttgcctgtctcttttgaatactcttggaactttgaattgaagagtttatttatttcatctggtgtttgaatttgccgcaggactaaggtctctctatacactgatttctgaaggaatggacgagctggaatacttgcaggtacctttaccacttctttaaatcttcattcatattctgtttcattacttcatactcgagctaagcatcagatacatacttaagagtgccagtaatgctcattatgtacccatggactagtatgatttgtatctaatcttgtctttgcctttcccagccatcaatagcagttgttcttggcttcataggagtcaagatgatccttgatttctttggtatagatattctctcttcatcggcaatttctgcttgaactaaaccatatatctacaagaaaaactaagctctctcaacatttcttcctctttctaggcttccacatatcaacagaggcatcacttggtgtcgttgcactttctctcagtaccggagtactgttgagcctaacaaacaaatccagcgacagctaactaagaactgagagctgactactgagaaacagaatccagatgtatccaaccacacagttcataagaataatatcgcattgttcatcaaagcatttcgctgatgtgttactgtagataaaacacacagaaagggcattctttccaagactcgtattctactttttgttttgtcgttaaaaaagcagcaaagaacaagacactttaaatctatttgtctggaagacatgtggttgagccccatgattgctttgagacgagtagaactgtctttgatcgtcaagtcatcccatgtgccgcttggtgctcatcttataagattattcctttggactattagtcttcccatttgtctaaaagcacaactcttctttaggtattacaagatcaaacaaatcagactttgaatactcagacactctctaaagttggtgtttggcttatcaaattatggtggtactcatggtggaagggtgcggaagacaacactctcagcctaaatattgagtaaaaagagaccagttggatgcaggaagcctactagcctagcaacatgaaccaagcatgagtagagtttgccgcagaaagacaggatgatggagatgaccagatcaactgactgtaaactttcaacgacacagaccgatatcatttcaaaacccgacaatgatccaaatttacctaagtttacatcttgaatcaattttctgatactatgagatatacctgaactaccaaggtgaacatctgatgttttcaagatgattttgaaatgggatagagatactcatcacctttagcttttactcatggtttgtatcttcatcatgaagttttgtaaaatcaaagcagatagataaaaagtgagagtttgctaatagcaatacacaaacgagagtcaagagatacacacaataccagttcaaacacatgggactggatttcacttattaaagaagttaacttggttaaaccagaactcttatcacgtggtctgagagcacacaaggacctcactcaagcctgtaaagtaaaggaaaccaaagacacaagacatctattagcaaacgcaaattatgtgtcaacccgagtatcatacaagaatgtgatgtgtttaccgcagagaaagctcagggcatcggattaaacatcgtgaaggtggttgaaactctccaactgcttgagattctcccaagctttctccaaaaccttggcctcatagaccttattggtctcaccatcagccacctccacagttagatggtgcattgttcctgccacaacctgtgttttcgcaccaaggagcctcttgtactccagagtcaagttctgtatacataagagagatcattgcttaaacaagaaagaaaaaaactcatcgcttattataatctttatttaaacaacacaagaggatatatgtttctcaggtagtaattgttcttataaacattctggaaacaaaatcttcaaatcaacactagtacagaagcaaatgacacaatccctaaattctcaaacaaaaaataacaattcctgatgagaatgacctatatttcgatagatcgaacgagaaaaatcagcgatttgctaagagataaacttcgatcatcaaccaaacagattttaggataatgaaggcaggaaaagatgggagaatggtacctcgttcttgttatgctcatcgacagcgaaacgagcgagactctcgacttgaagatcattagcatttgcatcaatatcgcgaactcctccgacgattgttcctgcttgttgatccgccattttcgtctctttacttttctgatttttatctcaaatgtttttgattcgtatctaaagtctaaaacccaaagtgttattgttatatatagagattaaagcgcgtttttttctttcccttcaagaataattcttccggaataataaaaggttatgactcattgtagcactaactagagaatctttttttacttcttcttttcaataaactgaatttatatgtcggccaaccatttaaaatgtagaaacaaaaacagaggaaatacacacaactttttacaaacctcactcacataaatcacactaacaacgaagcaagagcaaacaatttctcatcaatttcgtggtaaatatatagttggtttaaccttgaaccggttttacaagcatgaagagtctgcacagacgagactttctttacatttttctatttttttggacaagagcttctcaaagagcctaattccatggtggagaagaggatcggtgcagagaagaagaagaggaaccatagttgaggtcaagattctgaatctgttccataagttgtgaccgtcgttccttgaagaaatccagacgagtggttagctccatgagagctgcagatgttgcaggaggatgatgatgtcttccgtagtccattacctacaagaccgtttactcacactttttacacatttgaatctcgtgagattggtttaaacaagactatcactaaccggagaatactcttccattgggatgcctaaggatgctgcattcaagcttggtgagcctggtacttgtctgttgtttcctctgccattcctccagtctgctcttaggctagtttcatcctagattattcgatagcagagaatgttactgacagataatagaatcattttttataagataatagagattcctcggttacataataagatttgtaccgttctctgatttctttcgtgattaacgaaagcaagaatggaatcaaagtcctgttgaaaagacttcctgcgaatttgaaaaaaaatagattgttatttctcttagcgagtttacattcgagtaatatctcgtttgaactattgaataagagctagaaccaggcatcgagtgtaaactcacagttgagtattgtgattatggagaaactggtgatggctttgagcatctgggagtgaacttaagtgatgctgtcgctgctgacttagctgatgatgtaattcggcgactttctgcttcaaccttgcgacatcagcttcagcaagagcaatctcctcaagctctgcccttgtctttgcattatattgtgatgttagaactaaggaaagcaagagatagaaccaaaaaaaaaaaactgctttctctagctaaagtgtatactgactttggaatccgcagcttgtgagctaaattgtccacaagaaatgcttagaccaacttcaagagcagatcgtaggtctctctcagcttgcagttgctcttgtaatctacccacctgacaatttcatggcaagcttggtcagcaaaatggaagtttatttcccctcaaaattataccccaaaaaaaatagaggatagaaacgtaaaatctcaagagaaggtttatacatcttgttcaagtgccaaccgtcgttcgtgcaaagcctgcttccttctctccaagctagcttgtagagccgcatttcctttagcctgtagtggtctaatcaatcaatacaacaacattatggtatcagcacataatacttctagtgcaagaacaagtacctccttagcgattcgttgtcgcagttcatctttcatgtgctcgagcctctgtataagaagcctacaagtagcaaacgcattgcatcaggatacatcaagctcattttagaacaaagaaaaaattattttctcaattcaaaagcgaaatagaatgttgcttcagtaaatacctttttgacctatttaacctatttaaccatacataatatctcatatgggtttcgccaatagaatatatataaaaaggtttcataggagtgttaaagaaccacaatgtatacattcaggatgagttatcttactcgtcatttcctgaggaatcaaatgatcctttagcaggtgttttcttgccctgcacacagtaaacaaagaaaagaattgagatatcaccttaaactcaatttccctacaactatttacttcatcatacatgcaactaacttgtactaagataatttattccaaatagatgggacttccagtaacatctaattttcctaagacgctgatggttagttttcttataggattatgcaagtggaaacagctcatctagcctatagcaccaataagcatggcattaagaaaactgaagggaaattcatatcatgacctgacaacgatagagatcaggagaactaatttcgtctagtggtgatcaaagagttacaaggacagacaaaaattacaaaaaaaaatcctataaatacttaataaatgcatagcaagtcagctccagagactaggacaacagaattcgacttttcatgccagacaatggaaaacttacgttgcctcttccccaggacgaagaacgcttcgaatttactgttgatgagccagtagttttacttgcaggtttctcagctgatgttgtgtatctaagggccgtgagaggagtactgggagtaactgagggtatagcctctctccctgattgataacagttttcagtaggtgaaacgctagaaacttctatatctttaataggttcttcaatatgttttttcactctagcggaaaagtctgtactctcgactgaacaatggatatctctaggagactcagcatctgaatcttcaacaccaaaaccctgaaagaaaaagcatattaaaaaaaaagaataaattaggataaatttttctggcagtttcgcaatggaaacctaaatttcaaacaccaaacataactaaagaccacattaggcgtaacgaaagatagcaagacagtagcagatggttgacggaatgcatacaaatggaaacgacttcaaagttcaaacttatcccctattttagaattctgaatgtaggtgtactatgaccaagatttatggggcagtggagtaagatggcaaagaacaaaccttgtagtcatacagatcactgccagcataatcactgctctcgcttggttttctgcttagcagaacatcattatcatcatctgtttccccttcttctatatccagagtatgcaagtcaggatgtttaaccactatttcctcttcatcacttgagttctcaggcccactgtcgccaatatgagaatcagtagaagtggagcatctcccaagaccttcatcctgcaaacaaataggtgagcaaatagcattgtggcaccagatataaattaacggggcaaatggaatcttacattgatcatattcccatagtcttccaaaagggctgtgacaatggcttgagcattattggcagcattggcggcagcaagaagctgggcagagttatctcctagagtgtcaaaaccttctagatcacattctccagccaatagaggacgtaagagcaatggggacatgcatgcagcaacagcagatgaagtcatgcgattctcactggaatgagaggtgatagtatgcatcatctttagcatcctgcagaatacaacccacgctaagaataaagctgttttaagtaacctaaataatagacttccaagcagctttctgtgaaagcaccacatatttcccacatcatatgcaactgagtattaagttttcctcttatgttcaatgcttaaatagaatgcctaagcagttttatgatcatttcaaatactacaactgagagcataccgcagtagtagtcgcctgtttggttctggaaatgtttcaattatagcagagcgcagtgagttaacccgagcttcgttctgatcaatttctacagaaaaggtaaaacgcaagttatatacacacatacaccaaagtacaaacatagattccatacatataaagacttactataagcttcaagcaaagcagtgcagcacgacgctgggactggagaagaaggcaattgccgcagaacatgctacagaaaaaatagcatgacacaaatatgtcaacacaacaattaaaactggaaatcatagtttatacacaatgtaccttaacacagtctccaacaacatgcggatcctcttcaggactgaattctgtcttgcctagataagtacatttggaaattttcatttaaaaagaacctttcagaggaagacatcggataagtaatacaaaaaatgagcttctatcctaagcccccagatatatataacatttcaaagtttctacccaatataaagggtccacatgtggaagatcaataccttgttcgtattcttgaactctgcgttctacctcctcaacatctgcagactgtcttaaaattccttctactttggttcctgtgtcaacaaagaggtgcacaatcaaaacgaaaacatttctatgggaaattagaaacaatcaccacttctataatagcctatatgatgagttataaaaggaattaaaaagtatatacggcactgaagataatataaaaaaatcatttttctagaggacaaacaacagacaataatgatatcagatggtgaacatataatgggaggaacgtaattaaactatgaggccaatactcaccatatgtctcaagaaattgaagtgctttctcaagaaaagatggacttccatcgatttcttctaaagctagcaaaattggtcttccaacaaccgaagacttcaacgggcgctgatccctccctgcatgtcagggtgttactgatatacatcagaaatatgaaaggagccatagcagaggagctgataataataaaataagtgagaactaacatgaattgaaagatgcttcaatagtattgtttgcttctgttcggaatattccattttgaccaattacaagtgctgcattgggagcttgtgcaagggcttgctcaagggcagccttccattcatacaagtcgtccaatgtctcagcctatgagagccaaataattagcattcgatagaagcataacatagcacatatcgaaaaagggggaagaaaaattaagttagccaagcaaatatataaatcaccttaagggtgaaggctcgtccatcacgcccatctgggaatagtacagtcagcaacttcttatcttctctcaccacgacactgcaaacaaggatgttaacgcaggctagaaagttggagctattcttataaacaaaaaccacatgaaatttctacctccccgaactgttcaagtcaatgcctccaagggtcaaatttacttcacctcccttttgtggtaatgcactctgtcaaacagttgaaacaatgagtttaagttataaaatagttctagaaagtttggagttgataatgtaaatcaacatcctcctaaagcttttagcaaattaatacaaccatctaagatttctattgatcaactatcctaagttccaaaagctcaacagtaaaagtattatatgaattggagaaaaaatcacatcaaaggatcacaaacacttactggatcatttttgaaaaagaccaaagaagttcgggtaaggataaaccaacgcttcttccaggatgtccaacctagtcctgccaatcagaatgccataaagaatttagtaaacaacaagatgcttgtaaccaaaaaaaagataattttgaaagaaggggaaaataaaagagttcaccttttgatgatatgaagagagggccactcttataaacctgtcaaaattattatggagtacaatgaagattagcatcagtttgctttaactgtggaattttcatacaaagcaaaacactcagagctacatatataagaacgaacatattttagaacccagaaaacccccaaaagatgcatatattcactggcactaactcggtcttaaacaaaaatcgtacatacacagtgtcacatatgctttgaatacgaaacaaacacactaatcttatttatctcatccagtattcaactttcctaacaaagcaagcaggaaccaaaccagagactgtaattaccgtattcgaagctccagcttgaggcctctgtataacagctagagaagcctccattgcagaagtacacacttaatcaaaatgacgcatcagaaaaagatcattcgtaagcggaaaactaaattgctatctctcaaaagctccccagacgaatcaaactatacacattagcccgaatcgatggcttgttcaactcccatttccaagccaagctttcccttactttgcagtgaattcactacaagagtctgacctactgcacagctacaagagaagatgagtgaaggaggggaaggcagggaagggaaagttcaggcacagcaacgtgtagtctagttctatgcattgggccaatcaaaagacgccacgacaaagacatgtcttttcccctttttttgtcatactttcacattattattatacttttcgcatctagcggtgatggtactaatttcggtcccgtgttggtttggtttccatttagggttattcggtctggtatgattttgattttggattgaaatcgtatttgaaaagaaacaaaacaaaaaaagggaaataagttttgaactttttggttcaattcggttcaaattgtatcgatattagagctcacttcggttttcgtatatgttttttctttaaaagaatttgttccaaaagttcatcaaaattggtttaattcgaaaagctagatgttaagttcaaatattcatataagaatgcagtatgtatataatgttgtattatgtgatcctatatatataaacacatataataagtatttcagatattttatcataacttgtcaacacacaactttgagccattcctcatcaatcaccataaaacatcacatgaacatgaacttagcaagccaaaatcctaaattctgcgcatggctaactacttaacttggtcactatcgtatcgtccaacagttttttagtataaatgtttacgtttttttcaaccatgcatcacaagttagatgtagtgtacataagagttcacataacaaaagagcctaaaaacatcactacaccctacaccttgtattaacgtaaatatacactagatatggttgatcaaatataccatttcaaagattaataataaattctaaaattatagttgaagtatcttcccctcataaaaaaaacgaatatattcaataaaggaactactaccacattacatagagattaatctacttatatatctatttttatttacattttcaacaacataattgtagaaagtgatgtgtaaacaacactagcacaaattaaatcattacttattggttatgttttctattaaaagtaggaatgtctaaaataccgataacgggctaatttaaggtataatcactttttctgaaatttcctgataagggttaaaattgtcttttcgatgatttaccaaaagaaaaaaaaacatttgtcgtattttgcaaaacaagttgggcagcgtgtgttaatgcaaattgtttttaaaaacaaaagagagagataaaaaggcaaagtccaagtcagcaactcacttccgtctctctccccctcaaaaccagcagaaccagtctcactcgatccttaatccaccatggcaacgacttctcgccggtttaccaccggtttattcgcctcgatcacctcggtcaaatcccattccgcaaaccgacctcaatccatctccctaatccgtcgaaaccacatcgatcatcgtctaccgttgatcgttccaagttccaggcggtggattatccaagcggcgagatcctgggatggatttgacgacggagctgaggcggagattaagaagccaggcgcgtatggttacgcgatcggcgataacgagatcgaagggagcagtagtagtactgtccatgtgatcgacggagagcatgttaagacggcggagatagtgatatgggcggcggttacggcggcgtttggcgtcggaaacagagtgatgtataagctcgcgttagttccactcaaggagtatcctttcttccttgcgcaactctccaccttcgggtaaagtaccatctctagcatcttgagtcttgatcaacttctgttttgcttactctcaaaatgcattaatttttttttatactagatcatagtattatatctcttaatctacctattgaaatctacttaatgtttttactaaaacctacgtgtttctctttagagaattttgtgctatgcatgaattagaggttagtaatgtgtaatacttcataagtctagatttatttgttggttaacacgtttagtaattcacacacacacaccaccttagatattttactgtgaattagaaaaagatacatagttaggagtgtttttttaaaaaaattcaatcatgagaaaattagaggtgtgatgttatacattatgaaaatgcaaagggcagatacgaataaattagaaacttgtttaacgggtcagagttggcttctagtctctttcgacttggatacttcttcttctacaattgggacattattgtaggcgcattatatcatttctctacatgcaatgaatgtacatacattaattcacatttatttttggaataatcatatgagtgatcgaagtttgtatttatatattcaatcttcacaaactacttttatttaaaaatcatttgcaaaatgctattttattgacaaaaagatatatgctataaaataaaataaaattcacaaactatagtcattaatacaaaaagaaatcattgaatatggtagaggggaaacaaaaaaaaaacacgacgatgtaagttggtggaaccacattatcaaaataaaagaaggtggtggaaccaaattgaataaagtccgtccatatcattatccgtcccttaggagcctctaattagtaatattcttatgggtccactgtggcttagaggacttgattaaaaccattcttatttagtgctaactttgtgagggttggaataacgaaccaagctgattcaaaccattccaaaacaaagttgtcacatattttaaaaccaaagtttaccggacagagaaatatggtgtgtttttctcaaaccaagctaaatggaatccattgtaaaccaaaatgttcacacctacctattcttttggagtcccttttccatgtgtttgctgtctgctagtcaagtttcattagctgattgccttgcatcatattcttggatcaactttttttttttttttttttggggtaattaacaaaatgcttaaatttctcaagactataggatcacattacctgtgtgcttaacataacttttagataggctagagaattgatctattacaagataatcaataatttacagaagaaaacattcttttttttgttctatttccttcatgtaggtatgtagctgtatattatactatcttgtattttcgatatcgtgctggaactgtcacagatgcaatgctctcggtgccaaaatctccatttttaattgttggcatcttagaggctctagctgcagctgctggcatggcagccgcaggtaacgttcatctttatgcaaatgtcttatattgtctagcaaaaatgccttcatctcttacgaaacagtcttattgtgttttcattttctttactcagcgaatctttcggggccatcaacgacagttttatctcaggttagaagctgtataagtaaaaatatatacttctgtatttgaaacttcttggttttaaagtgtgaatatagctgacaaatgtttttgcccttaaaacttgaaaccatgttttcatgatattcttgctaataacatactcaactgtttccttgtagacatttcttgtctggcaaattttcttctccattatttttctcgggaggagatatagcgtaaaccaaatactcggatgtactcttgtagctctcggtgtaatcgtcagtgtggcaaggttagatctgcttttgtacttatcttttggtattttcacaacgaattcacaagaggaatcaccattattttttttgcatctgtagtggatcaggtgctgctcattcattgaatgaagccggagtattatggattcttctaatggttctctctttcttgcttcaaggagcaggtacagtattgaaggtccgttactcacctatttacaaacctttgaattttggtgacattattctccttaatctcaaattcctttttcttataggaagtcatctttatagatagccaaagacgattaaaggtacattacaatccccaacaccacattatcagaagtttttatatgtttgtttgaaagactcaaaaatcatctactttttactaccacagggtgcttcactcgatctatttatagtaaattcatatggttcagctttccaagtaagtgtttcaccctaaaaatttctctgtaaactatgacttgcattccaagccaagtaatcttgtctctggtggttttgtttccttaccaattaggccatctgcattgcgttgcttcttccatttctttcaaaactttggggcataccgtttaaccaactcggtacctacctaaaagatggtgcggtttgttttctcaacaatgggacaataacaaaaggatgtgatggggctccgtttttgcctctgttgtttgtgataatgaacattggctataacattgctcttttaagactcctcaagatttcatccgcggtggtttcatgtcttgcatcaacagtctcagtgccaattgcagtgtttctgttcacaatgccattaccgtaccttggagttgcatcatcactaccaaaagggttcatgggaggaacaatcatacttgtattgggaatgattctttatagttggacaccacacggagctaactcttctcatactgattcagtcattccttcacctcctccaacatagagagggcttaactaaggggttttgcttttatataaagatttgagagatttatgcaaattcggtttgtgtttaaataaacttatatttgatcatatgatgttaatggaaaagttgacattttgtgtgtgttgcgttcacattagtattctagttcattagtcaacggctaacataatcttgtcttcaagagttgttaccctttaaacatatcactacaaatcgtgtgctaaaccatttaaaagacaaatcaaaacaaaataagaagaaaatagcctgcaacaatcaaagttacttcatcaaaattgttaaatagtaaaagactaagcaaatcctacaaaccactgagttttcttaaaccatttgattctacttgtggcaaggtctcgaagacaccacaagttgaaggaagactaataatatttagctaataaaggtcatctttaactaaacagattgaatcactattgattccgttaccaaattcttctaccggtgcttttagtgtaacccccagaccaaatatcatcatctccaatagaatctactctttcccatttgttactctcaactctcaagattcatcttaaagatgtaaaacaaatgtttctcttcaactagcttttctaataaactcaagatgatcaaaacctcttctgttttctgaatcactattctcctcttccaaatgtactcccactcttttgaaacgtactcaaacggatgatcccaatatggggtttcttcgacttcttctttgggaaaatctccagagaaatcgacaatcttgatgtgatcatcagaagtatacagataaagcttgctgttcttataagccagatcccaaaaacccaaatttgcgcctcttgtataccaattcaaccaacaatcatctcctttcttgtgtgtgaacaactcaagcttattgaaaattcaagcaacgacataatctcctgttctttcgtttatccacagaacagctgctctttcgcttccgaagatatctttcgacacacgttccttatgataagactcaacgaaataacctcactcatcaccaccgcttcgtttgaatctcacttgtccaccgcgtattgacgtctccattgatggaagattgattctttcgcccggtaacatgttaaagatagaaaagtcgagataagaatctaccatcaatagacagtttccgaagctagccatatatataatagctcttgtcagagattccaaagagtttcgcgttgtaaatcttgtcttctccgggatcgaacaacatcgaagattcattatggtaatatgaattgccatggatacagaggccgcttcacgcatgttttccaaacggagaaccactctaagcaaacgttttttatacggtgaaaatctatagtgctcaagctttcgattatcggacgtaaaagattggaccaatcttgattttcagacattttattcactcatcaaatgtctgcgcttacatcacactaatgggagctatagggttagggttttagggtttacaaccaaccctgtacatttccctttttgatgttctgcttttcactttgataattaactgtattttatattttactttcttcctaaatacaataaatttcttaacacattcaaaatcccatgaattagaaaattggttttcacatgtttcagattgatgaatgaaaattctcatacacctgattacgtagtttcttatgagatacatttataatcatatttatataagatttaggcaaaggttctaatcttgatttttatgagtagttgtggaatatagaagataagaagagacagttatgtaacaaaaattaaaatcccagaaattcctctcaacctttgtcttaaatccctaaatgttgtttttactttaaataccaaaattacagacacgttttggtcctaaactttctccctatcaacaaaccctataatcctttgaaccgaataccaacgaagaaaaaaaaacattctattcatagccattcacaaccaaaacacctaacgttttcttgctaaagaagaaacaaaaaccagaggaagaaaagcaaaaaaagtaagagaagaaaaacacaaaaaaaaataaaacctttctatttctcttcctcctttgagctttgacctctcctccatctcccccacccttttatgcaacaatgggaaattgttgctctcacggacgggactcagccgataacggagacgcattggaaaacggagcttccgcttcaaatgctgccaattcgactggtccaaccgcggaagcttctgtaccacaatcaaaacatgcacctccttctcctcctcctgcaaccaaacaaggccctataggccctgtcttaggtcgacccatggaagatgtaaaagcttcatattctttagggaaagagctcgggcgaggccaatttggtgtcacacacctctgcacacagaaggcaacaggtcatcaatttgcttgcaagacgattgcaaaaagaaagcttgtaaacaaggaagacattgaggatgtaagaagagaagtgcagataatgcatcacttgactggtcaaccaaacattgtggagcttaaaggggcttatgaggataagcattccgtgcatttggttatggagctttgcgcaggtggagagttgttcgataggattattgctaaaggacattactcggagagagcagctgcttcgttgctaagaacgattgttcagattgtgcatacttgccattccatgggggtgattcacagggatttgaagccagagaactttctcttgctcaacaaagatgagaattctcctctcaaagctactgactttgggttgtcggttttctacaagccaggttttttcactggaatcatcaaaagcccattcctgctacttgaaccagcatcgttgtaaaccctgcgtgacaaataaaagaggtcatggttatactcatataaaatttgtttccgctgtgttacaggagaggtattcaaggatattgtggggagtgcttattacatcgcacctgaggttttgaaaagaaagtatggaccagaggcagatatttggagtattggtgtcatgttgtatatcctcttatgtggtgtcccgccattctgggctggtaaagatattccacagttttttctttatgtgtaccaaaagaataaacatatctagagatttttctatatatattcatgtcttgtgtaaattacctgatcacagagtcggagaacgggatattcaacgcaatccttaggggacatgttgatttctcaagtgatccatggccatccatctcgcctcaggcaaaggatcttgttaagaagatgctcaactctgatccaaagcaaagactaactgctgctcaagttctcagtaagcatctacaaaatatataaaaactgtaaaagcataacaatatattatctctaatgttatcttcctttgtaaagaccatccatggatcaaggaggatggagaggcaccagatgttcctcttgataatgcggtgatgtccaggctcaaacaattcaaagcaatgaacaatttcaagaaagttgcattacgggtaacaatcatatatcccttacccaatagaatatgactatcagtagagtatcctaacctagaaacctgaaaccattggacaggtgatagcaggctgcttatcagaggaagagatcatggggttgaaggagatgtttaaaggtatggatactgatagtagtggaacaattacactcgaggagttaagacaaggacttgctaagcaaggtacaaggttgtcagaatatgaagttcagcagttaatggaagctgtgagtccttcttgtacttgcaagagatttagctttagtcaaatgccgagcaacagagtagggaggggactcaccactaattttgtgtttttttgctctgtgtatctacaggctgatgctgatggtaatggaacaatagactatggcgagtttatcgcagccacaatgcatatcaacagacttgacagagaagaacatctttactcagccttccaacactttgacaaagacaacagtgggtaagtacttgacagtacagtttgttatataactgattccagactttaatcatgaatatgaagcttatgaaacaaaaatccacctcgctctctgttcccagatatatcacaatggaagagctagagcaagccctacgggagtttggcatgaatgatggcagagacattaaggagatcatttccgaggttgatggagacaatgatggtcggataaactatgatgaatttgtggcaatgatgagaaaaggaaacccggatccaatcccaaagaagcggcgtgaactttcattcaaatgaacacaattgttgaagtagaggaagagaggagatagaaagagagttacacacaggggtcgagaaactcatcttcctttcaaaatgagaaataaggcaaagcaaatatcaaagaaaattattctaaagtggaggagatctttaagggaggagaaggctcaagaaggaaaacaaaatcatttggggcatttggggggaggtgtttgatataatgtacattttcttttctagttgtctactactgcttaaagtgccatgggtttctcaatgtacttcaaaaaaaaaaaaaaaaactttttcaattctcttgtatgtgttagtgattattcgttctcatttcctagcaaaacagtgagcaccactttggaaaagaatcgtagctaaagacaatatatatcaatttattgttcaaaagttctgcttaagaactcgattcattagagagaaagatcaaatgaagagcaaagccagaaagagtcatagaaaaatggaattcagactaccaaaaaaatgaaggataaattagttataccttgatgtttggctgcagtgcgaaaataattccatcttccacataaacatcagcaagtgcattcaatatagtacccctcatttgatcaaaatccaactggttgacacaccacaccatactctctccctgcatcataaaactgtaaacaaaaagatgctcaactctgattccaaacaacgaccaactgcttgtcagaggaagagatcatggggttgaagtttaaaggtatggacactgatagcagtggaacaattacactcgaggagttaagacagggacttactaagcaaaggtacaaggttgtcagaaaatgaagtcagcagttaacggaagctatgagtacttcttgtacttgcaagagtttcaacgccgagcagcaaggagactaacactattttctgtttttctttattttgttcggctctgcgaatcatacaggtcgaggctgatggtaatggaacaatatagacaatggaacgtttatcgcaaccacaatgcatattaacagacttgaaaggggatttgggagagctgttgaattatgtatattttctcaatgtacttaagttcttctttttcaattctcttgtatgtgttagtgatttttcgttcttacttagttcctagcaaaacactgaacaccaatctcggaaaattgcatcaaagcacaaaaaaaattgtcacagcaatagctaatttgggattaaaagatgtatttttcattgcttggtcgatgtaaatgacaaaagagcaaaccttacataaagaactccactaaattcatacagataaaagaaagtttcacatctcccagaatttcaaaaccctaaattgcagcagtaacagaacgaccataagaagatcgaattcaaggacaattacttatctttggtagagactccatacttctcctgcaacttggtgatctcatcttcactcttcttctggtcaaacttcttgctcatcttcgcgtgctggtagtataacacgattaggtaccgattcgcgacgttgaagccagagagatggtcgacggcgttcttggcatcgtagatatcctcgtaaacgacgaaggcagtacctttcgtcgccttgtcgcaaccgattcgaatctggcgaattgcgccgtacttgccgaagatatcgtacatctcttcgctcgttatgttaaagggaaggttacgaacgtagagcacgcgattcacctccggtgggagtctggtgttactcttgcgaagactgattgttgtcatagcttctcttcttcttcttttccttcctttattagccggtgatttgttatcgccgccgtgaaaaaagttcttctatcggaaaatgaaagttaatagttctgattacgattgatgcgatgcgagtatttatagggtggaagaattaaagggtataatcgtctttccgaatgcaggcttgggggattttgattgacgattttatgtaaaccattaaaaccaaaagtaatttaccaaaccgatatctatttctggtttgatggcaaaaacctgaacgcctttcagtgttgatcaacctactaaaaaagcagccttatatacctgtgcggcctccagctcaaaagcttgattattggaaacagtaatgtttaaactaagaagcttttcgcatgtctcctctttttcttctaatacacacaggatttgagataaagagaacatagactaattaactcacggataaattttacaatcttttattttttctcaaaaccagactacatgcacattattcataatcgctctttcaatacttttaatacaaattatgtacaattgttcttacagaatcacgatatgcagatagatacctgcactttacgtagcttcagttctgacacgcttaactggagctcgaagagaagatagataattagcatctgatttctcaataccatcgaaaaggtaactgaaaggaggcatctctatatacttgccacttcttggaacaactttaagttcctcgttttcccacacaattcgtcctcctgctattgtcacttcaacttttccctgagatttaacaatcaagtccccaataaaataaaaggttatgattgctcagagattatacaaatcagtaaagacgaattgtttgtaaaaagggtatcattacctttcctcttctgccctcgtagacgtttgtgtctgatcttgaatgatgagactttgagctaatctcgtagcttgagtttggattcaatatgataatatctgcatccgagccagcaaggatagctcctttccgtggatatatgttgaaaattctagcactgacaaacttaaagtcatttcaaatgcaaacacataactttcaagtaaaagctcattggaaaaagcaaattttcaacattaaaaagaagcttcgaaagagcatatataccactcagtgctggttattcgaacataatcagtagctgagagttggccagactcctggattaggatatacagaaaacgattaaaacttctgtacagaaagaagaatttattattccacaagtacttaccaccatcgtgtcccatatcaagtgcatccgttcctcaaggcctaaacatatggacaagttcaaaagtatttacaggttagcaggggcagtgagcagagaaagcaagaaaccagtcaagtcagctattaccattaacaccattaggtattctgcggaaatcatcaagtcctagagctttttgtgtagaattgaaagtgcagtgatcagttcctacaagctgcagagattatcccaataaaaggagaaaaaggtgtttagaagatcttaacattttgatgctacaggtcatgcaattctctagtttatgcacagcgaggaaagaaacctgaaggattcctgtggaaagggcatcttgtagggctttcccatgtcctactggtctgataggtggactcatgacatacctgaaatattgagaaaaactttgaaaatctgaaagaataaatgggaatcatttgattaacagaactgaaggatttattacttggacgcaattgtgaagtcaggatcccaaagccaatgatcatcaaggattaatccagacacaacaggctctccaataaccttctgtcctgaaatacataacaaaaaaacttttcatatttattaagccaaatactaagtaaaaatttgaaaggtacttttctacacatatgttattgcactagtggatgttcggataggagattgatttctaacaggataatgtccatacaatgagaaaagcaaaaggttagtcctacatgagttgtaacagaaaacctgattttcgagctttagcaatctcgtccattgcatcaacactcatcacatgaacaacatagagaggcgtgttaataaaacgagccaaacgaattgctctagcagtggcctctccctcgagctgacattgtcaaacaaggatcttgttttagtagcttcaacaaagctttacagaggcaagagcagatataggagaaaagaaaaaatctaggaggcagtataataaaatggaaaatgcttgacgcaaattaccacaggaggccttgaaagagcatgaccctctggacctgtaatgcccagttcaatcattcttttctgtccttcgaatactgcatctccattttcagcatgaaccatggccaaggcaccgagggatttgcatcttttaagtccttctaggagtaggtcatcagttaccataagagatcctttatacgctaggaaaaacttgaaagagttgatacctacaaaatttagagatatatgcactcagtttcatcttagcagggaaactaaagggatagaaacaccaaaactgtgaggcatcaatgtgtcacaagacaagacatttacccttttccttgaccaacatctccatgtccctggaaacaccttcatcccactttgtgattgccatatgaaaaccgtaatccatacaagattctctagatttgttttcataggcttcaaaaccagccaccagattcccattgacaggtataacaaagtctatatgcatagttgttccaccagctaatgccgctgcctgaccactgaagaaatcatcaatagtctcggtacccataaattccatggcgaggtgcgtgtgggggtcaattcctcctatttacatcagggacaagagtaagatgaaaatgctaaccattcttaattagaactgaaactagttaaggattcaaaacaaaaggctaaaattttggaaagtatcaactagtatgaattgattaacctggcatgacaaactttccagtagcatcgaggacagtgacttcatccccaacctgtttacataaaaacaaacagatcaaacttggaatttagattctcacaaaagatgaaggacagattacaagggaatagttagaccttaatgtttggctgcacagcgacaataataccattttccacataaacatcagcaagttcttgatggtgtgcattgacaacagtacctcctttaatcaaaatcctcgtcgatgaaaccccacaagatcccacaccattctctctccctgcactacaaaactgcaagaaaacacatcagagagatcattttcgattttagacacatgtggatagctttttttccagaaaattataaatcaagctccaaacttgttcttgaaagttactgtgttaagaactagatgttataagtggacggagctttcagtgttacttcaaacaaatcaaggagacaaagctcgacggaaactgatatctgatcattattacaaggttcaaagacagacctgagtagtggattctgacgcggatggtgacggaaacagaagaaatagagagacgatgaagaagaatgcatccagagccattgatgattcagcttctcgcgagtcttgcttgattcagcttcctatcattgtttccattctctttttgttattggccgatcaattggaaagtcaacggaaaatcaaatcatttaataaaaccggttaaaccggatttgaatttcaattggtttttgccaaattgcagcagagctggccggttcgcggtttcaatagaacccttaaggtaaggtaagggattttactttgcccttttagttgaatcaatttttgaaaaaccctcacttattcttactaccccatctccttcttaacctatttgaaatacaattttacccttctcctttatcctttttaattttctatttaagttttgctaccaaacaatctattaaaatcaaccaatcatttacattttatttcctatctcattaatcagttaaacctacaaaaaaacgctggacaacagaaaccaataggtacaactatgttgatgaacttctacgaaaaacatataattacatatcgttttatttttctctttcattttcaagttataatcaaaaagacttcagtcatacgcgtttcttataatggatactattaattttcttgtcgtatttatacaaattaatatgttttgtattggtacaactaagtacaacccgcacaactaaggtcttttcacttggctagttttcagaatattataaaatatgaaaatttaaatccaaactaagaaaacttaaataatgcatacacaatggtaatgaaattacataattagtttttgacaaaaatcatattttctaaattaatgaaactcttatcacaaaatctaacattcatacactaacaaccttaaactttcatggttactttgtatattttaacaaaacaaattaaaaattttaaatacttgtaattagataaatataaatacaccgatacaaagtaattgtattttgatgggggaataccatatgttctacccataaaaattaattttgagttgataacaactagatttattatattctcgatattgtacaactatgagcaaaaatgtgcaaccgagtacaactgtacaactatgggcaatatatttttcagatatttatagatattttttagatatttgtagatattttataataaaaattagctttattcttttgtgataaaaatatttagttttttttgtcatcaaaaatacttaattttatagttaaataaactatatttttccctttcaaacttttttttcattttcaaaacactgttatttaataaaataaaatactaacattcataaaaaattttgtgttttgttttggatcaaaatacattgacgtgtagattcatatttattttggagttttttttgacaagaaatcttagattcatacctaaacccagatacataattgtacatgagcgtaccagttgtacctaaacgcttagatctattatcttaaaaaccaaaagacagccgaacaattgtatctaaacccaaaaacccaacataattatatctaaaaatttagccacaattatacctaaacacaacactatctaaagactcaaacacgaagtcttcttcttctctttgtcattctccttctcaatttctttctccacagctttctccttcttcccttttcttctagtttttatcattcaaaagcaatctcataatattttgttttaatgcatttcacaaactgtctctaaggaacaaaattcaaattcattcgaatcccaattgtaatcctaaaaactaagtcgtaatggctattacaagaggcttttaagggacaatttcgattttaaatagataattaattcaaatttgaattgtactcataaaaatctaaattataatcgaaatttcatccaaaatccatcattttcaaacaaaatcaaagaggaaaagagatcaaactatcaaatctaataagaaataaaactctaattaaacacaacaccatcaatcatcatatatggaatagagatagatctttggattgatagaaacaaatgaaaaggtaaaaaagatggatctttggattgatagaaagaatgaaaaggcaaaaagaagacgaaagattatatatggaatagagagaagagagtaaagagaagaagaagaagaagaaacaaatcaaaagttttgtttttgttgaattgagagaaaaataaattgagatgaaaaaaatttgatctgagaaattaaatttttttttgttgagaataaaagatccaaaattgttatggatctagatccaacatagaggttgggttgtaaataagtaaaaaactctagttttacttgtcttttattattattctgatttaaaataaataaataaacatatgtttttttataaggggctaactagagaatgtttgaagctgagggggtggactagattaaaatcctaagctaaggaagaagaaggttttgatgttagtgaaaggttagattttttattccgatcttggtcagtctcctccaatcgtgatttctcttctggatccaagctgatgagctctacgtcttcctcccaggtcatcactcttctctttttatgattgtgaacttgttttcgatggttttgatcgatttctggttcagttttttttttatccttcttaaaggattttatactatagatgggtcgatcaagtgttattgatatgccattgaagtgaactaagcttgaaatgagccaagttaagtcttttatggggattcttacgaagttactgaatctgatgtgaatattttgtggcagatggttcagctcgtagctgacaagcatgtacgttacattctgatggcagaaaaggtacctagaaactgtatagaacctttgctcgttttctctgtttatgtcactgtgattgtatagcttatgttcttcttttcaattgctttttgaattttatttaatttgctagaagaaagagagttttgagtctgtggtgatggatcatctaagaatgaatggtgcatactggggactcaccactctcgacttacttgacaagctcggctgtgtttctgaagaggaagtcatttcatggctcatgacttgccagcatgaatctggtgagtacttgagtatcagatcagctctttttttacttactgatagaatgatgtaaaaaaagggatacatgggctaggcagtgaaagcaggtgtctttgacaattatgagaaaataatcattggctgtgattgctatataagaactagcaataagatctatggggacctttaaagttgctgggtggtttcatattttggttcgtattcataagatgtcgccacagtcgaagttgaaaacaagttgttcttttctgagcaggtggctttgccggtaacactggacacgatccacatatcctatatacactcagtgctgtacaaatcttggccctatttgacaaaatcaacattcttgacattgggaaagtgtcaagttgtatccttttgcacttagctttttgtcaatgtcactaactcgttcttcttcacaaatagtcatggtggaactttcatatgttaattaatcaatgatgttaaacaagaaggaaaaaccctgccttatagtagatattattatgttttcctatatacaatattagatgttgctaagttgcagaatgaagatggatccttctcaggagatatgtggggagaaatagatacgaggtgtttttccttgccatgtattacaaagacatttatatatttcctgttggtgatttcactatgttgaatcttaacagcaagctgtttatgcaggttttcgtacatagctatttgctgtctctcaatattgaaatgtcttgacaaaatcaatgtggagaaggccgttaagtacattgtgagctgcaaaaacctggatggtggttttgggtgcacacctggagcagagtcccatgcaggacaaagtatgttatgctatttgagtatttttctgtgccatcttcccaattgttacttgcaattagtgttataggtgactttacagaattaacaaggccaaccgcatcactgccgtttaactattccaatgactagatactcagatgtttatttttctgtagtcgacgtgctattgatacatctttatgtaaattgtataggacagtttcatggttgggagatatggtaaaaagacggtattctttatttgtttcttctgttactgcagttttctgctgcgttggtgctcttgctatcactgggagtctccatcatgttgataaggactcacttggttggtggttatgtgaaagacaattaaaggctgggggcttaaatggacgtcctgagaaactcgctgatgtaggcattaagctcatctccaatgagagagacctttgtatgatttccttggttcttacacattttttactgttcttatttccaggtttgctattcttggtgggtcctatcgagcctaatcatgatagatagagttcactggatcgacaaagcaaagcttgtcaagttcattctggactgtcaggttcgtctccaacaagaaaattcatatcgttactaataagccagttttgattgaaagctctcatctcatctatctaaatttgaatttgaataggatttggacaacggaggcatctcagaccgacccgaggatgctgttgatatcttccacacctactttggagttgcgggtaactttcatttgtctcttcttttagctcatctcttgctgtgaagccaaaagtggtcttatttcatcaaattggtgcagggctttccctccttgagtatcctggagtcaaagtaattgatccagcctatgctttgcctgttgatgtcgtcaaccggattatattcaccaaatgactgcaatgggtatatgatcttaatggtcaaacaatatggccgcaaggctctctatatgatttgttcattgaataatttacttggcggttttagaagttatgtatgctcaaggaggaggagattgcaatttgggtatgggaacagtctcaaatctcaatgttgtataacttgctacattattgaggtttctgatgtaatggaaacgaagttgtgttgctgctacattatataaatcacattaatgtgttttttctccacacttttcattctgatttacttcttgaaaaaagtgaactaatgtgtttaggagtgctcaatacttatagaccgaaccaatttaattaacaaattgaacaatttagagaaattgcaaagattatagtacacaaatcataattacaaataaattttatttccattgcagtaaactaaaaattaaaactcttgtatcgaattttgcaaatatatttccttttaaattttttaccttggggtttaaaaaaaaagagtaaaagaaaatcaggatgtctaaaccctagtacgccattagagagggttcagctcaagtgctctgtttttgtttgtttggtaaaaccctaaaagctttcgagccgactcttcaatggaggcgctagcgggaattgaagcagacatcgaatcgtatttcggagagcaggatcaacagaaatcgtcaccggacggctgcaaacaggtcccgtggctgagctgggaagagtgggactctgtgagagagtctctcttctcttcttctccggatagaatcgcttctgcattggaaagggtaatgcttttcttcacgtgtttccaatttgctacagaaattggatcaagtttactgctttatagaccagagagcttaaaattagttgaatgaagcttgctgcttcagaccagagagcttaatggttgttactttatatgtgtaaagtagggatttttaatctcttttgcggattttttcaggttgcaacatggcgaagtagaggatctcttccagcgcctgtggatgttacttgttcccttattgaaattcaactcaaagatggctttattccgagggagaaacaatcagcagatgcattgtattcagagcatttactgcagatgctatattgcatgggaatactcaggtgactatgagtttgcttcccatttcttgatatgttttggtttgtttggtccctgcaattgttgactcgtattttaatttatgtaggcttgtgaactgtgtcatagaaaagacaaggaggagagaagacgtttcaattgcggatgctgctagagcaatcggtatcccacgtaaattaatcgatcttcgtcatggtaagaatctttggggacctttccttggttgcttacagtgacttttcgattcctggatgatgctgatgattgatttgattgttctatttgtagagggttctcaccgtgagctccctgcactctcggtgcttcgggatgctgcagatgaggtacactgttttccttcttaattctgtttggcattctagatttccttatttcaagtatcatagttcatgaaggtctgctaccctgttattcaaaacgtttgctcttaagatcttttttgaaggatccaaagagtctttttaaaaagatgttttatgtggtgtgttcttggacaatacagaagattttaacttgcttgcatacattcgttggtcgttgtaggctcttgaatggttgaaatcgtattattgggagcaacaaaagtatcaaatccccttaaagagagatggaacagctagcatcagaagagaagtcaaatccaaactcaggaaacttgctttctccttgcagctgaagcgtaatcctcaatttgactcccctttggtcaaagaaaaatgtaatacttcttttgtatcttggatcttgtgctggggaagggctagtaagtagtaacaccaagcaaaaaaatgggaatgatcccatcggtgtcttgcttgtttacctcgatgaagtttataatgacatgatacattggttttggctgcactagattatttttccagctttagagatggaaataattttgggttgcattttcgtgtttaacttcgcatatctgttaattcgtaaggtcatataaggttatttttgtgattttcaggttctaataaaaggataaggaagattgtaagcagccttgttgagttatacccttctttctccgcagaaatttcatctgtgctccttgaattcttactcaaggccttggattcttcaaagtcgacagatcttcagaataaggctgggcaagatttcagggtctttctagatgaatggaaacctgtaataatggaactctcaaatagagaacctgagttacttttgactctactcaaggaagtccttgatatgatccaaaataatgaacggagaagacatgaaaccggtaactattggtttatcctaaatgctttttctcttaaggatcctcagttgaaactttaaattgttttcagatcgtttctaacatgtatgaattgtatctaaatttgcatcttacagaaaagccagtggaagaggtttctcaagttgagcaggtccctttcttgtttgcatggcttgtgagtcttctcaatggatcaaagcattttcagagaaacagttctctagaagtgaaacctccaagcattttccttatggaacttatacgtagatgtcttgtcttgggagccttaggatatgagctggttttgaaatcagcatttctactcgcagagattgtgggaggccgtgtcttaaaggagaagctcataaaacttcctcttatgcataaaagctctgcaattgttccattgaaacagagttctactcttgtaacagctagtacaacgctccttgagcaagagaagaatctcggtaatgcaggcaagagacttgagttcgtcaaacttcaactctcaaagaagaaaggtattgacacagacaaaaccggtaacagatggagaaaggcaaaaacatggagcccttgtccaattggtatgttgcctcggatcattggatcttctggacgtttacctcttcttgacaatcagaatgctaagagcatctcaaaacaagcacaaggtaacaacaatgcgaagagaggagctgagtgtaatagaaatcaattggagaaatcgccatgcaagcgagcaaggaagagtgcaggagattctgaatcaaatgatgtgacattggaatcatacgaggaagaagctgagatggaaatagaacatgcatatgaggaaactgaaactgtagcagaagagaatctgatgtggaatgatgaagaggaaagtagaagctgccttatgatagatggtgaatggaaaagagtaaatgatggagaactctcggggatggcttctagtgttacaatttgtgtttgagatttcgacagatgtaatcatataatccgacatatttttgagaaaatagttcagatatttgatcaatttttacaggcatagtcgcagacagatagacattgtgacactcaagtaaaagtaaataagtggatttgacagttactttttcaacaacatcaattggtaagtaaattattatacatgaatagtaacgatttgtgttgtattgagtatatagacagaaaagagatggaatagaacaccccaagaaaaatgttacaaatctgacaccaaatcaattatgatactaaattcttcttcttcatttcacaaatttcccctttcttcttcaaggaatgaattcaccagtttgggcttttaacctacaaagccaatcattttgttcaacacaacttgaaaatataagaaagtaacaaaaatgtaagcaatgatttgtgttagctgagactgttctatttagaaacacatcctatctttgatatgttctttcgacaggttacccgattttcattagttatgtatcacggcaactttcttaagaccagaaaagaatccaataccaatacagaagtcgcacagagacacatacaatgttcccttgcaaatgttgcgttatttggatttcagtaacttaaagaatacaacacaaaactcaagtatctgcctaaaaatattatgggttcagttcccctaaagtatagtatctggactataacagatgtatatgttctatgaaggatcccggaataccaagaacaccgaaaaaattgtacaaaagagacaggacagtacacagatgcttacctaataagctgtctacagtgagttgaaaagtgcttctaaagtctccatgacacctactcgagtgcagaatacaaaattggaatgtctacaacttttttagccagcaacccttattgcacccacctcatcaagctttgagcttttatgctgcaacaggttcaatcaagagctgaatcaatacaatttatcaaagacatattactagttctctagcacctttgtgcaaaaaaaacattatggtggaaatttcatgttgagtgttaatgaagaacgagaaaaatttgaggccccacttcattaccattaccttgttttttttgtgcctctgaacgtcattaagatcttcatctccatcgtgtttccttttctgaaatataagtgaaaaggctccataaaaactcaataaaatgttctagagcagtctctagatctgctaatttcatgccaagcaggtcaaaaaagcagcctaactcaagagcaacaaatacaaaactttccattaagctattcttctttggaaagacagacaccttcaacaaacagacatgttctttaccttatcatgatgtttcttagaatgatcacccgaatcatggtggccatttttgtccttctttctgtctcggtccttgtctttatctttatctttgcttctatctttatgtttgtgcttgtgcttcttatgctctctatctttgtctttatccctgtccttgtgtttcttatgtttcctgtccctatctttcgactcactttttgacttagacggaattgtaggagctcccttctctgcctgaaagaagaatagtaccaaggtcaatcatctccataggacacccagatgtaattcacattactagggaaagattctcaattaaccaaagaacttgatgttacaggaaataggacattcattactgagccagtttttaagttcaatgtaatggcaaatactgttactcttatgaaaagaaggacatttaaaactcaaaacaccaagagagagtgagaaagatcagattcttactgggggtaattcaacaggagtcatatcatttagttggaaagactcctgaagctcatctatatcaaaaggctggatgcgaatattagtctcccggctctgtgatatgctctcaataagctgatctaattgcattccttctccttttctgatctctgtgtccccaaccacattatgaagataatgggaatctgataaagaaacaggaagagatttcttgcaaaagaattcatggtgttgcactagtttgaattgagatataagatccgcagcaccgcacaactctcttggacctgcacttgaaacaaacaacacattgacctcaaggtgagccaaaggggaaaacaaaggacaacgagctacaaaaaaaataacttcacgaactgaagaagctccaaattcgaaaccaatgtacctccaaattttaaacgttcaggctccatcttctctatcgcactctgaatttcttttgcatgatcactggctcactgcatatatatcctacacaaggaaacaaaaatcagaaaaagcatagagtgataaggaaataatactactacagaaagcaaattcagcttcgatactatctaaactaacaattctgtagcacaaacaatacaaaagttataactaagcaccagctcatatttcatagtgaccaaaactaagaagtaagaaaatctaatttagcattagatgctatcaattctcaacttttctgctccaagctcaaaaaaaatgaaactagcatcagaaacaaaaccctagaaagttttcggaagtttgtaaaagtaaaattagataccaagtccatacattttggatctagtcaacaagaaagtttcatcaatttgttctatttaggaatgaagctaacaaaaaaaaaatcagacaagcgaagtaatcactagaaacgaagattagactcgataaaaaagcttcaagcagaagagaaattcgaaattgaggaatttggaattcgaaaacgaaacaagacagagcccaatagcaaaaccaaaatctcagattcaattggtaggagaaagaatcgaaacaatcaacatacacgtttctttcgacaagcccagatctcgtttgagaaagctagctaacgaaagcagcgaaacgtgaggggggaagtgtttgggtcttgggcttgggtatcgaattcccgcctaaaattttgattttagcaagtgatcgagaaaggacagagatcgaagaaggttcgagagagcgaaaaagcgagactagttagggtttgagagtcttttgtgtctgatgaccaatgagagaggaattattctctgttttcttccgttggcttctctctcaatataatcaacaaattacagtcagcctttttttattattattcaagggctccgcgtgggcttcacgcgctccttcaacacggcccacttaaccagacaaatcaaggatcttccattagctaaaccgtattcgaaccgagtaatgaatctctctttaaccggtggtactcttatccaaacaaaaatatccacgactatttatatccgatttagattgttatctctttctatattttttatttacttgagtgaaaaacatgaattgttattctaaaaaaccattataagaccgaaaattatcaaaacataaataatgtaagttttcagtgttttgggttggtcggacaggtctaatccgatcgagacatgcctaacaatatcttctacaatttaagatgaaacatacgatgaatacatacgtgtatatttgctgatataacatcagagacaaagtgcttgacgagaacaaaatggaataatggtatttttggggatttgagtttgtatacctgctctctactatgtaaatgatgatttgtctgctgtaaaataaatgggaatataatatataaaaacgtgatgactgatgaggatatattgaggtacatatcacatatggtgtttcttgacaaatattggacgtaagtctttgttttttcttctataaactttcagcttgatttcttaaaaacatttgttgcacaagttgtaaatacgtttatcgaaggtagaagatgcatattggagaatcatatccatatatgtatcatgtatgtaatttagttcttgtgatactgttttctttattctctttcttaactcataataaagtaaaattaaaaaaaaaaaagtaatcttagaaagactaaaaaacgagaagcaaatatagatatacaacatttatataaaatggagaggaagaagattcaagtggtaagtggattttttcatgtgtgtgagtgagtgtaaatgtgggtgaagaaaaagggagtgaagacaacatcattttccccaaagaaagctaagtcttagaatcatcactccaattccctttttggccccttcttctctcttttctatttctttctacttttgacccccttcacataattaccttcctctatatgctttattatcacaccctcattactctctaaaactaaccactataagtatattattaaccacactaattactaccacttgacctagtaatcccagctaagacctttggaaatgattcaacacacaaaaaaaactttcgttaaaaattaatgatatatatatttacaaacctctatctagtttctcttctctttatttgtagaaagtggtggagaataagaaagggagagcaacaaacttttagaggaagtcataggttaaaagccccatagctttttcttccatcactttcattcctctcttctcattcttacagactttgagagagaatttatttaagagatcttgatcagatcttttatacttgcaaaaatcgattctaaatatataatctataccttatagagaaactcttcatatcttgaagattcctaagagatgggaaattactactctagaagaaaatctaggaaacacatcactacagttgccttgatcatccttcttcttcttttgtttctgtttctttacgctaaagcttcatcgtcttctcctaatatacatcatcactcaactcatggaagcttgaagaaatctggaaatttggatccaaagcttcatgatcttgactccaatgctgcgtcatcaagaggatcaaaatatactaattatgaaggtggtggtgaagatgtttttgaagatggcaagagaagggtcttcacaggtcctaatccattgcacaatagataaatttttgcttttacaagtttttgtgaatttttgtctgaataaaactcatttgtgcaaacacaaaaaacatatttatttactttttttcttacactgatgatatacactatatcgtacgttatatgccgtgattgtaacttatgtgttctatgtggtgggatgagattgaagagtgttgaacaacgagtctttgaaaatagtaactactgcttctcggttttcttgatttaatagtgtatcgataacacgcataattatcttttggaacccttgtttttgaatatgaagctggtggaattcgtgtggtgtgtgtgaatatcttgataatgataaatgaacatcattgttaatgccaaatgaaaaaaaaaaaaaacaagaatgaacatcattgttaaattgaaagaactataaagctagtctattacagagttggatgtgaaagatgtaagattattacaggctatttcatgcttacgatattgaataaaattggtttgaatagcattttattagtctaacaaaagctgtaaaaagagaatcattgagatgggaaaacctatttgacactaaatcacttacactaacaaaccacatttgtaacaaaagtaaattgcaaacatacttaatgttaacttcatctggaacagacgaataatttggtactctactgtataatcttatttacctcgaatcattgactgagttttactatgagtatacaatttactaggtgtgggaaaatgtaagaaacagtaacgagagaactgtcggaaaattggtgataaaatgcagggccaataatgagatttttcgacataaaattaaaaagctaaaaacaagaagttaacatttatagataccaaaaacatttatagataccaaaatcaataacaattccgattgaaatatggagcctttgagaaagacttgaaatcataactagacgaacacgagaagataatttttgcgcactcataaattcataattacgataaagaaaaagacaagacttggaagtgtctccacattaacaaacttttggaagcacatcatatagaagacagaagtttaagagtttagtaaatatcgctttgcagcttctggatccaattcttcatacacctgaaaccaaaacaaatgacaaaaaaaatgtcccgagcattagtagctatctgcaataaatgtcttaagaagaaaatgtacaacacatacaagtttcttgtggagtttctcgaaagccttgcaaaatctctctgcttcaaccccaccaacctgcaagaatgtgatgttcattaaggagtagaagaacaacttcatatatgtagaacatttcagtatatgtagtagaatcagagatgaaacaagaatcaattctttcagtgtacaagtttctaagttgacaagtaagaacaaacaagatttcgatctccattctctggcaaatctcttattcacaattgcacatcagatgcaatgactacggggagacattttctactaaaattatgagctacaactctattggtgaaaattagcttataaatctcattcaataactagaaacgtctgaacaaaattaccttcttctcagcagccgctttcagattttcccaaaatttgtctgtcagaagaagataacagacaatgcacatgttcaatgatatgggaaaggagcaaaaggaaattttactcagaataatcacaaaaccgcttgattctacaacttacgagctaattatatatgtgtataacagtagcatacagatataatctctgtgttaagcaaatgcatgtatgaataggttgagatgatattgttttcacttaatagagcatggattcttcatcgcaatggtcagatcacgtaaaaaacatagcaaggttagctgaggaaaacacataagaaaactacaaacatgataggttacaattaaatttcctctctaatgaaggagaccaatatctctatctttctctctgaaatcgattactcttacataatttgaaagaactactacacccgaaaacacttttcagaacacaggaaacagctgaaaacaactgggagctaatacaaatactagtcaatctaacaagccagtaagctagtggcaatttagttgatatccgaaagtaggaaaaaaagagatgatgcataccttgatcagtcttcagatattgcaagtctttaggctcagcaacagtcggtgcatcgtgccattcacttacctgcattgagtgatttcaagttccatcacatttcaagtatatagaaaagaagcctacagatctcagaaatgtacctctcgatccacaactgactgtgaagttgattgctttgaagaatctaattcagcctgaaaccacaaaagactcaatcagatgatatcttaaaacgatcatatgtaaactcaatcactgatgaatttactaaaccataacagagaaattttcaggacaagaattagacctaaggggaaaatgtgaaccagtttgctagtaaaagccctttcgaaactggacgatgagtaaattagggttttaaaagaaaaatcaagttcgcggcaaataagttgacagtagcagcagcaaaaaaagagaaagagggaaggaagagagaagagagaagagagaagagagaagagagaagagagaattacacggtggtcacgagaacgtacgactgggaagaggtcgaggagactacgaaactcttggtcgtccatggcttccctttttcttcgatttctcctccgattctctcttaaatctgatatcttctaatttctttcttccctggtgaaggtttcgacagagtccaatttttatttttattttattgacaggaaaaaaggaaaatttcataaataacaaactttaatctccctttttagttttaatctgattttagactagaacaaactacgtattgtatattatggtctatggttatggcctatgggaaattgggaatccaaaaatggtgattatgaaaatcacgcgtccttaaattgataacttggttccgcgacagtcaaaaaaaccaacattgtaaaattgtgaaaccaattaattgaagtaggaagagcataaaaaaccacaatggacaatttcatataaaaaccacgcataaaagtttagatccgacctcactattacacacagaccatcacaaacaatacatgaaactcaataaacatataccgaccaaacgaaaagaagataagagaggtatttaaaaatcggtaatatcagctcttttcactcactcatgatccaatatctcttcttcatcctcgtcttcttcatactcgccttcgtcatctgcagttgcgtcttggtattgctggtactctgagactagatcgttcatgttgctctcagcttcagtaaactccatctcgtccattccttcacctgtgtaccaatgcaagaaagctttcctcctgaacatagcagtgaactgctcgctcacccgcctaaacatctcttggatcgatgtggaattcccaataaatgtcgatgccattgagagacctcggggagctatgtcacagacgcttgacttcacgttgtttggaatccattccacaaagtaggaagagtttttgttctgtacgtttatcatctgctcgtccacttcttttgtgctcatcttgccacggaacatggccgaggcagttaggtaccgcccgtggcgcgggtctgctgcgcacatcatgttctttgaatcccacatctgttgggtcagctcagggacagtgagtgcacggtactgctgagacccacgggaggtgagaggggcaaaaccaaccatgaaaaagtggagacgagggaaaggaatgaggttcactgcgagcttcctcagatcagagttgagctgacccgggaacctaagacagcatgtaactccactcatggttgcagagataagatgattcagatcaccaactgttgcaatcaacccatcacaaaacattagcaaacagttgatgcaggatgagtcaaaactggagattggatcaaggatacgttgatatttccaaacagaaacattttttattttggtcacaaccaaacacaccattcatggttaccaagatcagtgattcaattttcacaaaaccactgcagagaagaaaggacatggaaagggacttacagctaggagtggtaagcttaagtgttctaaaacagatgtcgtaaagggcttcattgtccaaaaccatacactcatcagcattttccaccagctgatgaactgaaagtgtcgcattgtatggctcaaccactgtgtcagagacctttggtgatgggaagacagaaaatgtaagcatcattctatcaggatactcttccctgatcttagatatgagcagagttcccattccagacccggtgcctccaccaagtgagtgacatacttggaaacctgagaaattcataattatacatatcactgttagaacaaaatgttcaaaaccacaatttaaagaccttcaataaactttcttaggattacacaccttgaagacagtcgcaattctcagcctctttgcgtacaacatcgagtacagcatcaataagctcagctccttcagtgtaatgccctttagcccagttgtttccagcaccagattgcccgaaaacaaagttgtcaggcctgaagatttgaccataaggtccagttctgacactgtccatagtaccaggctcaagatccatgagaattgcacggggaacatatcttccgcaggatgcctcgttatagtaaacattgacacgctccaactgcagatcagagtttccaacgtaacgaccagtgggatcaataccatgctcatcacatacaacttcccagaacttggaaccaatctggttcccacattgaccaccttgaatgtgaaggatttctctcatcttctattttatctgaaatcaacattacatgaacaaaacagtaaacaacggattttgaaagcaaaagaatctgtatcagatccaaatgaaattatatcgaatgtcaacaactaaatctcgaagatctgaaatcaaacaatctgtatcagatcccaaaacaaatcaatcggaaaaaaacacaacgccgcagagaagaaaactccgatttcaaattcttcacggaattcaaaacggcaacacattttcaagtgatagaaaatcaaaatccaagttaagagagaaaatatgaaacagatcaagagcggatacagatttggaggaagacgattcgatcaaagtatcacaataagtagtaggagttcataatctcattccctagagaggaaacaatacataaaaaggaaatagcagagtaaacaataactcacggtgcagaggagaatcccggcgagattgggataatcgtcgaccggagtaggagaggaagtgagacgggtggagagtgaagaagttggatttatttatgaaagagtaagaagagggaaaggtaaaatttgatccaacggctgtgattggtttaatctatcggaagctggatgccgttggatggtgagatatcaacgttgaggatggcgttgggtaagatgtgggagctactttatgttaattggattgtgattgtcggttcttccttcactcctacataccaattattgttgtcacatgaatagtaaaaaaatctctaacattggagtcttggaccattggtctaacatagaaaagataagtatttcggtagtaatgtcaagattcttattattttccaaacgcaacttacaattttagagaagctctctttggttacacacttaatacacgtcaaatgcataaacaaactcatcaaaagccgtaggaacaggcaggagcaataccttgtaatgagtgtgtgacagtataaaatcgagctaagaaccacgggaaaaaaaaatggtctcattgcgtatgacaatgcggagaatagtaaatcaccgtaccatggtcggagagtagatgaattcttaatggtttatttcgtacctatattaactagttagttaagtttagttactttcgtaaaatatatattaaatctttcttttgcatgcatgtcatagcaatcagtttatatgaaatatatgcagaaattgttttttggtccatcagatctatacgagagagttgaagaaaaaagttgatgcatattaccgtagttaggacgataatgtaaaacacacgcattggatactctcgtttagatttaactactgatgctaaattgctactttgaaatctttaaaatattctataagttcttacatctgtcgatctactgtcaatcaataaatatatcagtttgctattcggaaaatctaaactaataatcggataacttaaatattgttttctcaactttgtcgttgcttgtataacaataaaaaagtgatgtttcgatggtttcgcttagtactaaattttccatggaacattaatcatgcttacgtttctactttctataacaatgcaaaagaaaacccgaaaccaaaagcactactaatgatatcaataacaaaaccaatgtcgcccttatatcaccatcatttagatcataaacaagacgtgataaataaattacgctaagaacagcatatagctgtaaatatgagaaattagaagggtacaaaaacaagaatgtgttggtcttgtagagcttgtggatcggaaatcggatagcgacagaatgagatgtagagatatataaaaagaacaatgcacatgaaatccacattgcgtcccatgtgacatgccaacagctcacctgacttaaattctaactttctctactcgtagtttcttgctccagtagtttctcatacctacaaagttttttgctaaattccaatccctacctacaaagtttgtcagagttaatgtcgttataatatcttcttaatttatttttttcccacaagttcttgtaaatacaaaaattgaatatcttgtagtataagtatatatcaagtgaagtttactctttttgtaagtagtagtattatttacgtgattaatattataatttgtttctatgcaataagtcttgactctttcaaataaatcctctcacttgatctgtacgaattttctggtatttctatgtctgtgaatattcataactttttgttatggttaaccgaggatgagcgatgtccaaaagagattagttgagtgctctttgatgatgaaactctatgaaatagaaacacatctctctttgaagattattgttcaaagcaaacgaagtgattggtcaatgcagctcttgagaattcaacaagagcaacaacgtaatcaattagctgaagtagtgaagtctatcattttcttttgctatgatcaaaattgtaattcattaatttattggtttgtgattgtgaaaaagttttaatgacttttaaaatatataaaaaatagataaattaaaagattttaaatgattactagagagttttgtataatttttatgatttgtttttctaaaattttgtaaagtctttctataatcttgtaaaatctccttgaatataattataaactttaatttgtgattttttcaaaattataacatatctccaaaatatagtatactattcttagttattttcatcaaaatgaaaatcacacgcataaacacaataactatggtatttgtaagtaaagttacatgaatagggaaccatccatgaagaacttgatgttttattttcaaatattttgttggatatttacttttcatatgttagattaaaatgctttgttttaaaaattgcttgtgtgttgatttttcacaaagagattatagaggagcattcgtgggacttgacccattagaatatatatattgttcatcactgttaatgagatttatgcatctgttcgtatcattggtttttgtttatatccaaaatcatgattcacaatctctctttttttatgatacttttcatgattttaatttgtgaagaaaataagataaaatcataatcgaataacacaatattttataatcattaacagtcatggaaattgttgtttaagttgaataacacaaaatttgtaatgattttattaaagtatcaatctaataactccagatttacaaaaactttaaatttcttttttacaaatcaaaatctaataacaccaaactttaaaaaaatcttacaaaattttaattaaataacaaaaaaaaattcatgacattacaaatcatttaaaatctatataaatcacaaaccaataacaccctctaaataaaaaatatcaaattaaaatataatcgtcatcttcatttttttttcgttccgcatatggtgccgtgtttttatttctttgatttgtaaatccttctatggtttctcaatcgagaagaaggaacccaacactgagatccatggcgatggtatttgcacaacccaagaaaaacctacttcctctcattctcttcctcttctgtatctccgtcatcattctcctcgttctcgtctccgagaccactcactctaacgccggacgaggaactactttccggcgaaattacaatgatcccgctcctttcactttcctcatcaaggtcctcacctttaaccgtctccattctctctcccgctgtctcagatctctctccgccgcagactacggcgtttccggagacagaggacgcattcacctccacgtctacattgatcatttcaacctcgcgaggaacgatacacctgtggaagataacttgcaaatcgcgagggaaatcctagggtttgtggatagattcgagtggagatttggggaaaaagtagttcactatcggactgataacgctggattacaggcgcagtggctggaagcttggtggccgatctcagatcacgaattcgccttcgtcgttgaagatgatcttgaggtttctcctctttactatggaattctggaacgcctgattctcaaatactactatgatacttccaatttcaatccttccatctatggagcttcgcttcagagaccaaggtttgttccaggtaccattttctattctgtgattcagctatggagattgtagaataaacctccaagaatttagggatagatcatagaaggagattgatatatacattgtagttgaatctggtgatacattgttcaaatagagagtagcagaagttgattgaagaagtgtgattcttatatgtttcttggatatacattcccagatgatagagctatgcaagtgtagatcagtaagaagtaggatacatgagtttgttagttactagaagtgtctcaaatagtgattgaatgatttagtggtcaattgcaggtaaacatgggaataaactacatgtagatcccaaaacgaatctgatcttatatcagttagtgggaacttggggacagcttctcttcccaaaaccgtggaaagagttcagactatggtatgatgagcacaagtcgaaaggcaagaagcctttccttgatggcatggtaacagagatgcacactttcgtcttcatggatttcattgtttataaattctaagttatctgtcatttattatcttggtggatgtttttctcaggtgtcaaacggatggtacaagaggctgggagaacgaatatggacaccttggttcataaagtttgttcattctcgtggttattttaacatctatacaagtttcccgaatgagggggctcttagtgtctctcacagggatgctggtgttaactatggaagaaccgctgggccagactcacagttattgaataaaagttctctcagttctgattctctgaagctccaacccttgagcaaccttaagtggtacgatttctgtttcagtgaagttgttcccggtagagttgtgagaaacctgaatgaacttggcaccattcttccttctgtgcagagagagaaaaccataattctggtcagtctatatggtgcagacaagatgttcatcaggaacttactctgccatttcgagaagcttaatattcaaaaccacattttcataggccctagctctgagttgttccacgatctttcaagaaggggacatcctgtaattgatgcggatatgtttctaaacaagttgatcaaaagcaaaacttcttatccaaactcagtgaaggaggctctgggcaattcttacgttgtcaagaaatgcttagaacttggatacagcacctgggcattttcaagtaattcgcttttggttgataaaggtcgtctccttgacagagtcagctcagattacgacatctatatcggggagagctctggaattttgattgttcaatcttcatcagtcactcaaaagttatggagcaatgagtttctacacagcattgcatccccaaaacaaagtctagattttattcatctagtgaaagagctagtggagcaaaagggcaagaggattaagaccgtagagacgatgaatattgcagaaaataccaatgccaacagcgtaaaccaatcgttgggagatggcaagccggtggtgtattggtctcctgaggttgctcccaatatgattcggtcaaagctagaagagttgagcttgtggctcatcgatgatgatctctcttgcaaggccgtggtttgtcatagttcataacgttaaacacatattggcattttctggtgataggattgtgacaattcgttatttagttttgttgaatgttatatagaagatctaatagcagcaaccaattgtactcgttttatatcagttcaataccaagaatagattgtttgtaaccccaacagttgggagtttaactgacattccaatcttaacgcattgtcgactgaacagtctacgtaatgttcagtataggagtcatttggtcagtaaaagttccaagaacagtgacaccagatgagtattttttgtttgccttgcttgttcattttagatattctgcgcatttagcttgaacttgaagaacgaagataaatgtctcacctttttaaaatactaaaccaaaccaatttcatagtcatactaaatcaaactcaccttttgattttgatctaagaaagcgccaatcacaaccaaacaggatcataatgaaagagaaagataccaaacaagatcacaaaatttcacatcgtactgtatttgaataataagtgaatcaaatttaacaaaaagattaaaacaagaattattctaaatgagataattattttgattgattaacatataaagaggcgtatttcttcgatattgtcttatgacaaactagcacacttatacgtggatacagttacattttaatctgttcaaacagtgcaaaattttgatttcactttatttaagactttgccaccaatatcatgtacctaaaaatatgccaaattttggctatgaagcaagcaaattaaccttttgttaattggttgtaccatctaaaacttataaactactaaaactattaattaaccttgtgttagttggtcgtaccatctaaatttgttttaaaatgctgcattattaagcttctttttcttttgctacgtatcgttattcattttatttaacttaacttgtggttgtggatgtacatgaatcacgacagagcctcacccccactctcgcttaggaaaaaaatgtctcaatatatctatctactcatatatatatagtaattaagtagtatagtaccatattgaagatttcttctgcatgtgacatttcagctttatccatgtcacaaaagcacatacctatcagttcattgaccatgctccacgctcctaaatatgtttcacgccgaaaaaaatagaatgttgatgacgctctttagctttctgacgtgttccgaggatttgttcattactattcaataccaatatttacctcataactcaaaataattaaaagattccaattcaatgagcaaattgtttcttgctcaagggtactttacttgctgaaaggttgcgtaaaatgaatatattttcatataacattgaactcaatatgtagagttatagagattatttcatcgattttgagccgtagataatgatgatttaagcttcgtaaatcatatcatggtaattttatcgactcaatagtcttctttccatcatgaggtcttccaaaaaaaaacttcaagtagtccgaatacacaatctttctataccgagccatctcattgttcttatctaacacctccggtaacggctcaataaccgaatcatgaaccggtccgcagaaaaccggaatggaaacccggctacaatacttattgaccaccacacaatgctccacgctcctatacctatcattgctcaatatctgtaatacatctccgatattaacgacaatagctcccggaattggagggacatgaatccatttgtctccatcctcagtggctcgggcgtaaagactgcttaatacaccatcttcttgtaggaggagagtgagagtgttgatgtctgagtggcgaccagttcctatggccaggcttggctcaggacatttcggatagtagttgaagttcattctcattgttcccattagggtttctttattggactcatcgatgattgtgtttagattgttgatgagtatgtttaagatcctctctgtgattggtttgatccttttgaaatggtctatcacttgttccctacacacatttattaattttaaacactacttatgttgttacttcaaaacactaattatgtacttagtaacacagtaactatacttacttgcagacagaaggccacgtggcagcgaagtcatgtcgttgaggaagatactcaaacttgaggaaatctctccattccaaaacactttctatgcaaggattgaaacttgtggtcaaccacgccgtctccgacactgaactccctctccaataccttcttctctcctccgccggcaactcgaaaaacccacgcgccgcagcaatcacacccttgaactcagccggagctatcccgtggttcactatctgaaacaagccgagctttgacgctgcatggcagatc

SEQ ID NO: 708 - DNA, 79259 bp, Arabidopsis thaliana
gatcctaaattttgcattcaggacattcacagattatgttaattaactttgaaatatatttacgaaatgtataacagattatatccatagcgtcaattattgatagcttttatcattctcaagttaacgtacctgtagctgggtatgcagaaaataatgaccccaatatatttgcaacaccaagaccaaacaactgtccagtgaaggtaaaaacagttgagctttcaataaaaacggtaaaaagaaccggaatattgtctatagcaattcggcttctagtcaagcacagtacctctgaatttgaatccaactcatatctgttttttgccgcaagcgctttggcaattcccacagattcctggatacaagaaaatgtagaactacttcattagagaacgaaaaaacataatatcaattgacatgcgctactgcatccaaatctaaacaagaaatccttttgttcttttttttataggaagtcagataaaccatgtccattcatttatagtttctcatgattaggttcagctctgcagtacgccagtacccatatgcctactttgacagaactaatgatgttgatatctcaccaagatggcaacaccagtaatgagagctgatgttggaagcaacgtttttgcatgatcaaaacttcttgggaaagaaaatgttggaaggccctgaggtatttctcccacctgaaaacatactgaattttgctattacttcaaacacttcaccgttatgtagctcaacaaggcaactaccatgaatttaatttctgaccagagagatggaaggcggatgaaacacttttgcaatggttgtaccgagcacaatcccggtgagtggcgctgctgctcgtaagaactgaagttcctttttggcttttccctgccatgaaaaaccatgaccttattatcacattaataaaggaaagtcctgtttccctggtaactctggaaaagaacaaggctcataccacatgtttcatcacttgaagaatcaccagaataagagatcccatcacgaaaggtggccactgaaactaaaaagcacaaaaagatccatctaaataaagtacaaataggtagaaacaaaacacgttctttaccaaactgattcaccaatgaaattcatgatatacaagtaaaatcatcatacgacgatgatttaatgtacagtctaagctacttgaggttatactaaaagttataccaccagcaccaggtattagtagtcttgaagtacttacattcctcaggggcagtggctaaaaaaagaatatgcagatcgaaatataaagaggtgaaaacccaaaatttcagtctaaatcatacttacagatcccgaattaaagatattagccaaagaggaaatgtgtctctctttttctgaactgtttaaagctgaaaatgaagtttcaccttatcagctccagctattatgctctctactattggcacaatcttgctgctccgggcaatgctataccccaggaaatattttatttgagataacccaatcacaatggccgaagcacttgtaaatccagatatgactgagtgactaatgaaacgaataagccatccaagcctggattgaaatcacaaacaagggagacgcaacatgacacaacaataattagaagacttctgctttaacggataacagttactacacaggcaagctatataagtagcagtcaagataataaacgttttccttatctgaattctaaccaaaaatagtagtattaccttaagagccccatgatgcactccaagattccaactaaaagcgccaacaaaatggccaattcaatatgtaattcctcgttcgtatcagcgattccacccaaagcattagagacgagaagagaaaccaatgctacaggtccaattgcaagctgacgggatgagccaaatatggcatagacaaataccggcacaaatgaagagtctgcatcaaagagttataaaattgaatcaaagctaacatgattaggcatttctttaaaccaagagcaggagtacttcaatagcattcctatgaattcacaataaaactcacatagaccgtaaattggtggaaggccagctagtttcgcatacgacattgcctggtcaaatccatcaaaagtcattcagcaaaataaacttaaaacaaaactccagattgaagaccaatacataattttactaaaaacttgaattgataatctcttaagctataatacattttgtcacatctttaaccaattttgcagctcaacaagacaatacgattgaaaccaataattccagtttcctattctaaagccaatgattccagcttccttaagcttgaaagtaaagtacctggggaacaagcattataccgacggtgataccagccatgagatcgagcttaaaatactcgctccatcggtaagttcgaatccatcggaaacaaggaaagagagtatcaatccaatcgacgagcctcatgcgcttgatcttcgccgtccatccggagaagatatcgtcgaaaggaatcgaaggaggacgagcttcattggaggtgtcaggatgctgaagcgggatgaccttgacggggcgggtctgacccggaggcttgagcgaagaagacgaaccggttccggatcttgaaacaaggctggtcaggtccttgacgctgagagatgcgtaggacatgatggctcttgcgcacgcttggcgcactttagagaatccgttaatgagagaatggaatactcaaatgttaaagagctttgtatcatttattccatcaatgctcataagctttactctagtgtctggtcaattttgttttttttcaaactaaactttacaattatcattacattatctaatcatacgtcaaaaataatttagtttatagtaatagatccagaattacgataacgtaactacatttaaattttgctaatcacataacatttttaaaattagttgttaattagtaattagataaattgttgtcacttgtaagtttcgtcacgtatctctaattaatagaatagaattcatgaggggtcaatccaatacaagtggcttgcgtgctagttttgatgatttgtttactattctttattttaataggtaccagaaattgggagggaataaaacatgtgttgaaaaaagtgtgaagagggacgttaagccgtctagatccatgatgttgatgagtgggtcaactcttggctcttgtgtgtatgtgtatgtgtccatgatgagaattcacaaaacagttttgatgatttcaaaacctttgatgcacagaaatgaaacactacagttaaaggcaaaatgtttaactagggatttaattccaaaattgtttttttagatgactttcttaactttagaagataatctacttaatttttgttgccattacaattttaattgattttaaaagcttgagaaaaaaggaaccttttccttttcaccggtttcatttgctttcaacatttctcgagtctgccaaaggacaatttggacaattgatatccgctccataccactaagaggcatcacaagacaagctttgatgaaattccaaactgtcttgatggtcacataagttccaatttagatacgcatacacaaggaaaacgttaaacactacatgctaaaagttgagcaaaaactagcaaggaatggattagcacattgtcttgagaggcccattcattaacagtaaaacattattaaacccactgtgatgtgtgagtctagcgggccggtccagtccgcttgacaggcttcagcccgacatccatatgcctcttgtgatgtggttggtcggttactttcccggaatcttctggctcctttagcagaattgtccggtgtcgccgtcctccatcggttggttcctctaccaacggtggttggctcttgtctagcttctccgtcgtccgtctccggcggtttaggctagcttttggccggatttctttttcggttttgttttatgttctcgttttctatagatccagtttgattttgctcctttgtgttctaactcttagagggctcaattccttgaacctcctttgtttaaagggctcaatttgtttttcaagcttatcgatttcaattatataagaacaaattagagttgtggattggggttttctctaatgcctttgagttgggttttatgcaattgagtcaattgtcatattggtttttggaaacgagtgtttttattttacttttaggtgttcatggaagtttcattggcttaagttctacgctgatgtcgtttgaagatgatgatatgactacccaggggagattttcctttgcgaattcgaagatgaagaagattgatgggattctctgaattttgtgttgctccatcggacaagcttgaagtcttggtggttcctggtggttttggagttccctgcaatgactaaccaaatcggcggtggactacatcaattacttcctaaaagggtttcttgcttcaactgggctttaatttagttggacttttatctttattttgtttttgtctggagactgaaagcggaggtttccactcttttgtaatctttacaatctttggtttaaataagagacaacacttatgagcaaaaaaaaaaaaaagtagacatacaaaagtcaacaggcagttaccataaattaccaaacagattaacaaaggaacttcggagttatggtcaaacaaagaaagtaaatgaaaaacatatcagtgtatgtgaggcaggcgtgtgatggatcatactactgcagttctttctccagttcatcgaattcccatccatcaacctcatctgcagagtaatcacgagccaccttaccaaattcagattccagctcggctagttcggcttcagggttaaactcttgactggaaccagctgcaggattgggtgcctgaggagaattgctcagctctggcttttgggtctgagtagattcagttgaagcattcatgctactactgctaggcttgggagatttgggtgatgtagcactgcttttaggggacgtaacactgcttctaggtgatggaatctctatctctaacgttggcctcgctatggattcaaattgctgcctcattttctccatgtcatcaaacagctctttcacacgccggtcgtcctttctggtataatgtaggatttcagaactttagtacaataaatctataccgattactgaaaggtcacataattatgtttccactcacttatccagtttgctttggagaacctggaattgctctttcacgttgtccacaatgctgaatgtggtaatgatctaagtttttgataaaaccaaataagagacgaggaagaatagaaaccagaaaaagaaaaaaaatcaacgaaccagagcacgaccatgcagagtcatatttggtctcaataaaaataatcaatcgtaacctactaagcagcaattcttaccttggtctcatagtctatatactcctcctccagaattttcctcgggtttgatacctgattgtctccctgatctgcatttggtggcttctccgacctgtcaccaccaccacatgcaaaaatgtcaccactattgcaaggcgcaattcaactccaactagagttataatcagaaaccaagtaatatagtagggataatccaattcaacaagaggcatttacccaggacccagattcttcagattttccacataattttctatacgacttattaaaggtgccacctccttctgtacaatatgaaattttgtgttagctttcatttatcaattactagattaaagtttctataaagtacagaggttaccttgtacacagagagtatattcaaggccacatccgagaagtaatcttcatgcttctccaattcgtccctaagaaatgccaatggattatttgttgtggtcgagcagcaaagcaagatgtattgcgagaaacagctgagagtagatagaaatacaaagtctgcttatccttcgtttcgatatgtgagcactgaagaagccatgtatcctcaagaaaattaatccacgtcttgataacttctgcttctttcttacaagctacaactgatttggacaggtcatcatcctgcatgcagaatcaacagaagcagattatttcacgtggatattattaagcgtaagagctacccagcttaaagaaaatcccaccttcgttttcaggtgagcgattatctgattgttggcttcaccaaattgatccctctcctctgtcgcattacgaaaccgagcttgagcagcagctaacgatagatttacctacattgaagaatatttactgatataccttctgtatcacaacaatcatagctacatacatagaatcaataatatcattatatttcagttcaacagcatgatgagcttacgtttatataattacgtcaagtgacaaaattttcgtctgtttaaagtgtgtatgtaaacctccaggataaagcaagaaacccgataaatagaaaaatagattaccctcttcagatcggcttccagctcatctctttgtttctcaagctgtgcaatttcggcacccaactcctgtacataataaatcataaccttaatactgtcagctggataaacatgccaacgaacgctgccacgcttaagttttgttttttttaatcttccttttttcgcagtcaataatcaaaactcaaaagaacaaataaaagtgggagataaagaccttttccttttcaccggtttcatttgctttcaccacacgagcttttagtgcttcctctttctgaagtctgcgaaaagacaaatgacaattggtatccattgatggtatttttccttccaatgactaatcatccgctcaatagcactaagggataagtgataacaagacaagctttattataaatcggcattgtcttgcagtcccataattcaaatttgctactcataagctaactttaatcagaaaatactatagcaaggaaagaattgtacattgaatcagtagtatttgctgaacatgcatatagtaacacaaagaataagaaacttattacctattcttccggtctggtaaatttaccatgtcatatcaaaatttaaccataaaaaaagtcttttgcagataaaaggaaactaactggagtcgataataagtttaacctgttctctgatattcgtttctcggctttggaagttgaatttgctaaagattctaataacaccctgagcttgtcgacctggttcaaagacaaaatatctattatcttccataagtaacattctactccagaagtcaataaatgtatatgctgtcatggaatacatgaaactcttaatataccatatcagcacaaaaagtagagtaagatgataattaacaatacgaattaacttgtataaattgagactaataaagctcacagacttactttctgagcatgtatatctggtgagtcaccattgcttagttgtctctttctaattagaagaccttctaatctggagcaaagacgaatctttgcaagtgtttctttgaaagcctgcaaaacgagaagtctatcacacagagctaccgaaatgagcttagggagaaaaaagaggcttggagatactattatcctcacctctattgttaaaggagtctctttatgttccttgtcttcactctcctgtggaatttgagaggcattcatcttttcgagtttctttctcaaatcagaagcttcagcatcaattctgaaaacatgaattcaatcaacagtgaggcaagatgagtagtgccctatgactcattattcattaataaagagaaacaagagcaaaaagcacatcattatcttcatttatcacctcagcatttcagcattaatcttcaaccctgtgatggcattttgggcaaactgaagcaattcgtcctgcttaacctgtccaaaagcagccaaagcaacacagaagaatagaaaagttaggaggagatccaaacgcccataaattaacatatgctgacttttttactgatcaagcgcttaccaaaacttcatccttgtaacttgaaaagactgtagcaagatcctgcatactgctaactatggcatcatgaacttcctttcctccattcaaacaaaggctgaaaacaatgttaagttctatgaataattgcagtacgaatgaaaatagcaatgaattgtgttgactttccaagaaacagtttaagactccttttggaatccaaattttggcaatgcaatatggaatgccagcagactcacccaaacatctccaggagtagcgtgatttcttcgtcatgtggtggttcaataatctgtaataaaacagtcaaacctttaacccccatagacggcacatatgttttcacatcacccaaatataaaggtaaaatggtactacgtatctgttatcacttatcagatagccaccaaaagatcaaatttaggttgcaaaagaataccatggacagaacgatcccctccagagcttgactttgcagaaaaacatcacggaagttaagtggctcaccgcctatatctggatcgtaatacaaaacctacacatgcaaagggatcttcagaaagaattctgttggaaaaaggtcataaatacaacatatgaaattcgacgcagaatagtaatgcaaaagtcactgttaatgaaaaaccctttagcagaaaaagttaccctatactactacagattagcaatcttatctacttaagtaatacttttttttttatattctaaaatgcaggaggatgatatgatgacatcttcctctttctctttgacaaaaccagttaaggaacatataagattctaacgcagcaacactaaggatcacaatcatctctacttaattactagtcttgatattttacgatgtgggagaattgttaacttcttcttttcctcttatccaaaaaaaaaaaaagaataaaaataatacccattcacgtttctttgcttcatcagaagcaagttgttcctctgaactcaattgtttatcctttagagaactgtcagtagctctatcaatctccttaagcacacttagccatctagtaatcagcaatgccctttcttgacctctatatgagactgcagcttcttccaatctctgaattgtctgatgaacactcttataagccccaacaccctgcaaagttacagtccggattattcactctagtcctaaagtaatgcaactgttgtgtcataattacaactgtattgtaataaaagcccttaataccaaaatcaaaactggaatctagaaaaataagacccaaatactaattagaaatgggaataattaaaaggaaaggagaaattacaatgcggtcttggaacaatttggctccttcagcgacggcttggccagcgtgctggacgacggagtcggcatagtttttgacggttcgtgtgatgtttttgcggtttccgacctccacagccttattcacggccgttcgcagccacgacatattctcagcgatcttatggtctactagggaagaaacctcctcggggaacgaaaaccaattttagagacgactaattactgaaatgagagaactcggccaccgtccatcaaagtttttttttactcggtttaagtttgacgatttgcaggcgactaatatattatttcttttctgaaatgtagcttatttttactatgtaacgtttgtatattaaaccgatttaaataacgagtttatgtataagtattttgttaaaaatgtaaaaaaaataagatcaaaaacctaaactatttttgtgaatactataaaacctctaaaacatttaagtcgttttcttcttcacataacaaataaccataaaatgaagttaaaaaaacaatatgtgaaaaatatggaatttggtggcaaagaaatgaatagtggagttgagaaaaaaaatgatcttctaaagaattttctaactattgaaattaaacttctaattttcgtagtagattacatgatcgagaatatataccaaaaaaattgaagaaatcatagctttcatgacatgaaagatccttgatgagaattaaaattctaatttaaaattaatttaccaatgaaaaaaattaattaattagtttgtcatagttgtgaaatgcaatctcaattatagatagtaaacacaagttttttcttataataattttcttatgaagatactatataaataattaattatttttaaaaataaataatattaatttagattatatattttatagttggtaaatgttaaaataaaatcttcatatctatttttttggtaaaaaaaacaaaacatgtaaatgtttttaaacgttgcccaaaaaaaaaaaaggtaaatgttttgactaaaaaatatccaatcgaaacttgggtcggatctcggatagttttatccaccctaaacagagacggcagctcataactcaatcagccataaaggccaaagaagggcccaccttttagatacacacaatcgtcgcactctcagattcttctccggagcgatcagatttcaccgacgacggttgtttttgcctcctctttcaatcagaggaagccaaagcttagagcaacagttgtaaatctatatatagagagggagagagagagagagagctcctctcgtccagtattagggttttaaaggcaagaactactagaacaagagaaggtacaaaaaaaaatgtcgggcctccatcgatcatcaagttcatcgaagaacatcggaaattgccttccctccaaagaactccttgatgatctttgcaggtaatttcatcaatcgagtgtttttcttcttttttctgtggatagtgaagcgattgggctcgaattgattttcggtaactgatgctttgtgatggggttttgtttcagtcgatttgttttgaatgtccctgaagaagatcaacagtcattcgagagaattttgtttctggtggagtatgcttattggtactatgaagataatgctgtagagaatgatccaaagcttaagtccctgtctttgaaagagtttacttcgctctgtatccttcattgccttctgattcattattctgtgttcaatttcttgtcttcactgtttagtacaatgctcgttaatgataggactatgatctcatatgctcgaagcataaatgatttgtgtttgccacatagactgggcttctctttgtcttttccattgttttctgtggatatttttccttgacgtggcctatagtattcaacagctgtgatgtgttgagaccttatgttactcacattgatgatatctttaaagacttcacttcttacaagtgtcgagttccagtcactggggcaattatcctggatgagacatatgaaagggtaagaaccctgtggggtgatatttaggtttacttattagttaatgcttaccctttttgtttcattgtcattttcagtgcctgttggtgaagggatggaaaggatcgagctggagctttccccgcggaaaaaagagcaaggatgaagaagaccatgcttgtgccatacgtgaggttagtatcaattctgttgtttcctgtctcttttgtgtttcatttattttacacttttgtagcaaaattgatatctccaacaaccgccactcattgatcatagtgcatattaataaagaacactatgtaattagaagaagaccgcttattgggttagattaacctcacttagtggatgcattggttctactttagtggttgttgacatatgaaaatgtgtcaacataatgtgcgcatgaattttttttagtatagatgacggaggtcaaagaatagcaaatagaacgtctcttatatcttctgctcttgaaacagagtaactcattttcacactaatttaacagtttgatcataacacatacaccttacgtactgaaaatagattctcctacgtgataattgaggaagaaaaaatgttcttaggtcaccagtagacagaatcttttgcaaatgagaatagtgctgctgtcaatggtcaactatataggctctctgtatctttttactatttcattggtatggaaatggtcaaaggtttaattgtagctctctagtgctattctcctggtgaatgtagcatttcaggtgctgtaattcttcttctgattgtttgtatagacttggaatatgggttaatgttgaaaaaaaactgaatattttgtcacacttcttatgtattgttcttccatgctaaattacaggtcttagaggaaactggatttgatgtctcaaagctactcaagagagaagaatatatagagtttgttttcaggcagcaaagagtacgactttacattgttgctggggtgacagaagatacagtttttgcaccacttacaaagaaggaaatcagtgtgcgtatttaacaattaacttgtggatctgatcttgtctgtgtatgtatgatgagtctcttatcttcttttgttgtggaatacttgtaggaaatcacatggcatcggcttgatcatcttcagccagcaagtaatgaggtgataactcatggagtttctggtctcaaattgtacatggtggcacctttcctttcgtgagtagtggctctctaatttatacacatagatttttgggtgattttcgtgttttggttcataacaagagagattacaaacttgtgcaggtcattgaagtcgtggatattaaagcatccttcacctgtagcacggagacctaacaagccccttaaaggtttgacgtctttttctcaagcattcattaaaagagaggtttttggtagagatctgactatatatgctttgtacagcactctgcgtgtggaatgcaaggactagtgttggagggaacgggacagcaacagtggaaagccaaaatagaaagtctgaactcaggacaacaacaatggaaagcaacagtagaaagcctgaactcaagagaacaacaatggaaagccacagtacaaagcctgaactcaggaaaggaacaatggaaagccacaatacaacagcaacagtagaaagccacaatacaaagcctgtagtcgaccattctcaggacataaaacctggtggcagtttcataaacttcaagttcaaccagtcagttatcttacaggcgttggaatctggtaattcagcttgactggtcagtttgtcacatatcggttggattggtgttgggagtaatgatgcggttggattggtgggtttgtctatagcaaaaccgttggatatgttcatacacgctggtagctttctatttctttgccatttggtttatatacctctcgtttcttctagaatgaaagggttgttgtaaatgatgttagtagggaagtggtgaatcctttggatcatggctttagatgacaatgttacgaccagctataaaggttaaaagagtttcttatccgagtagtgaatcgatgatcttctttatagcgccctctaactgcttaatcgaagcagaaagtgtttttctttttagaataaaaaatgaactcacctataaaacaaaaagtcgcacctaaataagtgaagtttatgtaatactatgattaccttggaaacaagagatatctcgagattgtttagtttttttcacattgtaatttgttagtataaaaggtgggtgggggaatggtggcctaaattcggcaagggtggcctaaaaaatacatttgattgctatacgaaaacattttaaagaaacagaaactgacaagtggcattttgtgttttacacttttacttgcttgtgtttaggtttggaggttcatctacataagcatcagcattgtgactttgactctccccatcaaaattaatcctaaaaatcaaagcatgttaaacagcccaaccacattgagaattttatctataaatagaattagaaattaaatccttggttaaacccataactcttctttcctcttttcttctccggctaacggtagttttgacgccgttagtttttcctccgtctattgatttttcccgcttcacaatcgcaacaaacccaaagaagaatgtctcgtgtggtcgcagcggacgacaatatggcgttgccgttcttctcgccggagtttggcaatgtctcaggcgcgtcgtcttctccaacaacgttcgcacagctcttgcaaaacgtcgacgactccacgcgtcgtagtcaccaccagcatcacgttgatgtggatctcgcctcgccggaccaatccgtaccgttcgttctctcgttcactgatctcacttacagcgtcaaagttcgccggaagttcacatggagacgcagtgtttcttcagatcctggagctccgtctgaggggatcttctcttccaagacgaagacgctcctcaacggaatcaccggagaagctagagacggagagatactagctgtgctcggagcaagtggctctggaaaatcgacgctgatcgatgcgttagcgaatcgaatcgctaaaggaagcttgaaaggaaatgtaactctaaacggagaagttctcaattcgaaaatgcagaaagcgatctcagcttatgtgatgcaagacgatcttctttttccgatgcttacagttgaagaaaccttaatgttcgctgccgagtttcgtctcccgcgaagcctttcgaaatcaaagaagtctctccgtgtccaagccttgattgatcagttaggacttagaaacgcggcgaatacggtgatcggagatgaaggacaccgtggaatctctggaggagagcgacggcgagtttcaatcgggatcgatatcatccacgatccgattctgcttttcctcgatgaaccaacttcgggtctggactctacaagtgctctaagtgttattaaggttcttaaacgaatcgctcagagtggaagtatggtgatcatgactcttcatcaacctagttaccgtcttcttcgattgcttgatcgtcttctcttcttgtcccgtggccaaactgtcttcagcggatcgcctgcgatgctaccgcgcttcttcgcagagtttggccatccaattcctgaacatgagaaccgcaccgagttcgctttggatttgatacgtgagctggaaggatcagctggtggaacaagaagtttagttgaattcaacaaagggtttagacagaggaaagcagagccaagaagtcagactggcttgtccttaaaagaagccatcagcgcaagtatctctaaaggcaagctcgtctctggagcgaccacaacaactcatagctctggctcgagccctgtttccactattccaactttcgcgaacccgttttgggtcgaactcgcggttctagccaaacggtccatgactaattctcgcagacagcctgaactattcgggatacgcctaggagctgttttagtcactggattcatcttagccactatgttttggcagctagataactcccctaaaggagtccaagaacgtcttggatgcttcgcttttgcaatgtccacaacgttctacacttgcgcagatgctctccctgttttcctccaagaacgtttcattttcatgagagaaactgcttacaacgcttaccgaagatcctcctatgtactatctcactctcttgttgccctcccttccttgatcatcctctcgcttgcttttgcagcgatcacattttggggtgtgggtttagatggaggtcttatgggtttcctcttctacttcctagtaatcttagcctctttctgggcaggaagctcattcgtcaccttcttatcaggcgttgtcccacacgttatgctcggttacaccattgttgtagccattttagcctatttcttgcttttcagtggattcttcatcaaccgagatcgaatccctggctactggatctggttccattacatttccttagtcaagtatccttatgaggctgtgctcctaaacgaattcggtgacccaacaaagtgtttcgtcagaggagttcagatattcgacaacacacctctggtcgcggtgcctcaggggatgaaagttaggcttctagcaactatgagcaaatcacttggaatgaggatcacaagctctacttgcttgaccacaggatatgacattttgcagcaacaaggcgttacggatctcaccaaatggaattgcttgtgggtcacggtcgcttggggcttcttctttcgaatcttgttctacttttctctgcttttgggtagcaagaacaagaggaggtaaaaacaaaactcagtttgatcttatggaggactggtttgaaacttgatttacctttgtttgttttctgtatttttcttttatctctttgttgtatattcttatatatgtggttgataaattgttgaattggagcccaactacttgctatttatttgaattataaattggaagactctgaaaagaaaagactataaatgtgtgtagaatatttggcttgtttgggtttgataagtaaaacaaattttacaactaaaaattgccaacttttttagtacaatagcaccttacacattccgtagaacacatcatatgacgtatgttgatggatttgccaaccatagtcaaggggaagcttagcctatagtctcgtcacttttagaacaccagcctctctaaacaacttcaatctcttgcttcagaaacatgaactatgtacaaactcatacacattccccaatcagattatgggttcctcttccggttcccaacactttcctcaacccctcattaataacatctactgattcaacctcgtaaaattcatctttcacatgcctacactggaaaagcaacaagatcaatcagaatcctttccctcaaatgcaacattaaagttcaaattcacttggaatgaggaaaaagataaggaaccatcaaacaccccattgggttcaaataggtagtgtacctttggccgtttccagtttgctctcgtccatggccagtaaatccagttctaccaaactgtacatgcttcaacatgataggtgataaagcttattattgggtcaaaacaataatagcaaacttactaacccttatttctcaaactcctttgtctctatcaactgaaaagtggctatgtcaacatttcaagcaagtttggtgtaggtggtgtacctttggtatcttggatatacctaaagccatattgatgacatcgtgttatgaatatccatcatctcgttcttcgcagatgcaactgaaagtcctaaaccaaataacagttataactcagccatatattggggttgttatggttctggcaagtccaacttcaagtagaacacacgagtgcttcggcaaagatacttgttcatcaagaacaaaacctgcacgtctctctggcctgaatagttctaccggtaaaaagtctggacccctgtattttaactagaggaaagtgtctcttctaacaacctaggctagccattcttcatcccctcatatccgttaaaccagtaacgttctacataagccggttgaggattactgagtgtagagaagactaaaaaaaccacatgtatttacaccatcttgcttcagttgtatacccattccaactcacagacagtgttacagtgcaaatgagaacaccggaaactgaatcacagcaagaaaggtaacaacatctagatgataccacaacagaagtgctatacatacacacagccaagcaatggccaagttcaaaactttttcgaacgatagagcagagtgttcctttacatcagtcattggaatgtccacaataatcagccactgaattgtctcggccatggcaaaatcacagaacttccgtttgatatctgatttactatcacttatcttcctggtcttagaaggttaaagcaaattgaatactaacctttattttaaaaaccatcaccaccgagctcatccggttgccaaattttactgttctttgaagtttcttcctcttccatattcttagttcttccagatgcattctcagttgagttcttattttctccatcaatttccattaaactcccttgttcttcaattttaatacgagggtcttgttggaacctcacagcatcagggtcattctctacattagtaggtgcacaaccatcattgttaaaagatggtctaaaagagctgctggtaccatcatgtctataaccaaatcgtcttctctcagcattaacatcaacaccaaatcgttcagaatgaatttgaccttcaaagaaatcatcactatagtcaaccctttctcgaggatccaagttattcatgtttccatggtttctatgtacaacatgatcagatggtttcctaaatgagttgccatctcttccataacctcgaccccttacataacctcggccccttgcataaccccggccccttccagcattcgatggtctatgcgagaaaggtggagaattgtgtcttctgacaaccatttctcttgaataaccagaatggtcaggcgagctcatcctctccactttgtaacctgagggtgatcttcgatgagaaaagtctgtatgcccactgaactcttcctgtgatctattcctgaaagacgaggatgaaccatctgatctttctcttgatctaactggagatcgtgaacgaaatccaggaaaatctcgtttggggttgtttacaaactttgttcgtcctcgagcaaaaccactccgacctcgatatggacgttggtgattcataaacagtggttctgtgttgttgcattgtaatccccttgtgaatttttcaccatctctaaatccgtgaaatgcagatgtatcctctttatttgttggtcctctattatatgaaaagctaggggatcttctcggaaaggagtgagcatatggtgtaactccatcatttgcaggccgtctccctctctgaaaattactcataaaagcaccaccccgacgagtgtttccatgattatcaaactcaaattctgcattcacaagatgagagtcatattgaattttagaaacaatgagctttgtttttccataaaaaaacttagataggactttactttttgtgtcctggtcatgcagattgctttctgtgttatcaggtaatctccttctgtcaggtatgaaatttaaccttgggcttctcataattctgccatggtacctctcacgcgagaatttgcaggattcatcactagcaaaagaaacaacaatggagaaattaaatacacaagctttcaataaagtacgaaaccaagaaaggatggaggtaagaaaagcgctcagaaatatcacctccctctgaaagtatattcccgcggttcgagtgggaaatcatgaaatctatctctttccattcggggtggcacaaagctgcctgaagcatctagtgccttaactggagatttaacctgagttaagtttataattcgactctgactaccgtcactgcactccataggagaatcattgtcaatagtagacatttctgccttgagtgaaactggactactgttatctactatttcagggttttcaatgccgcctgacactgtagagacacctgacgttccttcaccatcctgaactatccggccttcagtttcacctgatccatcaaatattctactttgaagttctggagaatgcctcttaatatgaacttcagtacttgccatttcgactaatttcaaacatgattcatcaacagtataattattaaacttaattgatgattaggtagagcatgctttaatatgtttattacctgtataaccaagaagtgcaggttgactccctttttcttccacatggttagaattatgaaagtggacatggcatggaacattaatgttcctttgttcagtttcagaaccaccacactcaggatgtgcaacctcattactttccgtgaaaacggcagctggtccttggaccttcccgtcatcgcacaaatttcttttgccaacttgctcctttattactctagatagatcataaccacgatctgattcaaacccataactgtataactgttcctctagctccttaccaggtaaagtaatcttctcttcatcatttctggaaagttcatcagttccacgagaattacaagggagttctttcgatatacaaggcttgcaatcatctagtattttctcttcagtcaaggaagtaacattcacacctgaagcattgaggttatgatctccatgaccagaataagtcgtgtaaactccaccatgtttcagcacttcgcgtaatttaccattagctaaactgctactctggcccgaattttcttttgatgtacagtcaggatcactctgaacgcctggaattattgtcattccactcaagggcattggtgcattgctgataccatttgaacaaggtaaatatttatccttctgatatggcgtagaacttgtaggtaaatcagggatctcatttgattgcattattggggtatggggatgattcaacattccatctttcctattgaaaacttctgattgagagaaggtatttggctcagcctttattgatataggaaccactgtcttcaaaatgccaaatgagggactatttccttggctgaatctgccaataccctcatgtttcagtcctttaatagatagcccgattggagaaacttgagtactctctgttgcctgcctaacactctcttcaatgatttctgacttcacagtcctaaggttcactgaacacacattcccagctcttgcctctgatgtggtagctggtagagaaggagatttctcaataggaggatatgaactgaggcctagactaagtgagcatgtgggattaacatgattatcaaactgcatcaacgtcaccttaggagaactaaatcctacactttccttctgtctttcagaaacagactttgtaatagcagtcgtatcacgacaacttgatctctctatgtcacgaagacttctgttactgtttaagaatgcaccacttgtgcgatctagagcatcttcccaaacatccatggtagtattcaaatcccaattttctctgttcaggccactgttgccagatttggtagaagtagaatctgtgttatgagcgggacaaactcccttgcttaatgacaaattcagttctgtaggctcttcattcttccaatatggagaattgtttttagtgttacaacttagctgtaaggaaacagtcttagcaccagaagatgcttctgtttgacactctcctctgagagtttccttgtcacctgtcttccggactatatcatgagtcttaagaacagttttttctactttcatccgagtttgatttgaggggacaacaagaccagcatgttcagcaccaacaggaagctttcccataggaaaatggattgaactgccaagtacgttagaactagaagggatgtcaaagcctgccaatggactggagtgaattggagaacttggcttctcaaatttcactctagtttggtcaaaaactatgttcccaatgctcttccctttaccagaaattcccacaggaacagatggtaatgaagaggttggttctcgaccagtcattttctgagtttcgtcagcatgagcactcctagtatcaccttgctcattaggttgtggaatctgagtggagacagcttcttccatttgcggctgaacaaggtacttcctcttcttgattggaatatcactgcagctccatgtagatggtctgatcctaggctgaatgagacagaggaaaaacacatcaatatgggaatctcaaaaaaatgtccgaagagttaaagtggggaataaacacctcttggcttccagacatagttgaacttcgagggtcctaataaaaatcaaaacttcactcttgtacctttttacaggctaactccaactaacacacctacaagatcaatatcattataaagcagagaaaaaggcaaaagaagaattcaaattcaaatggatttcagatgaaacaaacataaatcccacaaggtatctatctaactagaccctaatagacgcaagtaaacagtgaatccagagatcaacaaggcccctatagaaaggaagaacaatcaagaagaaaaaaatgaagtcaacgataagattacaaaaaaagtaaatcagaaagtaatatggttagtggagaaaaatctgaaaaagtatccaaaaaaggattgaatccaatacgtaaaaacaagatcgaagctagttacgtaagactcacagagcagagagaagagtaatcaaagaattagaggttcgcaaatctaccgacaaaaacaaaataagtgtgaaagagaataagaaatccagatttagggaagaaagagaaaggtgttaggggagagagaagaatctaccaaaagaaggaagagtgatggagaggtttgagtgataatggatgatgaggatgatgatgcagtttccaggaaaattaaataaaaagtacagtttagatatgaaatatatgaagagaaggctacacagagaaagagagagatgctaaactttgacaagggccacacaactctgcagcagcaactttgcctctttataacacagtttgactcatccacccttttttttttttacacggctttttcaagaattatttataaatattcggatttataaaatcgattcagcgaattataataaagatttgtataagactgtagtttttcagaatttttgaaaatcattattacatggttatatgtctatatgtttaaatttagtgttctcatttaagttttgctgactaaacagttgtggtccttgtctcaaaacaaaatccattcattttttttataattatgatgtttttttttttttttgtcatccaaaattagttaggactcaaacaaaataaatattaaatcttatgattattgaaaattaagaaattatatttatttctaaagtgaaaaataaataaagattgagtatatactgtactttattgcgccgtcgccggactaaatatatgggtgtggtcatgccggcttaatccgattagtatgcctaggtttaatttcacactaatccggaattaactcacttactttttctgctctggtccatggttttgataatgggccttatgaattctttccgtaatgggttttgactaataaaatattttttggtgaaaagagctagctccacatttaagagagcaactactatattgaccagtcaaatatctcctacatttattagtattactgtggaatattgaaaaataatatcaagaatttagtcatttaccaaaatgagccagatattttaccgtaaacacaaagttacaaaagaaaagaagaaagagagagagagagtcaggcgttacagaaataaagggaaaaacgaaagttgcaaaattttagtaacagctaactcctgcaaacaaaacaaaagcttcgtctgtatctatctctcccttcagactcggtctcacccctacttctccgatacaaccaaaacccaaaattaatttattcccattatcaacccatatgtttatggggttttgatgatcaaccattttgcaacacttttagatttgcggaaaaaccaaagagttgaagtgaaagaacaaagatggctagcttgaaactgggttccaaatctgaagtctttcatcttagtggtcacacatggtcagtcttcttcttcttcttcaatcgcttaaatcattcactaacaaaacaaaacgtttcatctccttttgtaatctgatcaggctttgcaagactggtcttaagcccgatgttatgatccaagtcgtagacgaaagcttccatctccataaggtaccaattctaatcgactcaaaactcttttgaatttctaaactcatacgttcacttttttaacttgtcttgttttcaacatcagtttcctttgttgtcaagaagtggatatctagaaactctgttcagcaaagcctctgagacaacttgtgttgctcagcttcatgacattcccggtggtcctgaaacattcttgcttgtagctaagttttgttacggtgtaagaattgaggtcacacctgaaaacgctgtgagtctcagatgtgcagcagagtatctccaaatgagtgaaaactatggagatgcaaatctcatctatctcactgagagtttcctcaacgatcacgtattcgtaaactgggaagattccatcaaggccctggagaaatcatgcgaaccaaaagtgttgcctctcgctgaagagcttcacattgtttctaggtgcattggttctttagccatgaaggcttgtgcagaggacaacacaagttttttcaactggccaatctcactacctgaaggaaccactactactactatatattggaacggaatacaaacaaaggccacgagcgaaaactggtggttcaacgatgtatcatcgttcctagatttaccaatgtacaaaaggttcatcaaaactgttgaatccagaggcgtaaatgcgggtatcatagcagcatctgtcacacattacgccaaacggaatcttcctttacttggttgttctaggaaatctggttctccttcagaggaagggactaactatggagatgacatgtactattcacatgaagaacaacgaagtctccttgaggaaatcgtggaacttctcccgggcaaaaagtgcgttacatcgacaaaattcttgctcaggcttcttaggacatcaatggttctgcacgcgagtcaggtcactcaggagactctggagaagagaattggaatgcagctagacgaagctgctctagaggatttactaataccaaacatgaaatactcaggtgaaacactctatgatactgactctgtccagaggattcttgatcacttcatgttgacgtttgattcaagtattgttgaggagaagcaaatgatgggagattctcatcctcttaagtccatcacaaaggttgctagtctgatagacggctacttagcagaggtggcgtccgatgagaacttgaaactatcgaaatttcaagcacttggtgctctaatcccggaagacgtgagaccaatggatgacggtatctaccgtgcaatagatatatacataaaggtaaactacttaacctaaatcttcaatggtttcaaagttactatgagttgcttgcttcttaagtatcatattagtcttttagataatgcatgtatgatgtatctaatttggagctatatcaggctcatccatggctaacagagtcagagagagaacagttgtgcctgcttatgaattgtcagaaactgtcattggaggcatgcacacacgcagcacaaaacgagcgtctaccattgcgggtcatagtacaagtcctgttctttgaacagatgcggcttcggacatctatagcaggatggttattcggctcggaggaaaacaatgacacaagcggcgcgttagaaggaaacaagaacacaaacgcaaatatggtgatgcatgggatgagagaacgcgtattcgagcttgaaaaagaatgtatgagcatgaagcaagatcttgataagcttgtcaagacaaaagaaggacgcaacttcttctctaagatattcggatcaagatctaagactaagacttcaccatgcggtaaaggaggtgaggacgctctagtgattcctgaaaccaaaaattgatggagaagagaaatgactaataacgacagttatatgatatggtcttaagacactttgatcacttttgttcttgaattttacatgttttgcctttttcttttatgcaattcttgcttgcttatagggtttgaaagactacatgcggacagtaaaactattttttaggtatgatagaaaaaattggtcttctagtgaatagaaagtggtcactgtaaccattcaaatctttcaatatgcatccaagaattttctaaaaatcttgttcatctcacaactatatatcaaaaatttactttgtcctagttattgggcctaagacccataaatactcggttacccaaaaaaaaaattctagatcctgaattctgatacactgccgttttttcaattctatcttcacaatgcttgtcgtttacacataacagcacgttgttagtccgtgaaataaacaaacggcacgcataaaccccaatactcaaacaagtattaataattctgctattaggcagagagagggcggctctgttgttgatcttcttctccggtgactcttactctctgtgtaaaaaagcaaaatgatgcgttccgttgacgtctacgtgaaaactctaggccctcccgtccgttcaattctctactcgatctttacctctcagcaaaaaccttcgtcgctgccttcgcttccatttcacttttcgttgcgttcgtcgtcgaatattcccactcgttgtttctccaatgtcgttgcgaaatccaattctccgatttacgattttcaaggattccgaaatctcttcactgagagggctatctcttcgtctacgacgacccccgtcgcttctgctcagccgcagcagcttcagaatcagaatcagcatccagctgaggttgatgaagagatttctatgggcttagaggacgaagccaagctttctattcctgtgcgagcttatttcttctccactaggtataattttgttcacaaactttaaaagtggatgtatttgccaatgtgttttgatgattgaagtagtttttggattgtaaattgtgtgcagcgttgatttgagaagcttaatagagcagaacaagcagaacttcatcccacctacttcgcgtatgactaactatgttgttcttaagtttggcaatcattctgatcccactgtaagttcaatcttatacctttattcagttttatgaagctgaggtaccttctcattgtgaaatgttgattcttctatggattgtttcaggatactactcgaggacgcataagtgggagtgagtctatttacatggtagtatttcattatggatcgattgtcttgtttaatgtaagggaacatgaggttgatgaatatcttaaagtagtggagaggcatgcctctgggttgcttccagaaatgagaaaagatggtgagttgcttgcttttcttttgcgctgtgtgctgttttcgcaatgttgcttactttctcatatctctggttctgtaaaactgtagaatatgaagtaagagagaatccaaatctggacacatggatggaggtaggacgggattttatcaggttgcagttcttgaatactgatgggatcagaaccataggatgtgttctgggccagagtattgctctggattactatggccggcaggtaaccatgtcaaatccttacacattgtattctggaatgtggaaaaatgaaaagagatataactgtgtgtgagcaatctgtttctgttataggttgatggtatggtagcagaatttactgagataaaccgtcagttggagataacaggaacgtttacaatgaaaaggaaaaagctgttccagttggttggaaaggctaatgtgattctggctgatgtgattctgaagcttggtctttttgagaggtaaagaaggaagaagactcgatgcctatctcagactagttttgtggataattgcgactgacttgtgttttgggaaaattgcaggtcagatatagcttggaaggatgcgaaatatggtcagatatgggagtttctgagagatgaatttgaactgacacagagttttgcaaaccttgattataagctcaagtttgtagaggtattattattattatcatccacacaatctttctcctatttttcgttgtgtcggaaaataataataattattggtggttttgcagcacaacgttcgtttccttcaagaaatacttcagaacaggaaatcagctactctggagtggctaatcattatcctgattagtatggagatcgcgatttctttctataatatgtctcgggcatccttgtgatcgagatcatcctctgccatttctaaagcatattcatattctttattatggttaccacttttcttcacaatgcaaagtgataactttataacaaagctcataaataagaatgagtttaggagttaggactacgtttgttacagattctctttgcatttaagagcctgcttcttttcagtccaacaagacttggttatgcatataaaatcatttatttcacaggtgcaagccttcttttaatttcaatttcaatgtagtgttgttatattaataaaagtgaaattacgaagcaaaatgaggttttgaactatgagaataaggattgagaaatgttttctaatgaaaacttatatacaccaagtaaaataaggagtcattgcataaagaaagagaagaagggtaaataaaatgaaagatgtactcgaaggtgacgaaaaaaaaagtccatgcaaaatagaagtcatccacacaacaacatacaataatatcgaataccaccaaataaagttccaaaaagaaatgataaaggtacacacaactcctcaagttcaaacaagaagtatgatacaataaaaactagagagcaactccataggatggggcaagattattattaatggaggatctgggaatgtattttcgagcccaaacatgttttccattaatggtgtacttgttcctttcgatcccatcacttacaatctccggtatcatggctgcagaatgtaacaccatctttgcatacagcgcctgctcattcccttcccctccaggcatgattatcgcttctataatctctccaaatctccttcaacacccaaacacacacaccatttaaacactccactactatgtatatgcatgccttatatataaaggttttagtagtacctggtgaagtaggcatgcacttcagcttcagaaagcgggtatcctctagaaaatgtgaggaagacagtcctgtcgtcttcccttgcttgctcatcctcagagaatacaccaaccttgcttgttcttgttgttgcttgttgttcacttaagaactggctacttgatccagctttatgaacagccttgctaaaccccaagtgcttcatatcctctatcaccttttccttctcagcttgcacgcatatatcctcaaaagctgggtaacatatactggttaaatgcttcttcatgtcaagaagaatgctttcacggttctggtggatgactgcgagagtaaggtactctccagtcatccgcgtgatcaaaggtatgatttttttcccaaagttggcaacaaacatagagaaattttcgtaggacaaacaactcagacacataacaacttcgtcagccactgtgttgatgaagaaatcaggtaaagaattaaagttgacgattaggttgcttacaagaccacttttctcgagatagaggagaaagctcatgacctggagagactgattaatgtctcgccttagtcgcacgacaaaacggcggaaaagggctctgtcacacttgtggaaagcattgaactcgtctcgcgtcacggctactgcagatgaagatgaagccattagttagtctttgcaacgcaggtatgagattatctggtgatactgataagtgatgaaaagatagatataagtaagagtgattaaaaggaatttactgaaatgttgaatatgtaaatctggacagacattgttttctttataaagagacccaattattcatgaaccaatgtctattcttattttttcttgaattgtcctatccattcctatttatactctgtcttatatttagctattttcatgtttccatattattttattttctgtcttcttgatactagttttaaacattcctatgtattgtttcttggagtccagttgtacagcattttatttatactatatggtctattcatatatggccaagcaatttcttctctatgtcatttaaataaacttttccaaggatgttttgttccatattgtttggtttcagaggctcaaagacttattgactttcttgagcttaaaccttagcaaaccaagactgaagtagtttgatgcaaaacagagtccaacacatggaaatgaaacataatatatgcagagaaaagaacagagactttgataggagaaaggtgagaaaggaagagagaacacacataatatttatgctaaagtctgggccgagtcacatctcggaatccactagaataagcaagttacaagagggaattccacagagaaagagtctcacacttgagatctcttctctgttacactctcaagagaaaaaccaaagattacacctttttaatggctatctctctctcttgcttgctttctacattgtatctctctcttgctcatttccctttgccacgttcacagcatagcttcatcttatatatacatgtgagaacaccttagatctagtgcttctccaaaacgctccactttgaattcacataaagacaaattgtcctttcttggcgcaaaagcatgactcaaccatagtttgtttacacttaactatagtttcattttcttcgcatataaaatccacacatatgaatatgatataagaaatggagatgaaagaagaagctccacaacattcatataaagtcagaaaatgtcagccaaaacattctcttattcacagagagatgatgtcgtttggtagaatactgtaatacacaaaaataaagttttaagttcatttacaagaagaaaggcttatatcccattgtttatcgatcgatcccttcgatcttgtcttccacctgcgagtacaattccttgagcttctctatgttttcagcggaagtgtcccagtagccacgaccattggcctccaagaaagtctgaagcattttcctgaaggagttgggattggtgttcatgagacggttcagcatctcctcgtcttggatgaaagttgagttggcctcctcgtagacccaattgtctacttgacctgacgttgcactccatcccacagtgttggacagtctcttctctatctcacgaactccttcatatccacttgacatcattccttcgtaccactttggattcagcagctttgttcttgcgtccagcctcactgtctcagatagtgtcctcacctgccagattcaacaaataccttaaggaatgtgttcttgcaaggtaaaactgatcccatatatgaactacaaagaaaattcactcacctgcgcgtttgcagttgtagtgtcagcaatgtaagagcttggtttcttcttatccttcctcaaactctgaactagatttgtagggtcagaatcgaagtagtggctcacatcagtcaaagaaatctctgaagaatccaggttctggaaggtgacttctgcagtgctaagagccatctcaaagacctgcttcttctcagccattcctgctccaggagcatcactatcaaacgcaaacgatttgcggctcaagtacatgtcctgaagctgtttctcatcgttccatgacgagttttcaacagcaagactgatgttggctgagtatgaccctgaagcgtttgagaaaactcttgtcgctgcctctctaatatcaatgccaagcgcctctgcttgttccaacgcgtgtttccttacaaaattttgctctacaggctcatctagctccgccaccatcttgatagctcggtcaagaaggttcatctgtcaagataattcaaggaagaaacaccatgagagaccaaccaacaagaatctaaatgaaagaagagagaaagcttttatctggttacctggttgataaagagatcacggaagacccctgagcagttaacaactacatcgatcctcggccttcctagttcttctaagctcacaggctcgacacggttcactcttccaaaagtatcagcaattggtctcacaccaatcatccaaagaacctgcccaagagactccccatatgttttgatgttgtcagttccccaaagaacaagcgcgattgtctcgggatatttcccttcgttttcgagcttctgtctctctaccaacctctcaaccacaatcttggcacttgccattgctgctgttgtgggaatagcctgaggatctaaggcatggatgtttttaccggttggtaagacctttgggtttctgatgggatcacctccggggccaggctcgacgtacttgccttccaaagcttgcattagactccctagttcgttgtccatgaccaccaacttcaggcactctccaaggaaaccaaacactgttctgagcttatctctgttcgccctgtagaacttggtgttggacaaatactcaacccatggctcattgattccaaacccaagaagcgaggtaagcttgtcagacacatccaccacctgtcctttgctatttgttgttttttccacaaaggcggaaacagcgccacgtgaggcatcagtgatctctttgagaagctctacatcgctcaagatacccttgtcgcttcctctgtaaacatcctctatctcccttccaacacactcagctaatatagaaggaagagctgaaatctcatcctccggacgatctagagcagcaatgttgaccagtgtggccacagcttccatggcggatggaggctctccaatgacgtgaagcccgcacggcaaaagccttgattcaatctccataatcttggaataaactttcccaaccacagaatctctgtctttaggtgacaactccaagccttcatctggaagatccacatccttatcaagattacattgcttagctgtgctgatgatggaactgacgatctgtggacctctccccgtgtccttcagagactgataggacgatatcagctcactcaactgcttcagccctttgtatagaccagcattctcagctggaggagtcaaataactgatggtgttggcataacttctcctctttgcaatggtagcttcagagggattgttagctgcataatagtagacattgggaatgttcccgataagactgtcgggaaaacaagcatcactcattcccacttgcttcccgggcataaactcgagagaaccatgtgttccaaaatgaagaacagcatcagctttgaagatcttttctacataagagtagtaagcagcaaaaccgtgatgaggacttgctgacttggagaaaagcagcctcatgggatcaccttcatacccaaatgttggttgcactccgatgaaaacattaccgtacgcttttccatagacaagaaggttctctccatctgagttaaggttccccggaggtttcccccagttttcttccagggcatttgcataaggagtgaggtcttggtactcacggactcccattttgtaagctacattgaggttagggctgctgaactgagcctccttgtcatgaatgatttcttcaataagagtctctgcattctcaggaaggccttcaacattgtagccatctctcttgaggtctcttaacaccgagaagatggaagcaaacacattgaggtaagctgcagtccctacattacctttatcaggtgggaaactgaaaacagtgattgccagcttcttctctgcctgcaatgagccagagttgattcatgagaacatacattacattcttgagaaagtcatgaaggaatgtgatttcactaaggatgagtggtaatacaataccttagtttttcttttgagctcaccccatcgaatcgctctgatgcagagttgctccactctcttgtggagagcatgtgacttccctgcagcaattggtaaaccacctccataagaaaacattcccactcttgcgtaatgacaatcatgaaaaatgcaatatggtcataagtggactaacctgttctagggtcacgaccagcgaaaacgattggctccatcgctccatcaagctcagggagggcaacctgcagagccacctggatgggatgcagaccaagtgtgctgtttagccattcctctgtcgtctggaacaccagtggtactgccacaaggtaaggaacatcgagctttttcagggcttcgatagccctgggatgatcctgccttgcaggtccaccaacaagagcaaaaccagtcaaggagacagcagagtttacgatgggctgtttcgacaccgggtctacgaaatatttctctactggaccagagaaatccaaccctcctgcgaatataggaacgaccttagcacctctagcctcaagctccatgataacagccacatagtgactatcatcaccagtcacaatgtgactcctctgcaagactaaaccgacaaccgttgcatctttcctcttgagtgagtcattggtgtcccttctagtgtcataccagttccagtactccttcacatcatcgtacatggttggagcaagtggatgccaaattccagtatccaagaacaaaaccggatccgaatactcgattttgacacctttcaaagccggaacataagatccagaaatcatcttaacaaaattctgaagattatcaggagagcctccaagccaaaactgtaaactcaagatgtagagacgagcatcttgagccttgtcactaggtaagtacttcaaaaccttaggcaaagtcctaacaagcttcaacatactatcggcaaaaccagcagagccttgtttcttcctcttgaagagttggaaaaacggagactttgactgacccaattgagacatactaaaagatccaagcttgttcagtctcattacctcaggcattgaagggaagacaagaactgcgtccatcctgtctctctccttctccaccgcatccttaactttaatcgccaattcctcgacgaagatcagagaaccaatgaagatgttggcgtctttaaggtcttcgcagaagttgttgtaagtgttcttgtctctaagctcctcgaccaagtatccaaccacttcgtaggatgcgaatctcgaagtcttgttgagagattgcacggcttcactgagagaagactggtactgagcctcgaggacgacgtagacgattttcaccgtcggaacgttgtctctcttgatcggaactatacgacggacctccgggttcgtctgtgtgaagaggccgtttccagatacagcagatttcaccttgaagaaagatttggctggtttggttgatctgtgtttcttccggaggaaagaatgtttggtactgttagtgagcgaagagagatgctctgctttagaagtggatagagtgaatggagaatacacaagcgaagccattttgcggctgctggattctccaaacgttgaattcgaagaggagaggataggagaagagatgaatcgttttttgttggttgtctcttacactttttgagctccaagtgggagtttatgattctctcatcggtaaacgcttcggaccaaggaactaaaaaagaagcgttggttttgaaggtaagtggtgagagggaaggacacgtggacgaatagttacggaagaagggagagtctacttgtgaggttgagttttgtcggatgtatatccgcttgggacaatgagatggactttgctggcctctgattggctcattgagatttctattcatattttcatggtttgggagtgtggatattgagtgtcttattttctttacttatttgacaagtatttttatgttgctctcttgaagatcgtatttgcggtttcagccatgtaaaagattcttttccgatgacgacacttttactaggcatattcgtcgggtagccggtttaatccggtctagattttgtataatttttggttcagctaggtctggtttgatatttttctacttatttcttaaaaactggctttaatcttttaaggtaaactcaggatttttctttgaaaacgaaatttgaaatatcagactcataacaattgtaacaacaaatgtaaaagttaaaacactctaaaatgtactcaaaattttgatcatcatcatcactattttttttataataaatggatgtaaaaacttatcatgtttcaatatttaaaacttttttttttttcaatatttaaaacttacataaaatatataattaaaagaaagtttatgaattagaatattaagttatatgtaattaaatggagcaatacatgtagcctactagtattgttgttgcatgagttgcatcatattcgaagatatacaatatgtttttttgatataagagtaccgcttcattctcttttttttttttgtcatttcccaagtgtaatattgttattaatacatgggctatactaaaagccccacgaaaagtttactgaactatttgaggcccaacaagagcctatcggattaacgcctactgcagaagaaaatctgtctgcactccacccaagaaaacgcagactaattaatgaaatcaacgaaacggataggtcgggtctaaggttgaccatgaaccgcaacctgaaccaggagcaaagtggtcaagttttgccatccggtccgagtcccttggaggaataataccagaacagaaaaaaacagaaaagtcgacaataaacaaaagagacaaatttgatttgattggttccagaaattcgcagagaaacagctctttgtctctctcgactgatctaacaatccctaatctgtgttctaaattcctggacgagatttgacaaagtccgtatagcttaacctggtttaatttcaagtgacagatatgccccttattcatcggaaaaagccgacggagaaaccatcgacgccgccatctgaagaggtggtgcacgatgaggattcgcaaaagaaaccacacgaatcttccaaatcccaccataagaaatcgaacggaggagggaagtggtcgtgcatcgattcttgttgttggttcattgggtgtgtgtgtgtaacctggtggtttcttctcttcctttacaacgcaatgcctgcgagcttccctcagtatgtaacggagcgaatcacgggtcctttgcctgacccgcccggtgttaagctcaaaaaagaaggtcttaaggcgaaacatcctgttgtcttcattcctgggattgtcaccggtgggctcgagctttgggaaggcaaacaatgcgctgatggtttatttagaaaacgtttgtggggtggaacttttggtgaagtctacaaaaggtgagctcaacaattctcactcttcctttatattgggatttggattggatctgatgagatcacgcacttgttgcttcttcaacatcactcaaactttaattccatgtttgtctgtcttactctttacttttttttttttttgatgtgaaacgctattttcttaagagactatttctgtatgtgtaaggtaagcgttccaaggacgtaattggcttggactatttctgtttgattgttaactttaggatataaaatagctgccttggaatttcaagtcatcttattgccaaatctgttgctagacatgccctagagtccgttcataacaagttacttcctttactgtcgttgcgtgtagatttagctttgtgtagcgtataatgaagtagtgttttatgttttgttgggaatagagaagttctaactacatctgtggaaagtgtgttcaggctgtgatagaggactgttgctttattattcaactatgtatatgtgtaattaaagctagttcctttttgatctttcagctcaatgtgcttttctcaatttttttctcaatttcaaagtttcacatcgagtttattcacatgtcttgaatttcgtccatcctcgttctgttatccagctttgaactcctcccgaccctgctatggatatattaaaaaaaaagtgttttgtgggttgcatctttgttacgatctgcatcttcttctttcggctcagtgttcatgtttttgctatggtagagatgggcaatgttattgttgatggtaacagtggtatagttgatagtatcttaactaatcaattatctctttgattcaggcctctatgttgggtggaacacatgtcacttgacaatgaaactgggttggatccagctggtattagagttcgagctgtatcaggactcgtggctgctgactactttgctcctggctactttgtctgggcagtgctgattgctaaccttgcacatattggatatgaagagaaaaatatgtacatggctgcatatgactggcggctttcgtttcagaacacagaggttcttttctcatcgttctttctattattctgttccatgttacgtttctttcttcattacttaaggcttaaatatgtttcatgttgaattaataggtacgtgatcagactcttagccgtatgaaaagtaatatagagttgatggtttctaccaacggtggaaaaaaagcagttatagttccgcattccatgggggtcttgtattttctacattttatgaagtgggttgaggcaccagctcctctgggtggcgggggtgggccagattggtgtgcaaagtatattaaggcggtgatgaacattggtggaccatttcttggtgttccaaaagctgttgcagggcttttctctgctgaagcaaaggatgttgcagttgccaggtattgaatatctgcttatacttttgatgatcagaaccttggctctggaactcaaagttattctactaaatatcaattctaataacattgctatattatcgctgcaactgacattggttgattatttttgctgcttatgtaactgaaactctcttgagattagacaaatgatgaattgataattcttacgcattgctctgtgatgaccagtttcttagcttcgacgataacatttgtcatactgtcttttggagggcattgaattttgctatggaaagcgctggagcttccatgcttgcattctttaccaattagcgttattctgcttctttcaattttcttgtatatgcatctatggtcttttatttcttcttaattaaagactcgttggattagttgctctattagtcacttggttccttaatatagaactttactttcttcgaaaattgcagagcgattgccccaggattcttagacaccgatatatttagacttcagaccttgcagcatgtaatgagaatgacacgcacatgggactcaacaatgtctatgttaccgaagggaggtgacacgatatggggcgggcttgattggtcaccggagaaaggccacacctgttgtgggaaaaagcaaaagaacaacgaaacttgtggtgaagcaggtgaaaacggagtttccaagaaaagtcctgttaactatggaaggatgatatcttttgggaaagaagtagcagaggctgcgccatctgagattaataatattgattttcgagtaaggacatataaatcataataaaccttgtacattttgtgattgtatgatgaatatctgtacattttatctggtgaagggtgctgtcaaaggtcagagtatcccaaatcacacctgtcgtgacgtgtggacagagtaccatgacatgggaattgctgggatcaaagctatcgctgagtataaggtctacactgctggtgaagctatagatctactacattatgttgctcctaagatgatggcgcgtggtgccgctcatttctcttatggaattgctgatgatttggatgacaccaagtatcaagatcccaaatactggtcaaatccgttagagacaaagtaagtgatttcttgattccaactgtatccttcgtcctgatgcattatcagtctttttgttttcggtcttgttggatatggttttcagctcaaagcttacaaagctgtttctgagcctttctcaaaaaggcttgctcagtaatattgaggtgctaaagttgatacatgtgactcttgcttataaatcctccgtttggtttgttctgctttttcagattaccgaatgctcctgagatggaaatctactcattatacggagtggggataccaacggaacgagcatacgtatacaagcttaaccagtctcccgacagttgcatcccctttcagatattcacttctgctcacgaggaggacgaagatagctgtctgaaagcaggagtttacaatgtggatggggatgaaacagtacccgtcctaagtgccgggtacatgtgtgcaaaagcgtggcgtggcaagacaagattcaacccttccggaatcaagacttatataagagaatacaatcactctccgccggctaacctgttggaagggcgcgggacgcagagtggtgcccatgttgatatcatgggaaactttgctttgatcgaagatatcatgagggttgccgccggaggtaacgggtctgatataggacatgaccaggtccactctggcatatttgaatggtcggagcgtattgacctgaagctgtgaatatcatgatctctttaagctgtcctgtcagcttatgtgaatccaatactttgaaagagagatcatcatcaattcatcatcatcgtcatcatcatgatgctcaactcacaaagaagcctgagaatgatactttggtgcgaaattctcaatacctctttaatattcttattgaatgtaaattatacaatcctatctaatgtttgaacgataacacaaaacttgctgcgccatgtttgtttgtcttgtcaaaagcatcaatttgtgggttatacgtagtgtagaggatgattcaaatttgtgataaatttggtaatcaaagttaattctgaaaatgcaacaccacatgaactatgtcactaaggcctagaagatcgttatcagtaatagactaatagctcgccaccatgtatgtgaagttgggaatcgataagtcggaagagtgagagacgtggcttaacctggtccctctaaatccatacgatcgcttaatgaaatcctcggaataaaacagcagcttctcctctccaaccaaataaaatcctttaagctcccctctctctcccattctcttctcccttttctctgtttcgcggcggagaaaattgaaatggagctcagcttgagcacttcctccgcttctcctgcggttttgaggagacaagcttctcctctgcttcacaagcagcaagtgctcggcgtcagctttgcttccgcgctcaaacctggaggaggagctcttcgatttccttcccgccgtccgcttcctcgtcccatcacttgctccgcctctccatcaactgccgaaccagcctccggttattttttactctctcttatctcttccgatagttttattactggaaattgatttcgtttttgtcgagttaagtcagtttgaaataagaaaactagtcaatcaaagttctaagaattatcacacgtaggttagtttcaatatatatatgtattttggtggttgattggttctctaaataaaatcactcttgttatgttatgccagtagaggtgaagaagaagcagttggataggagggataacgtgaggaatatcgcaatcgttgcacatgttgatcatggcaaaactactttggttgattctatgcttaggcaagctaaggtaacaccttaaacgcatataatggcattgggcaacttgagaaagtttttcttaacccatgccttactttgcaggttttccgagataaccaagtcatgcaagagaggatcatggactcaaatgaccttgagcgtgaaagaggaatcactattcttagcaaaaatacctccatcacttacaaaaacactaaagtaaatattatagatactcctggccattctgactttgggggtgaagtggagcgtgtcttgaacatggttgatggagtgcttcttgtggtaatatgttgctttctctcaatgttttagaattaactgtttagtcctgtatttctcattttaatttttctctcctcaatttcttaggtggactctgttgagggaccaatgccccagacaaggtttgttttaaagaaggctcttgagtttggacatgcagtggtcgtggtcgtaaacaagattgacaggccttctgctcgtcctgaatttgttgtcaattccacttttgaactatttattgaactaaatgcaacagatgaacaggtattgttcatttgggtttgtctatcctttctttggtatttcgccgcgtgacttatataccttgagtatatttatatgacactaacctcaatgatatttctgggtggcttgtagtgtgatttccaagcgatatatgctagtgggattaaaggaaaggcggggctttctccggatgaccttgcagaagacctgggacccctgttcgaagctataatcagatgcgtacctgggccaaatattgaaaaagatggtgcacttcagatgcttgtgagttattctgattttttactgtttcatgttttatgtgtttgttcccaactagtgccaaaaagctaacttgcatttagatttcctagccaaaaatctacacatcaaaaacttgtatctctcaccaactaaaagcagtcacttgctacaagcttcaaatcctagaatctaacgatccagtggcactctgagataatgaaaacaatttgtggcagtcaaattgatgaatttgtctcatctattccaaactaaagatcacgaagactttgcgtccttgcatatatggccataattaataaattgggatattcctcaaaccaaaatgtgaaagaaatttcaatataccagacagtctagttgaatggatattcacttgtatgaaactaatatactttttctttttgttcaggccacaaatattgagtatgatgagcataaaggacgcattgctattggacgactacacgcaggggtactgcgcaaaggaatggatgtcagggtaacattttgattatcttgaacttgttgctttgttatgggacagaaataatgtgggatcatagaaaaaatatcaccttaagctagtcaatctctcaagtctttacaccttgtagagcaggtggcctctgccaatatagcgtgtaaaagatagctaaatggtaagcaggacaagatattctcggacaaagtttctattaagtttcctaggtttctaattcattaaattttgtgatgaatacgtccaagacgtaattgaatgggggatggtaccaaaaccttaagaatcagcgagaatattatacaaactcaccaacttcttgcagtacttatatggtttatagtagacttactggggtataactttacaggtgtgcacttctgaagattcctgtagatttgcaagagttagtgagctttttgtatatgagaaattctacagagtacctactgattcagtggaagctggagatatttgcgctgtatgtggcatagacaacattcaggtacacacgtatatgcaatagataatttgatgccaaatgtgagaggctgttgtaactctggtggataatttctgccacttatcatttttctttttgttgctaattgagttgtaacaatagatttccttgtttaccctaaatttgcagattggggagactattgctgataaagtacatgggaagcctctacctacaatcaaagtagaagagccaactgtgaaaatgtccttctctgtaaacacctctccattttctggtcgtgaggtaggtctatttctgtcatgagctatcttactgtatttttcatgaatgcatggttacaagatattaagtgggaaatcattaactttgatgaggcaacattgtcgaccaaaaagaaaaggattagtgcaacaattgaattatcttttcttttctgtaggggaagtatgtaacaagcaggaacttacgagatcgtttaaaccgtgaacttgaaagaaatctagctatgaaagtggaagatggtgagacagcagacacattcattgttagtgggcgtggtacattacacattaccatcctgatagaaaacatgtaagtacttcggtgaccaccattcctttcatatttgaaattgatattagctgaacggtcatatgttccaggcgaagagaaggatatgaatttatggttggccccccgaaagttatcaacaaaagggttaacgataaattgctggagccatatgaggtgagtttctgactgaagctattagtttcctaccaaaggaattggcagcaacttttgaaaccatgatttcagtttgatttgaatatccttggtttaattgtcaactcattgaaaagaacttttgctttcgtgaatttaagtaaagacgccctatctaacttcaaatccaccaattcagatagcaactgttgaagtaccagaggctcacatggggcctgttgttgaacttcttggcaaaaggcgtggacagatgtttgatatgcagggtgttgggtatgtattgtttctcttgccattcctttattttatatgcaaggtgatgggtgtacataattcttctacctcttagtgatgatattgtgttaatactgctcgttttaatggtaacagttttatcgtgttgggagtaaactgattaagatatatagcggttatttttttggattgtttgtagcagcagtttggtgatattagatgactgtaaccatcatatgaatatacacaagacttgttactgctttgagaaccgtttggtcattttctcaagcggggccatgcaaaggcttttctctatctgtccacttttactgcatttatacaagaacaacaatacatgatgtcatgttaatttctctccttttttttgtgtgtgagacgcctgagggtttatgttttcagataagctacttggtaaatatacagtatgcagcttttaagatcaatctgaccatgcatgtgaatcctgaatgacaggtcggaaggaacaacctttctgcggtacaaaatcccaacacgtggacttcttggattgaggaacgcaattttaacagcttctcgcgggacagctatccttaacactgtatttgacagttatggaccttgggccggtgatattagcacccgcgatctaggttcgctggtaagttgtaggttccaggaactagcaatcctaatcgatagattgatcgaaagtggtcacaaaatatgaaaagtgaactttttgattgaaacatgccattttggtagctgaatagttgagtgtgactttcaggttgcctttgaagatggaacatcaacatcatatgccctggcgagtgcgcaggagagagggcaaatgtttgtaggttctggagtggatgtatacaaaggtcagatagttgggatccaccagagacccggcgacttgggtcttaatatctgcaagaagaaggcagcgacaaacataagatccaacaaagatgtaacaggtatttcatttataaatacatatatcatatatctaaacttgtgaaagtttcaaatcccatgtgctcacaaatctgttctcaattacagtgattcttgacactcccttaacatatagtctggacgactgcatcgaatacattgaagaggatgagttggtggaggttacaccttctagtattaggatgtgcaagaatcagaaaatggcaaagaaaggcaggcagtaaaacccatttttgcaagctgggtttggaggaaattgaagaaaagcttctactaaaaaaaaatgaaagctagtttctagtgttatttataggcttgtttgattgttatacatagtcttattcttatagcaaagggtgagtcctgatgttatccaattaatgtttttttggaatatctccatgccctttgatcatctgatacttaaagctgtacaacttctgaagttgcgcactagcagatattaaagtgtgaatccttgagcatatactggaaaatataggcttgtttgatagtttctagtgttatttatagacttgtttgattgttatacatagtcttattcttatagcaaagggtgagtcctgatgttatccaattaatgtttttttggaatatctccatgccctttgatcatctgatacttaaagctgtacaacttctgaagttgcgcactagcagatattaaagtgtgaatccttgagcatatactggaaaatatgcattcagaatagtgggcaggactctctcaatagtggccctagaatcaggtaactaggtctagttagtaagctagaattgcaataaaatatcaaaaaggcatttccaatgtaatggctacaagaaatctttttccataacaacactaaaccggcatgagcaagctttttaaattgggaacggggccatatgctcgcaatccaagaggaaatcaaacgataaaatatgaatgtttgactttatatcttattttgataaaatgtgttcagcgttcctttggtctgggccatccttaaacgctaggaaaacaaaggtagcgtggtcagttgtgtgcacacctaaaagtgaaggcggtttggggttgagagcagtagaagaaacaaataaagtttgtatgttaaaactgatttggagaatactttcggctaagggttctttgtgggtggactgggttaaaaaacacttgcttagaggtggttccttatgggcggtaaaagaaacaagttcgagagggtcgtggatatggaagaagctgctgaagtatcgagacaaagcaaaatgttttcataaggtggatgtaagaaacggtgagtcaacgtcattttggtatgactcatggtcctctttaggctgcctatatgataaatttggagagagaggttgcatcgatatggggatcccaaaagatagtacattaagttcagctataatgacaaccaggagaagaaagcaccgacaacctttgttaaacgcagtggaaactgagatacaaaagcagaaacagagccgcatagtaacagagcgagacgttgcgctatggaaggggaaagaagatggttttcatccaacgttcctctcgaaagaaacatggtcccagatcagaaacacacaaccggagatgcaaggctacagggggatttggttctcaaatgcgactccaaaatatgctcttcttacttggttgatggtcaggaatagaatagcaacaggggagaaaatggggctgtggaatcaaaacacagacactagctgcattttctgcaaaaatccaaacgaaacaagagagcatctattctttcaatgcgtgtacacgaggaaggtatggaatggtctcataaaagggttgcttctggacaaatactcggacagatggcaagacattattctgatgcttacaaggaaagattttgacaccacgaagagctttatccttggatatgttctgcagaattctattcactcgatatggcgggaaagggatgatagaagacatggagaagacccatcaaatgaggagagacttatcaagtttatcgacaaaaatattaggaaccgtttgagcactctaagaagaggagatgaagagaagtatgtgaatggaatccaagtgtggtttggatcaagaagaacattttagagttctttgaaatttttaaaacaagtttacatgtatatgtataaacgtttatttttcttttgaatataatttaacattagattcaaaaaaaaaagtatatatatatatatatatattcaaaatattatttattgtataagaattgagaagtgttgctattattgtttttaatgaagaatttaatatttattaagtataatagtgctatataatagtataataataagttcggtagataatcattatgtaaatttaaattgtgggacaaaataatgcttaattaatcagttaatccgccggattcataccaaagaaaaagatgatcaattttcgaaaaaaacagtgccaaaattcgactgttacaccaaatcaaggactgagtgtatgagactcacaatgatcttaaaactttgaggtttactgttaactattcgagtatcttggagtcctcttttcactcttacctaaacctcaatcccctctctcacttctctcgcttcgaattctgtgacttgttagttttcaccctaaaaatcccaatctcctggttggattctgggttttgacttcgacgttgctcaatctgacgccgcgttcgagctactgaagtagctaacatcaacttttaagaacatcgctgcgatctcactcccagggatgcaaatccaaggtaagcgccatgatttagtgattttagggttccactatttccccattcaggacgagctactgtcccttgcctagtttacctatctataagtttgttttcatgccttcaaagtctcacagtttttggtctatggttggttctgacagatgatgagaaaagatattagcagaaaggatataattgaggagattccatattctggttcttcgagaatggaattaaagcggagtcatcatcagtggttgacagaagagtctagctcagaactattcagtaataagagacaacaagtggtagagattgatgctcatatgaatttatctccatgggacacttctcttgtgccctcacacttcactgattgcttattcgatgatcctgccattgcgcatacatcacatcttctccgtaatggtcgaaattatactgaggagcaatgcaatcctgtttcatcttttggtttgccactggctcatcacgggagctcttttaatcttgacaccattaataaagttagcaacgtgcccgagttcatggttcagctttatggtcagggaatttcaacatcatttgaaacggctccttcttttaatagtggtcaagagagtactacgctatcctttggccaaaccttcagtaatactgacaggagcttcatcttgccagggcagttcgctagcaaaacagatggaaatttcattcgaaacttcaataatgaaggtgttggtgtcgtaccgattggtgattattatgacaaaggagatgaaaatgtcctgtcaacatttcatccgttggagaaaggagtagaaaactttctatcgatgggtcagtctcttcaaaaggctgattgtaatatcttctcagtgagttcctcctataataagggacaggagaactttatgcctcttctctcttgtgaacaagtacctgaatacgatttcatgaccgaatctaactatcacaatgaaaatgccaatgcgttgtcagcgggacagtcctcatttacggaaggcggtgagatgacatttatggtttctagccaagagagagcaggtcaaagcaatgatcaaatcaggcgcgaggatgatagaagcgagaccctatcttttggagattgtcagaaagaaaccgcaatgggatcatcagtccgtgttagtaacaattatgagaacttcagccatgaccctgcaattactaaagatcctcttcatatcgaagcagaggaaaatatgtcttttgaatgtagaaatcccccttatgctagtcctagagttgataccttgctggtgcccaaaattaaagatacaaagacagctaagaagggttctacaaacacatttccttcaaatgttaagtccttgttgtcaacaggaatctttgatggagttactgtgaagtactattcgtggtcacgtgaggtcagtttgtttgttttttacctgtcctgagaaggaacctttcacctttactcttctgtgtgctgaaacattatttagcagagaaatctcaaagggatgataaaggggactgggtatctatgtggttgcggcaactgtaaacttaataaagtaagcaacctgatataaatggttttagtaattcactggcaggtctgtttgatacaaatctatgtcatctgtttgttttccaactgaattctgcaacaggttctcaatgcgtatgaattcgagcagcatgctaattgcaagacaaagcacccaaataaccacatatactttgaaaatggaaagaccatttatggcgttgttcaagaactgaagaatacacctcaggagaagttgtttgatgctattcaaaatgttacaggatctgacatcaaccataagaatttcaacacatggaaaggtagtagagcaacatagaaacttttataggatatagccgcttagagcatgacaacaagatacaaaagccaatcattgttctaattttgtctcttttcagcttcatatcacgttgctagacttgaacttcagcgtatctatgggaaggatgatgtcactttggcatcttgagaagacgagttatcaactggcaggctttttgtcgtaagtgaagtctgggtgaagtctaggtctcttactaaagtatataatctactgcaagaactccaagttcttagcttttatgagacttaatgtagcgcattgcttgctcttattctggcaaaccaatactatcaaaaatgtttttttgcgatatatagagatcctggaacagaatcggcatcttagactcactcttgagaccgagctgctgccttcgggatcattaaatggtaactgatagatactacttggttattatcaggcgtcggaaccttctgttggtcaatctttaccacagtctctgcgcatccagcgtttggttgaagcatccctcctttgtccttgcttttaccccataataccaaatatatcccaatgacaatgacaactgacccaataaccctacaaatttagaagctcatttagtgaaaatcaatttttctaactttggatacaacagtagtcttagatcaaggttattattaccttcctacgtacactttttccaagaaaacaaaggtgctcagaatagcaacgagaaccatgctgagcgggttaaacgcgctcacaaacacaggccctctctcctttgacgcccatccaataacatagtatgctaaccctgagactagtccctgtagtacaatcaacaatacttcttctctcagcaaaacatacacacaaactggaaaatgtaggaacagattacaagaattgttgtactccgtagattgaagctaaaagcgtcacgtccgggttgattttccagaccgacatgtttttcctttcccatatcaatcccataacagtagcctccaacatccccataatgcacataagagctgttagcgagagctcagctttatattgagccagaatctttgcctgagaaaaacataaagtcctctgtaaccataagtactctgtgatatcacatttttgttcactagagatatattctcaatgttttatctcgagaaatatgttaagctttagtaaaactggtggaaaacttctggctttaggttagctaccaagattcatgaacatggaagcgggaatggatcatacctgtaaaatgatgtaacatgaccaactgaagcagcttgctacaagcataattgatcctcttgctatatccgcctgctttggaatcctcatagcgtgtgtgtgcccattaagaccccttgagttgcttgtccaaggcagctcaatgacattccctttcacgaatgtcatgagcattgctcccccaatagccaccatggttcccaccagctttgcctggctgtggcgtctttcgattgtcaccttctcgagcctttcaagaaacagaaaccgagtcaaattgtttcagtactgcaatgatgtgtgcatcagcaaataatatcggtctagagagtgagagagttacttgaaaacgcaggccattatgaatgtcatagcaggaagagcattgcacaaagctgatgtgaatgtggcagtggtaagtttcatccctgagtagtacaggttttgttcgaccacaggcctgtgtttaatcatttaaatcaagttacaacagactatcattgtgcatcagaaatgatttaaacaaactcttactcaaataaactaaggatggctatttgtaacaaaatcttgaaggtcaactttggtcttgtgttcctgcatttggagcaaaaggaaccattattttaacctcaaagtgtatgtttttgtgttacaggccttgcatggaccggaagaagaaaagaaacctctcgaggatgagagcgaaaggcgtaatgagagcggaagcaactgccattcggtaagcaactaagacgtgagggctcattcccttgttcaaagctaattttgctactatagacatcaaagcgtacaaacattgtatgaaaacaatggctatgaatggccttgctctctcaaacttcattctgcatatataaaacctttctcttggttagaaaagagtagtgtttggtttgttatatggaaaagaaaagaaaaaacaaagttaaatatatgcgtgtgtattatttatacatagattcagttttgaagcctcataacgttttcatgtgttcagaagtaaaaagcattgtgttgaagtgcaaggaatttaagacatttgcctaaaaaagaggaaagaaaaagagcactaaactcgtgttttaaggggtaaacatttcttgattggttgggtgctgattctcatagacctcttttattaatttttttgtcaacatacccacttttattattattaatttggcagtttcaagtactttactcactagcttccgctcattatatgacctttgttttttattttattttattcgtcacatattttgttaatcgtctaaaccgatctacatatgagtcacttcactttatcaactgcttctaatggatttttctctattatataaaacattactatctcgataggatatagggacctaacatatacaaactgcataatgaaaccattttacgtcacaaagcaaaacaagaaactgagacaaactaatatgaagtggataaccaaaatgatttgcaacacacaacatatattacaaaacaaaagtatggttatttgaaaatacatatatggtttcttcacccctcctcgagtgacagcaataagtttcatagaaatatattataaacctactttgaactcttatataaatatatcctcggctcatcacatttatcatatttattttagttgtaccagcacataaacagaccatgttgtttgacacctacaaaaaataacacaccacgttacgtacatgcgtatcaacgatgacatgcggttgattgattatggatgatgctgtttgatgaacagtactattggagttcgattttttgttgtgaatcatggagttgaccatggtccatttgcggagactcttatttgagaaaaggagtggcgactagtaaaacaaatgacacgtcttgggtcttcttcttctttttttgtttgttgataaagatcttgggtcttctatgcaagagataagaagcctttttgtcctttttagtttttaatataccgtttcacttactttaggctggtttatgcactgcatcggtggtatgattgctttgtttcttttgtctctttctttcttttgtgttaatatctaggcgatctaaacctttcactagcctaagtgtttatttaatagaaaaataatttcacttttaaaataatggtgctactggtttgccattgtggttaaaggattctgttgagtcgaaacgacatgtgagctctgtgtaacggacatctcgtcattttttacttgttgtggttaaaggttccttttgaatcggaatgtaagcattagcaatgaacaaaaatgtagcagatgcaccttaatctcatagtacagtaacaataggaaagatacaaaacggtagaggaaggttttgatgtttaaaaagcacaagcttattcagtcaaaaacagatgtagagattttcatgggcttatgaagaccttaagcatccagctaaaggcatctgaatctcgtgctgtggatctcgtcttctgagcgtaacgttcaaagcaataaacttcttcatctacgctctcgctggacactgtatcgtgtgctagctctacagctgctacttgggagacctggaaattctctgcagtctgttgcaacttctgtgcagactccatttcaccaagtgttaccagacatatcaacaacgacttcagctctcgctttcctccatcggtcatacgcatacctttcaaatgatcaacaagagccatctcctcacccgcactgcatttttaccccaaattcatttacatttttgctcatcattggtacctatcaatttgcataagagatgtctatatatatacctgccagcacggattttcccactctttctctggcgcctcaaatctcttgccctgctagtagcgttgcttgagctgactgaagcagcagaacctctccttgtcctggaataatagcatagaggaaacaagaacttgtaagttaaggtccaaactagttagtaactgtttccctatttaacccacaaaacaactacattatagagaaattgattcctgagaaaagtcttcattctctacccaatgccctacaacttttacgttacgacttgtcaacacgcttgtcccttcaaatgcttaatcaaaaccaaagaaaatgcagaacgtgcctaaatctccttttgaatcgtcagctctcaactagcaggctaaacaatcatgcactaaagtcccacccggaaacttatcactttaccaatacaaaattatatatgttggaatgttcatgcatataatcagatgctggttaatcgaggaggagacaatcagaaaacatgttgaagtcatgagacaaaaaaaacgaacatgagctcctgtttctaaaaacgatcaatacctaattcagctctgttttagattgaaatctgtaagatcagctgagaaaaattccacataaataaagactgcgagagtaagacaaatgcaaggatgtaccccaaagtataggcgctcattccactcaggttgctacttgcttctgaagctgtgtcatcgtcaagatcaacaacagatcgttcctcggatttgagctttgctgcaagcaataatcgtctctgccggacagctagatagcgagtcaaatattttcctaccttttctattgattctttgaattcacttactagaccactagcacactccaaagcagaacttttcaccactgagattctatcatctgctgtatgcaaaaatgcaacccttaaagcctcttcccattccctcgcattgataagcaaactaattccaccgcttatatcgctgcaatactcaagcgctatttttgctgcttccgctggtttcccaagagcattgacctcttcacagagttcatatgccaatttcaagatctcatctttacctaatttcattagcgcccccactcggagtaccccactccagtcaccacattcacgatatgcctttgaagccttttccagtttacagcaacataggtatgtagtagcagcatcctcaaaacgtttttcatcaatgaggtgatctgcccaagcctctagaacaactagtttcttctcaggatcagtaattagcaggaggcccagagggaaaagttgagggtttttctttattaagttcatgcaatcaggaaagtagccaacccctgctgatacaatgttcctaagagcactatcaaaacgctgcaatttaatgtcaatcttgaaatgcatcagggattcgggcattttttccagctcctggagataaggtaaaaattcttttggatcacgctgggaattgagtgccacaatagctgcaaggttcagatcataaagacctaaggcagcttcaaagacagcctcagaatccaataaccacagaagatgtttcaaggcttcttctgcagatggacaagactttttccttatatcatcagaagagtttagcaactccatttcacgaacagattttatcctcaaaagagattcttcgatagctggtggatcacttcgggcaagagtggtcaaaatacagagttcccttgatggactttctgggatatgttcttcaagggccttcctaattgcctgtagaactgatgatactttgttactgcaactatctttcacacgaaaaacctcgtctccctttttggaaaaggaaaactttttgtacagcgtttctgtaacatcttcattcttcatggcacaaacaaattctgtaacatggttcaaattgtttacttgctcaacaaatgctacggctgactgtagaaatgcctgccacccatatagatccacgataacattaaagtcgattctatgacgccttaccaagttaaatgcatctttgaaccgttgctgagctaacgcattcgtaatggaagagaggaccagctttctgggatatatgcattcgagattcccccgcatagtttgtaatatcacagcagcttcatctccattgaggactcctatcacttttgcacctctttcccaaatattaacatagctcatattttcctcgtctcgccttctaccatcaataacaaagaacacatttccaagtgccacatctccattcagtacatccttggtatcgacaataaagagaaaatcctgtttggtcaaaataatcagatgggtaactacttcattggccaactctgaataaaatgagaaactgctacagttattacataggttcttcccgttgatggacagtctacccatatcatcaagcccacatatcaagggtttatgcaccccactagcatcaacctgtgccaccctcacccaaggacaagtcgatggaaaacatacactatcatcactactacgagtttccataatttctgaccttgacgcatatccaagcactttcccaccctcaaactccacaaaggctgaatcacgcttactaggattccaggcaagagccaggaccggtgattcgagaagtgtctggaaagtaatgctagccttaaagccagagcaagtcacttgatcaggaacatgatcctcatgacagactacttcaacttcttgtaaataagaaccatgaagctctgtgtcataccctcccgaagagagacacttgttgtggctagaaccataagcggagacacacagaagtgagtggacatccaaccatagaagatgtacaaaagagcccagtgctgttttacagtctgaaatttccacactgaagtctttgccttcgagatcttcccaagtattaggtgcagggaactcaacaaaagacaggtttccatctgacaaaaacacagccagacaattcttagaattccttgagtaatatgctatatctctgacagcagaagaaaaactaaggctgaacaaatacataggaggtggcatcaaggacaaagatagtggtgtcacgagtatcttggagttatctatgacaaaggctgttgagtcctccatgaccgctgttacccacataaagtggcgaacagacacctgccctgacagagtccaacatattaactgcagtggctttgttggatcccacatgactgttaccccagcttcccttggatacctaatctcctgtttcaggtaccagtggttgttgctaaagaaccacaccctaatggcatcatatgttttacaactaacaacccctgcaagaagatctgatgcagaattccatttcagattttcacatgattccgtagcatcttctggttcaccaattctaaacgagcttctctcaagtccattcctctcaaagaaagcaatcgatggactgctatcatctgacttcctcttataaacagctgcgattttagcaccactcggcatccattcaagaatcccctgcgtaaattcttttgtttctgaagaagactgcaaagcaccggaatcactttcccatatcttaatcttcttagacatacaaccagactcataaacctcacccatagtcgcaaaatactttccatcacccctccaggaaatggaaatacccccacaatttacagacaaatcattcgtttcacctaaaacagtatttaattcagatggttagcaaataaacaaaagctgttcacgataagtttcaactcaaacccataaatttaacccttatgcagtcaatatgacaagaaggtaaggggtccttacgtacgtaaccaccttcaggaacctctccaagcgccttctcgtacatcaaagcccaatcataagtcattacaagcaactgcccaagaccagtaatcaatccaagtagatctccagtcggattaggcgagatacacttgacacctccttctatatttccaactagctcagtcacatcactctccacattatgcactagcaaaagcccatgagaagtcccaattaatagagactccttctccgcgagataatcgaaagccgtgatgaaatccccaggctcaatatcaatactgcagacctccacaggcatagcactctttgccccagcgctttcattctgccacaagaaatacataaacataaagagaaagactttcgatttaaacagaccctactcgctaagttcacttgcaagttcatccacaagaaacttgaatcaaaagcaaaataaaaagaaaaatccatctttagaccaaagtccccaacttttttctcactcgtttccttattaagcagaaacaggattaaccaaggaggaaacgaattctctcacagaaagcaattcacttacttggaaggaagagagctgaagggcgtaaacgaaattagcagaagatgcgaaaaataagcgactttggtcgatgtcataagctgcgaactgtacaacttcttcagtcgaatgcaattggatgttctgaggaacctccgagaaaagcttcaaatttttcattttcgaagaagtaagaatcagtacaacatcaacgaactttgcagctacagatccaggaagcagatttaaaccccagaaatcactgatataataatatttagggtttaacctaaaacacgccttcttctctgtttttcttttcttctctgtttcctctctttcgttttgctataaacttgaaaaactgacccggtttattttaccacaccggttatcttggtttataccggtttagtttgtaagaaatataatattattatccggccactttcttcagagatcagttttctatgcctttccttgctgattctctcactagtgaggaaaagcatcatcatgcattccatcaaattggttttgttggttttgttgataatttcttttcactctcaaactgtgtcaaaacatcatccaactattgatggtctgcttgaccgtttggattctttattaccaacttcttctgtacaagaatcagcagcaaagggtttattgcagagactgcttcccacccattctcagagctttgagctcagaattatctcaaaggttcttccttttatttccttaggccccactatgctaggtgattcttcagtactgattgttttttgttacaataggatgcttgtggtggtaccagctgctttgtaattgaaaactatgatggcccgggacgaattggacctgaaattctgtaagtatcttctgatttcctgatgagggatcgaattttacttaaaattcttctcttttagttttgccatcttgtgtctcaggattaaaggcacaactggagttgagattgcttctgggctccattggtatttgaagtataaatgtaatgctcatgtttcttgggacaaaactggtggaattcaggttgcctctgttccacaacctggacatctacctcgtatagattctaaacgcatctttatccggcgtcctgtcccttggaactattaccaaaatgttgttacatctagctgtaagatatatacacttcttggaatcaaaagtttcctcatgtcatgattcactagaatcacactcctgctactgcctgctttcttgttttttccagattcatatgtttggtggggatgggagagatgggagagagagattgactggatggcattgcaaggaattaacctgcctctagcattcactggacaagaagctatttggcaaaaggttttcaaggtaaaaagtcagattgcattagtaattgtttgctgtgacatgattagatattgcaacttttttatttaatataagttgatatataccgctaaccaagttctatatcaattttgtttagaggttcaatatcagcaaagaagatctggatgattattttggtggaccagcgtttcttgcttgggctcgcatgggaaatcttcacgcgtaaataacctgatctctgatattttcaggctcctatctccagtgctccttctgagcttgatttatctttcattcttgaagctcacataattcatatctctaactacatctacatcacagttggggtggtccattatcgaaaaactggttagatgaccagttgcttttgcagaaacagatactttctcggatgttgaagtttggcatgactccaggtccaagaacaatcactttcttctcttttcatatactcgattgattgttctcatagcatcttatattttcttttgtttcctcctttcctagtactcccatcattctcaggcaatgttccatcagctttgagaaagatatatcctgaggcaaatataactcgacttgataactggtatgtgttccttccgtaaatcatgtccggaaacttttttcaatccaatggatgaaactttttgagttgtgtgatgagaaaaaaatgctatttttttactgccttgtcttcacattgacaataaccttaccgttaccatttgtgtattctcaggaacacggtggatggtgattctcgctggtgctgcacttaccttctgaatccctctgaccctctcttcattgaaattggagaggcttttattaaacaacaaactgaaggtaccctgaagctatttctttttttttaatcttggcaaattgtgtgatccattgaaagcattttctcaaattagatacatactaacaaagctcccacctgatcacagtcttttcgatataattacacgtttatatgtctttgattttaccttgttactgtctcagaatatggagagattacaaacatatataactggtaattatcttcaatttgcacttaagaggtaaattatttcttacaagtttttccagtatcctggacgcaggtattggtgaaaacaaccttccgcaaaaatgcacgattcaagaaaaatcaactctctttgtttggaatgatgatacgaatcttacttgtgttaatgcagtgatacattcaatgagaatactcctcccacaagtgaacctgaatatatatcttcactaggagctgcagtgtacaaagctatgtcaaaaggaaacaagaatgctgtatggttaatgcaagtatgccttcttttccattttattctcagtggcgtatgtactttaggatgctttttagactttagaaaactgtaaacacacagacacagattttagtattgaagtaacaacaatctagaatgacggggcagagatttctctatttatgaatgttttcttacttgagactcacctttttgcagggttggctttttagttcagactccaaattctggaagccgcctcagttgaaagtaaacatccaatttagtgtatatgatgaatgctgattgattcaatatcacagcctcgcttgctttctgcaggcactcttacattcagttccctttggcaaaatgatagttcttgacctatatgctgaagtcaaaccgatatggaacaagtccgcccaattttatggaactccttatatctggtatattgttgtctcagtttccttcttatgcctgagtcagttgtatttttacgtgtttttattataatcggatgaattccaggtgcatgcttcacaattttggaggcaacattgaaatgtatggtgctcttgattcaatttcttcaggaccagttgatgctcgtgttagcaaaaattcaaccatggtaactcataactacgacattcacaatatgtttcacattttttatcttatgtctataggtgagactattttctccgcttagaaatggaatcttgttatttatgttgcacataggtcggtgtaggaatgtgcatggaaggaatagagcagaacccggtggtttacgaactaacttctgaaatggcatttcgagatgagaaagttgatgtacaggtaatgcatatatagtatgcacccttgctgtgacacttgaaagtgtttgcacaatcagtttcatacatttttaatattcgtgtacatagaaatggttgaagagctatgcacgcagaagatacatgaaagaaaatcatcaaatcgaggccgcttgggagattctgtatcacactgtctacaattgcactgatggaatcgcagtacgtttttttgttttggttactaccgcagcatctctccttagatctgctctataattcattagaaacttgcttttaaaattctctgttttaggaccataacacagatttcatagtcaagcttccggactgggatccatctagttctgtacaagacgacttgaaacaaaaagattcatatatgatctccactggcccatatgaaacaaaaagaagagtcttgtttcaagataagaccgctgatttgcctaaggcccatttatggtattctacaaaggaggtgatccaagctctcaaacttttcctggaagctggggatgatctgtcaaggagcttaacatataggtagatgcaagtagagatagattatctaccattttagtggttacagattcctttgggttttgcttgcaggtatgacatggttgatttgacgcgtcaagttttatcgaagctagcaaaccaggtgtacaccgaagcagtgacagcttttgtaaagaaagatatcggaagcttaggacaattgagtgagaagtttctggagcttataaaggacatggacgttctacttgcttcggatgataattgccttctggggacatggctggagagtgcaaagaagttggccaaaaacggtgatgaaaggaaacaggtgtaacatcattcttgttcttggaacgtgcgggtagaagaagtagattacttgctcactttgtttctctgtgtacagtacgagtggaacgcgagaacgcaagtgacaatgtggtatgactcgaacgatgtgaaccaaagcaagcttcatgattacggtaagatataaacttaaaaaaaaagattctcgagtggatagagctttttaaaaaactgttatgttttatgatcatcatcatcagcaaacaagttctggagtgggttacttgaagactactacttaccccgagcgaggttgtattttaatgaaatgctgaaaagtttaagagataagaagatattcaaggtagagaaatggcgaagagaatggataatgatgtcacacaaatggcaacaaagttcatcagaggtctatccagttaaggcaaaaggagacgcgttagctatttcaaggcatctgttgagtaaatacttcccatgagtttactcaagagtagctcaaacgaataaataaaataaacaaaagggttgggtttctactttctagcttgtgcctgagataaatttaacatttgtgtaaatttgagagttattaggcttctgatgtgttagtgtaagagactcggtgaaggccaataaaggttgtaacaacaaactctgcttcatctcttccaacaaagatttacttgtgtcaatacctgcaaggtatcctccatgtacatacccactgaacttttcacttgtgtgttctcctgtaaagaatatccgtccaactggggcctgaataaacataaacctcttaaatttctgacagacatgtgtatgtgtgtgcgtcttaataacaacaacaaaatgtgtttaccttgatattttgcagaagctgattatcagatatcatagggtaattactgtagctaccgcgttgaaaccggttgttccaccacctggggacaagaatatcggttgcgtaaggaatggtggccccaaacatgtccctgagaacactcattgcctctttcatcgtctcctggtctgattgagcttcaacgcgctttgattgttcgttggtcaacgtcaccaccagaatgttagagcccgggtacgcattttccatgtgctgttaccaaaagcacacatataagcttgagaggagagcaagcaagttgtagtatgcatacacattattatattattgtgtgaattctatactcttacccacatggatcatgccgctagttagagacactcaagataatataaaagcaatgatagtgttaaatcaaagggacccccaggtgtttaattttaagattagagagtcaatatgtgccacgtttcgaccttaagtggaacgaccaaaaagatgcatcgacattaacaaacaattacaatctcattattaagggaaatttaacctgccaaaaggtgaaatagccgcgttgttcgtgtgcataaatgaaaaactcttgaccaggaccacatggccagaaacattgagggaatttcaggaagatcttggtgtacaccatcacatcacatttttgtatagcttctgttttccatctctgtcaccaaatataaattttggatagtaagcataataatgcatatagacaccaaaatatttgacttgctatcctaatggctgatacaatttaatatttccctagattcatgcacattgattgattaaacatctacaccttgtatcttttaaaatgttaaataagcataaaaggtaagaccaatgagtagttgatcataaattatgattatatgagaagaagaagagaaagtaaactaacgggtaaaaggggttggaaggagagaagatcagattggagaacaccgatactcgcagacacgatcacataattagcttcgtatacggaaccatcctctgtcttcaccactaccccattcctagactgttgcacctccctaactacctgccattaattcccacaacttcatcacactattgctcctccaatatagattactaatataacacacagctttcaaagttaagccagctggtttatgagagaggcaataaatacaacacgctcattcatgcataccccacaataatgcttcccaagaaactatcaactttcaatagaaaactgttactatactaaacaaaaatatagctacaaggacccggaatgtaatcaattccactatacaccaaaggctgagagaaccttagcagaaaaaaagataatgcaaatcaatcaacctaatagagagtgacaacagctaaaaagcaaaagtagctttccaaataacgtcaatatatactcttttaactcaaaacctaatcaatatcagagatcttactatacctggtttagtttgaggcggtagtccaagatatttccatgtgaggtaacgagaaattcctcagccattttataaagtaaacattcgtaacctctttcatcagcaaccaagaactctctttcaccaaagtctacataagtggatattggctctacctctgaaattagtagtataaagaatcaatcaaccaatcaatctgcgacattattatcatgtgtgtttctcaagaactcaccagccatctcaaaatcatgcaagataaagtcaatggctagttctattggcgtcttcggtgacctaaacaccaaaccaaaacacattagaatcgaagcaaaataaaaaaaccagtaagcaaaacagagaggatcaaaacgcacgaaggagcttcttcagctacttgaccagaacattgagcttcaaggctctttaacttgagaatcgccgagtcaaccgcctttttatacgagtcagaagcgattcccgtcgggaagattttaccactgcaaaattcaatcaacggaaaataaatctttgattcttgaggattgagttacattaataatcaggggatcagttttaaccttcgatcgtagatattgaaacgagcattggtgtaatcggaaaagcaagtacggaggttaaaacgcgaggcaagttcccaaacgggattagactctttaccaccgacaccggcaatccaaccggcgccaagctccaccggcacgtcaccgaaattctgtttatgtattcttcctccgatccgatccgtcgcttccagtatcaatacatcttctactccgttctcgacgagaaccttcgccgccgatattcctgaatttcaaaacaaaattccgttagttattttataaagagcacgagtgttaatggatgttttgatccgaaccggagattccagcgccaatgatgatgacggaggcggtagacattagagagagagcgaaaggtgtttgttagtttgttggttggggcgagaggagaaggagttggttcgttttcgtttcgtttggggtttatatatatagagagagagagaggaaggaggaggaattctacttctactcgaacttaaacacctgagaacgcgtgtatgtgacgcgctttgcgtacacggtacctgtgtcagggtttttggcatcaaacaaggctagtgacgataattgtttttctcaggtgtatatcttatcaggacgggcctgaatattctaaagcccaataaaagttatggcccactaaatgaaattattttaaagaaaatatttcaaacaagagatttggttgagaggttttttttttttttttatcgactggttgagaggtttttgtaccctctaatacgttttgagaaaactattgtcatttatgcactttctcattaggatgagctgcgaagatgtttttttactcttgttctgaattatatggagcgactaagaaaatgcaaaagagatagcaagaaaaaacatttcttctaagttgtttttattctgtttacttttgacattttttcctctgacttgtcataattcaatccacgatcaacaaattagtttctcctttatcaaagacagagaattgaattcaagagaattttataatcagatctatggagaggtagtgttaaaaaacaaaacaaaaaaccatggaggaaaaacaaagattctcccttatcattaaaggagcggacaaaggaggtggtgtcagcaaaatatcaggaatcaggaggccccacttttgaatcttggcataaaacgacaaaagaaaaaggtttttgagatctaaagagaaagaaagattccaagatattttgggcatgtgcacatgattcagatttcaggcagagtgcacatgaacaacacgtgacatgttacgaacatccaaaatatagttggtgaataagaaactctgcaacaaatccgataaacatagaaaataagactgcaaattgagaaattttgtcacttcattcgacctacgatgaccatcgccatctctcatccgcttactctggcttccgggccaagaagaaatacattggcgtgaaaatctctctcctgagaaacatttatccaagaagagatttagaattctaccccaaaaaagataaatctaaagtgaatcttgatggtctgaataaataaaagttgggatcctctcaccttccaccgtcgactaatccttccgcagcctgctccaggaaatttgagaccctttggcttccttgaggtgcaagtcttatgtattcaaggatcttgacctaccacataaataacaatgacaagttcggataaatgaactactaatagtttatgggatttggcagattagttagagcaagttttttaccatgtttttggttatgaatcgtccaacagctgtaaggcggaagctactgagtgagaaatgatttttgtcaagaggtaagtaccatgggaccggcgagtccttggccagatccttttcccatatcaccttcatccaacgcagaggataatagtatttagatgttgaaatgttgatgtgtttggaaatacagaggatccataaaatcagatacttacttcaaaaccggcctgcttcagagcttcgaggcattttgtagtcagcctaatgtcaggaagaccatctccaatctctatctctccctgaaaaatggagtctttgtttgtattcatgttgataataaaagcacaaataaataatatggatagatgcaagggacacactaacctttattttctgatgttcggcgttatcagggtcaaatgcatcagtcatacaccactcataggcagcaaaacattgcccaggctttagcactctgtagatctctttgtagcatccatactgttgttgagatcataatgatgaatcatataatagaaggaagaaaacaacacaactagctgtttataattttacgtaccgcatcaggtgcatggcaagttgcttctattgcataaactgcatcgaaactgttttccgggaatggcatcttcatgaagtcagcctgcaagattaacaagtgacagcaaccttcatcatgttgtcctttgcaaggtgttttcttattcaaaacatgatttatagcttatgcaataattacaagaactatgtactcaactgaccttgacaaagttacatgtcttgtcgacacctgcaagtcggtttagttcctgcaaagagaaagatgccaatatgaattataatggacatagcaggaatgcatcatctttcacaaatgtagatacgttaccttgcctctggtgatctggtattcgttattgttgagcccggtaacaactgaattgctgcaacagagcaaacacaaacacacttcataattgaacaactatgttcctaaccataaaatctatttcaaaactcatgtatagtagaagcacatgatgaaaagagtgtgtgtgcgcttttggtatgtgtagtcattttacctgaatcttgcaatttccctcaacggtccaccaattccacatcctacatccagtacctactcagaaacataatggcaatgagcatctgatggcgatggcgaagggtccattttcaagtgttcggttaaggtttaacaaaccttttgtcctggttggatgccaagctgaagagcaagaaagtgctcgtgtcgcttaatactctctcgaagcgattctcctttccatctacaaacccaaaattcatgtcaatcaatacatatataactatagtatcagtagcatctatggctgtaagaaagaaagtatattgaaagtcaagaattacctttgtgcaaaatggaaggattctccccatccgtactcataaaagctagtagcaaggtcatagtacttattaacctgaaaatttaatcaggaaatactcattccaacaggcaatgatttgttaaagaaattcaatacctagcctagtgaagtagtactttaactattttaaatatgatctcctggaacaatataggcttttttagttgtcgcatattctcaaagtcaggagacacaactacaaggaacaggcgtgtctcaaggtggtgaaaattttataaaatgtaaaaaaaaaaaaaaaaaaaacatttttgaatttaccatgtcagtataattggcttttctctcttcctcgtttcctccatggaagacatgatattgctcatacctgaatcaccaaatcactaaaaattaataatgtccaggacaaaaaaaaaagtccaccaaataacattttttttttttttttaattcatagaactctgaaaaactttggccaaaaaaaacaaaccaattgttctatatagatagatagatgaagtcaatgacaataagattggtggtcgggccctcaagaacgtgacagtagtgaaatacacgtcaaatggatcttttatagagccaaaaacgaaactagggaccatctctcactcatcatttttcttttttctgctgtattgaaagctcagttccatgaagcattaaaaaccaaaacaaacataaaaacagaggcgaaatccaatgccatcatggtattcgtggaattggtaaaaagcgtaaacgtatggaaatagtaggctcaaaatatacgttgattccaaaaatatggagatgctacacaaaacaacaatcaaatcttaatcttaggagttgattatagataaaaaccaacgagatcaatatgcatgagacgaaaaaagcgaattgtaagtgaatcggagatggaaactacgatcaaagaagaagggagaagaaattacttttcgacggcggtgagaacatcggatttatcgatcttcccaccaagattcgacgcgagatccatagcacttatgcaacaacggacgagatctgcaaaaagtgagactgaatcagaataaggatcaaggagaaaagagaaatcggaatcggaacacacattggaggagacttacgagagagaggataaagatgaatcggagtggtggggaagagctaaagaggcacctgactggctttagtttataactagtaagatagagaggtcacaagccgtcaatcccagcttggcaatgagagtgtattaccattatatcctctctacttgtccaaattaattatgaaataattagagcctatataactctactctctagtgttaagcatattctccactatctcgtaatttattctagtataaaataaaacctttactatagaatctcaccacctaccaagaacaggcgcgacattcgagtggttaattggttttaaatctagatcaaagattgaatctacctactacttccttgatcttctgtttttgccatcctgattcctgaatgtttttaagtgtttgtagcaagaatatttgactttctactaactccaaacctggtttaaaattttgtgaaatattcaatggtttcaagagaaaaaaaaacttagaatttttttactagtccactacttcactcctactttaatctctaaactccaaattctgattcttaactcatactgtatggtctgtatatgtttatagtttatacacatgggtatctcaggaacaattgctatttttatttttatcaatattatcggatttgattacatgtaaaacacaacaacaatagttagtctatgtcaacaatagttaattagaaaatgactaatctacctatcatttaattaaaaagttatagattacgttgtgattaactagagtagtactaatagttagtctatgtcatgattaacgtaggaaactaggaattgaccgtttgggttaaaattccaaaggaaaaaccaacttcaaccacacaccacatatttctctcccgcctaatcctccgcgttcccaagccgacgcgccgatctttcttctactacttgtcctccggcaataacaaactaaccatttcgaaaagtaattatctatggctctctcctcgttgatctcagccactccgctctccctttcggtgccgagatatctcgtgttacccacgcgccgccgtttccacttgccgttagcaactcttgactcatcgcctccagagtcatccgcatcatcatcgattcctacctcgattcccgtcaacggaaacacgttacctagttcttacggaactcgcaaagacgacagcccgtttgctcagttctttcgctccaccgaatccaacgttgagagggtaatatcaatcaagcctgtttgtctctttcttcttctatatattgattttgagactttagaatatttgttctgatatctggtttcttggtggatggagcagataatatttgatttccggttcctagcgcttttggcagtaggaggttcgctggctggttcgctactctgctttctcaatgtaactaacttgtggtctagttttagtctgaaatgttttgccacgcatacaccattttagtactaatctcatggctcattgtgtaggggtgtgtctacatagtggaggcatataaagtctactggactaactgttcaaaaggcatccataccggccaaatggttttacgcctagtcgaagctatcggtaaaactaatttgctatatatatgattatgatataagcctgtttgtttagttataatactcatatatacttgtgtgtgaaatttgattgcagatgtttatctagctgggactgtgatgttaatatttagtatgggtttgtatggactcttcatcagtcactcgcctcatgatgttccaccggaatccgatcgtgcccttagatcctcttccctctttggtatgtttgcaatgaaggagagaccaaaatggatgaagatcagctcacttgatgagcttaaaaccaaagtgggacatgtcattgttatgattctgctagtgaagatgttcgagagaagcaagatggttactatcgccaccggtctagatttgcttagttattccgtttgcatcttcttgtcctctgcttctctgtatatcctccataatctccacaaaggagagacatgaacccatattatgtacagacccaatatatccaatatatgtgtttactctgtttttttgtttaatttgctattaatgattatgaagaaccaatttatttgctttttattcactagaggaatagtatattttcaaatcattcacattatgtacattccgtagcttcttcaaagcaatgccattgatttgtctcaccctctctctcgaaagcttcagcgacttacctatctcttcaaacgacataggagtctctccgttgagcccaaagtaaagtcccaatacacgagattctctagcggtaagacttcctaagagttgctcaatctcatgcttcatgtgttcccttttcaccatctcctctggccttgtttcatctggtccccgtacaatttcctgaacatgataaatcagtccaaagtctctcttagctttctattttcatggaaaactcaagtacctgcaatgtcatgcggccattttgagacgcgactcggtccaacgaaacaggggatctgctacgctccacagctagtctaaccgcggatacattgaggtttaggtgctctgcaatctcttcacagcttggttgccttcttagttttctggtcaacacattactagcttctgcaacttttgccgttaactcccacatgcttccctacacacaacaagctaaaacgatgtattcactaattacttcacttcccagaacaacattgcattttatttttctatgtaacaatagaagatgacttggttcacatatagttaacatctatatatggtagcaactatacaatgtaacacatattcatctcaaactgtaagaattggaggctcaccggcaatttgacaagtctagatttatgcgctatagcccttaagatggcctgtttgatccaccagtagacataagttgatagtttgtatcctcggtcgggatcaaatctctcagctccacgaagcagccctatgcttccttcctgaataaggtcttgcaaattcaaacctttgccttggtaccctgttgcaatagaaacaaccaacctacggtaacaacgagtaatcttttctctcgcttcttttctacggcatagtatttcatttgcactacgcttcttcttccctctgccactggctaacaaaactgataccatttcattctcttcaacacttgttcccaaattttcaagttttgctccttcctattaattaccagcaaaggtattattaccaacaaggatacacaatgtttgaatctttccattaatgggccatgagagatattggataagaaagaaatgatataccttgaggtacaagcaaagctgaacctcctctaaacgactcaaaaacccagatcgtgaagctccaacaacaggaacactaattgtctctgcttctgcttctacgccagcattttcctcttcttcaggctccaaacgttcgtaacctactcttcttcttcttctcctcttccttctcttttctgactgaattccccatttctcaggtttgatcatcacggagctatcaaccactctatccactgtagtgtcaccgcaaaccagagccgtactaagctttatagaaaatggggatgataaagaaggagatggttgacattggtgagtcgttctgagtaagggagagattgtagggacaggaggagacggacacatagttgcggtagctgtagtgggaatcgtcgtcgccatggatggatgagctgcagagcttcccacaccttagatttttctatttttgttatctatcttctttttggtccaataaaaatggaagaagaagataattctctcttgtgttacttacttatatcatagagcctctctctgtgtcatatcagttatccgcaattaaatttgggtggagttgctttctttttttgtaattaaaaaaaaaaaaaaatcttttcgatatgcaacaattttggaaaaggaaaccaaaaatgagaaattacagcttataaatgttttcggattgcagtatatacaaacccaaagctccatagttttcggacccttaattattaatgcaaacccaaaattcgagtggtttcggacccataaaaaggcccaataaaattggattcctagtaaattgacgcatatgatgtcacatgtacagtgatggctgaacgagagataatggaccaagtgtcacggtctagaccccacgtgcttgagggtgggagcaacgcgctgttccaaagcttgtctgtggtgaacacgcgtacctctctgaatcctcgtgatcttacggtgggctccactaatttcgctgacgtggaattgtccacacacagtactcttcttggcactgtacgctcaacacaagaggagtcaattatgccaccactaactatatattaagattagactttaacaacaaaaaacctatttaaaattagatttttatatggaattagtaaaagcagtatattcgtacgagttccaaagcactcagagcctcaaccattggacgtcattcatagatgtacgaattaataatcattgtctttagaaatagtctgtaaagccgtctagatggtaagtgtttgagtcaatcgtttttgtagacggtttcatacgaaaatgtaattcaaaaagctgttttgtaaaaagattatggattaagtttggacgtagtttaattagacgtgtaaagtatacgaatacgcaaaactaatgatagagaatcaaaggtaaaacacattttgattccgaagcgggaatcaatccacctttatccatacgcatatgaataacaaagtctatcttcttttttgttctgatgatttaaagtttcaatactattttgttttttggatcaaaatattttttaattcactttttaaacaataaagtcttttttgggtatatagtattcttaaagtatctgctgctttaattttggtgatgcatctgtacctaacaagacaaatgaataattgttgatataatttcattaaaatagacacacgtgaagcaattggatttgctaaatgagataaccattccaagtcttaaaagatagatcactagacaacattgtttagtccttattctattctctccccactttcaaatcaattgtctctttcttcctgtatgcattatcccatgtgccctcaaaaaacattcctcctaagattgattagtctctcggactatacaattaatatcttaaataccagtttttaattacaaattactttctcactaactaaactttgaatcttttttaaaaaaaatatgtaaccacatttggatggattggtgaaaaacaaaattgcgggtggaggaggtccgtgaacatgtgacgagattaaaatgacacttgggtgaccacctttttggccctctttagctccaaggctatatatatatatatgcatacatccatccatttgtacatatatacgtgactcatcgtctttttcactcccacacgttctgctccagcgatactgtgagagaatctctgtgtggtactctttcatttttcctttcccattttcaaatattccgttacgatttcgaatatttcccccattgattatttcctttaattctcacgcttattagcttaatattggaatttttaggttctgaattcttaggctggaattgaattctgaaatggcggaggagtacaaggaagcgttgttggagaagcagaactatcacgacggatgtcccggctgtaaggtggagcagatgaagcagctccggcgaggatatccttacctcgagctttccttcgtttggattatcgtcctctccacttgtaacaccttcttcgccttctcataacagttactattgtgtcaattttccttgagatttttggtgtcaatcggattcggctatagtgttgtttttgactattcgtcattgtcaactactttgacgagattccggaaattgatttgcttaatggttttactgctaaatgttttgaaattggcttcttgtgttgaaagtaatgattcgttatgcgattcctcatacgttcttatttgatatcatgtgtttgcagctctaccaatttcctcactctatcccttcctctactatatggtgagtttttgatcgagtactgtactgttcttttgtcacaggctcttaatagtaagtctgacatgtcttctttgttttcatagattgaggattttggtgtcgcaaagacggagaaagatattgggttttatgctggttttgttggtgagaactgataagacatttgcctctgtcacttgttattctgtagtgaatctccatatctataccgtttgttctaatgatatctcttattacttggaaggttgctcttttatgcttggaagagcactgacttctgtgttctggggaattgtggctgatcgttatggaagaaaacccattatactcttgggaactatctcaatgttagtatcattaaacatgattttgatttgtatccatcttcgtctctagatgctgattaggtagtttactgcagtgcaattttcaacgctctttttggcttgagctcaaatttttggatggcaattggcacaaggtttcttcttgggagtttcaactgtttgcttggaacaatgaaggtggcttctttgttaccgctattactcttggtttatgtttttgttctgcacaccagattgtcagttgcatcttctcctatcttattatcaatgtgtaaattttcaggcctatgcatcagaaatatttcgtgatgaatatcaagctaccgcaatgtcagctgtaagtttctccatctcatacattttatatgttttgactgactactggtgtcatgaaatttgtaactttacgtatttcaggttagtactgcttggggcattggactgatcattggccctgctcttggtggttttttagctcaggtaagtcgatcgtatctaagtttttatattttcttagctttccaaaccttgccatacgttatgatataaatgtgaagcttatcatgtgtccatctctcttcctttgctacaacttgtttgcgtattcattgattcatatttagctttctagtgttctaattaatgcttttcgatgttctctaacttcagccggcagacaaatatccaaatgtgttctcccaagaatctctttttggcaggtgtccattcatactcctctctttaaaagttgtgtagaagggatctaatatggaatctcatgaaataatatgcgaattctgatgcagattccggtatgcattgccttgctttacgatttcagcttttgccttgcttgtgacagtactatgctgcttcatcccggtactctattttctttgagagcgttctgagaaccttgattcattgatgactcttctttattaatatatttcgtacagagttcactcactagtctcctttttttctctgagtaggagacactgcacaatcataagctggacagcttatcacatgatgattcatacgatatacttgaagctgcatctcatgaatcatctccttctaccgggaaggcaggaaaaaacgaaagaaaggcttctcagtctctcttgaagaattggccgctgatgtcatctatcattgtgtattgtgttctgtgtcttcatgatactgcatactcggaggtaagtagttgagctagaattttctgcgtactctcatctggtctgcctcattaagtggattactcaagaattagttttctactgctgaatttttatatttcagtcgtttattttcttgatgttattgaagatcttgaatttggtgtcaagattagaggctttacatgtgtttatctcgaggaacaaaaatagtgtctttttttggttcttctctagtgtggtctgttgtatatagcctagtctttgcgcaccaaattgtagtgtttgactgttatggtccctgccgagagcagtggattgtataggtactgaccagaatgtggagtgtgttttggaatcctgtggggtttatctgggtcgtaatttcttggttctagattttgtatgttgattctagtgaagaaatagacaagtatattaccaaaataaaattgatggagcagcattaagactccatgtttgtgaaattagagtctttgccacttgataggcttgtgctctttgtctgaacaaaaagattcatcacttggaatctactatgtagatatttgcactatgggctaacagtccaaggaagtatggaggtctgagctactcaacgaatgaagtcggtacagttcttgctatctcaggtatacgaaacatccctgctcttgatgtcttgtgtttttagtgatacagaacatcgtcgatcttgatgtctagtgttttagtgataagaacttgtgaaaatgatgattagagtctgctttgatttgaatcagcatgagagttaaccaatcataaataagcaaaaattttactaatgaaattgaaactgttattagttattactcatcaacaattctgctttaggtctcggcctattctcttttcaggtatttgtttatcctttggctgagaaactgctaggacctgttctggtcacccgatatgctggggtcagttgatttctctttattgcttctctgcagattatagtgcacttgattgcaacaagatagagatcattcttctgacaagttctttcgtttcaggcactgatgatacctatacaaatgagttatccatttatagcaggcttgtcaggtctcagtctaagcttgatgttaaattgtgcatcaatcctcataaatgtcttaagtgtaagttcaaaagcaaaaagtcactcttttctttctcttcctttgtgtgtatttagttgatatctactgaaaatgaggtcatgctactatatttctcttaaatatatatattccggctgacaaatatagtctttgtgaatataggtgtctgccataaccggcctgttgatccttcaaaatagagcagtggtaagcatacattcttttatctttggtaaactgtgatc

SEQ ID NO: 709 - DNA, 13474 bp, Arabidopsis thaliana
caattttctcttctttaagaactgtaatttgtatgaaacaacaggatcagagccaaagaggggcggctaatggaatagctatgactgcgatgtctctatttaagacagttggaccagctggtgctggcatcttgtaagtggtcacgtttcgaattaacgcataagtaaattcaaagacgcagtaatgttataaacaaaaatctcttttgctggcagattttcttggagtgagaggcgactaaacgctgcatttctaccaggtatctcattacttcttcccatttggtcattatcttatgatgttctgcttaacacaagtaaattgaaaacgtatgcaggatcgcatatggtattcttcgtcttgaatgtgatagtagtggtcggagtagctctgacattcaagccatttctaacgacgagtcgaagatgaaattcatttgaattggtaagatagggaatgtatggacaagttgattcttttcatttcagatacgaaagaaaccggtaataaaatttcactaaccttaggatttcagctccttctattacttgtccttttgttttgctttgtctgattattatacaccaaaaccgctttcataatcgtggatcccatccaaaagtgatgtattaatcggttaacaaatcgtatggtcagtcaatacggcagtaaggaaattagaagatgagactgagaggaacttacttgaaccgttaatttattatttaatacaaaccgtggcctatttttcaagctcttcaaaaggcattactcaacctttacttgatgaataacatttactcaaataaataattttacaaattttctgccgacctctccttggccttattcacagcaagcggagccttatgtccaaacaatttagtacgatttgactgatttaaaataaccttctctattcagctttggctatgattgtatattgttagcagccatgaaacctagtcaaactaactggtttgggataggcagatagtcaaaatggttaaagccggcatgattggcttccatttttcctaaactgaaattgttttaattaaaatttgaaaaataataggtagattttgaagatgttgttaatgaatttgacaatagatttgcttgatggttttaaactcttaattatattatttctaaataactaaatacctcattaattagtagtattggattgagatgctttaacatcaaaattatcagaggaattcaaattgtatactttttactagtgaaaaccaatagaatattaaaagctaacaaccggaaaaacgtggcttagagataataaagaaacttttactcaaaaaatggaactttgacaaaagttgacaagttaaaatgattgaatttctctggtccaccatgaactaccaccgaaaaagtaaaaaaaatcttttggtacaatcaatttctaaacatgggcgtccaacactcgatgaaaaactcttcaaaaggcattttactcaaaccatgtcaactaatttctataacatttgaaagagatagattacattaacaccatgaacgtggtgttatgtttttgtggaaaccacagtacacatccctaatatctgtgcatgagactttactaaaacctaccaagaaacttgaaaccaaaatggacctcttgtcgtattaggtcatccattacatcatattattattggacatattcaaaatttacaataataatcttatcatcatcatattataaaaatggtggtctacaattaatcaaatcaaatttgaacagccacaacaaacgattacagagaataaccctacgaaagacaagttttcacgtaacgaaaagatttacgacagacaagtttataataaacaataatctcggtaacatgactagcagcaaccaagagagaaactataattttcaagttgcatctcaaaaactctgcaagaaaacaacatttttataacataagttattacaatacggttgaaatgtgatgactgacgactgaatagaaaaacaataaatgcaaatgtgattagtaagaggtgacatgtcataagcgacttgtgagggcaaaagacaaagttgtttttttccttcttctctgtctcgcagcagttaaataattcaattgttttcccgtcttttttggaagagagtacgtgaaaaccatatatcgcatcttctcattcttctttcattgccctcattaaaacacacatcatatcgcccccaaaattttgatttgattagagaggtgtgtggaaaatggcggaagagtatgccgagtgtttgctagagaagaacttccatgaggattgttctggctgcaaggttgatcagatgaagaggcttcgccgtggatttcccttctgggagctttttaccgtttggatcatcgttctttgcaccggtaaaattaaatttacttaactgataaatttccatggagaagattacaagatgttttcttccttctcttaataatgatttgcttcttcttttgtatcgtgtcagctttgcccatttcttctctattcccctttctctactttatggtgagtacccacataattaaatgcttaaagtagtttacttcactcgccgacatatagattagttttgtacttctgttacgtggtgattattaaaacttgtaataacagtataatctggttttgttggtgtagattgatgatttcaacattgcaaagaaggaagaggacattgggttctacgctggatttgttggtgagtttgtctcttcttttggatcattacaccagataatagtgtttcaaactcacattgtgtgggtgtgtgtaccttttggaggttgctctttcatgctcggacgagcttttacatctgtggcatggggacttgttgctgatcgttatggtagaaaacctgtaatcctcataggaaccgcttcagtgttagtcactcttgtatttatttcttcagtctctcattgccttttgttttatttcttataccccaatgctttaaaaattctctgttacagggtcgtttttaatactctgtttggcctaagtttaaatttctggatggctattatcacaagattttgcctcggtagtttcaacggtttacttggtcctatcaaggtgatcttctcctttttagcattttacattcttattctatcaatttcttgaagcctcattaacccgaaaaatcgatgaattctcaggcttacgcaatggaaatattccgtgatgagtatcaaggtttagcactctcagcagtaagctccttgatccaaagtctactacctctttgtctgaataaagcaatttagaatcttgaaatatccctgtaggttagtacagcttggggaattggactcatcattggccctgctataggaggttttcttgctcaggtcttcttcattaacaactgcatttccatatatctttgttcttcactctacctcccttgcccttgttgattcttgtttaatctctgcaccttgtagcctgcaaagcaatatccaagtttattctcacaggactccatttttggcaagtaagtgtgttattttcttatctcctcttcagtttcattcaactaatgtatatatatagtctcattgatctataaatcataatgcagatttcccttctttttgccatgcttagcaatatccgtttttgcattcttggtgaccatagtttcatcaaggattccggtacgctcttcactcttcctgctccatgaattccctagttactgtgtttaattagcttaagcctagagatggttgtttctcctctccaggaaacattgcacaatcacaagtttaatgatgatgagtcttatgatgctctcaaagatttgtctgatgaccctgaatctaataaagtggcagagagaaatggaaaaagttctctcttgaacaactggccattaatttcatctatcatcgtatactgcgtcttttcactacatgatatggcttacacagaggtgagtagactcttcttcttccacattcttcctttgtctctattttggcctatgtttaaaattttcagctttatttcttggatagatcttttcattgtgggcaaacagtccgaggaaatatggaggtttgggatactccactgcagatgttggttctgttcttgccttttcaggtgtgtttctacttcttaattctaacatattcaatagaaatggattgttctaacctaaaaaccactgctttctaggctttggtctccttatctttcagctttcgctctactcttacgcagagaggcttttaggacctatcatagttacacgtatatctggggtaagcactatatactctgttgttcttactgcaaaaccttgtgttttctttagtaggacagttctaatcttgtgattgtttttgatactcacagagcctagcaatggtcgtcttatcatgttacccactaatagcaaagttatctggtttagcccttaccgtgactgtaacttctgcatccgtagcaaagagtgttttaggtgtaagtttctgataaccttaataagaagaatgtgtaagtaagactttagtttatattctcaacattgtgtatgtgtgtgtgtgtagacttctgctataactggattattcatccttcaaaacaaggctgtggtaagtatttttacaaaacattgattcgttttagtatttagttaggtgaagaaaccggcaataattagaacctctttaacaataataatagagacaagaccaaagaggagcagctaatggaattgccatgacagcgatgtctcttttcaaagccataggtccagcagcagcaggaatcatgtatgcaacttcttctacctccttctttacattaaatatgcttcaacattttgttataaaacaaacaacaagaacaacatgaacttgttggtttatcgaattctcagttttgttttgcgcttaacaacggtttgttgacagtttttcgtggagcgagaaacgtcagggtgctgcttttctccctggtaatgttaatcctaattcatgttcatgtccatgtccatgtccatctcttaactagctatatataagttgagaattcaaacttgagcaagtgagactaaaagatggtgatcaatgtgcaggcacccaaatggtattctttatactgaatgtggttttggcacttggagttgtattgacattcaaaccatttctagctgaaacacaacagtagaaaatgatgaagattttgatggtattcaaattacataatcagaatgtattgtataatatatagatttgtatgtctgatccaaagttagattagaaaaatggcaagagaaaaagaaaaaaaacttgttagaattgttgtcatcatcctttgtatgttataggacaagttgttcacaaaattttgtctaatgtgtcagaaccattgtaagaaggattcaataatgttttttgtacatgatgtttcgcgaataatattgacaagtcgtcaaatcctatcctgagattcctgaatcttcttcttatacggaactcaatcaccatgaaacaacaaatcgcaaccgtccatctctggagacgtgtcgcttcttgacgttgttgtagcttacacgtcaatacagaagataacgatctcctcctccttctcaacaacaacaatcttcacgtgtgttttttccaacaatacatgcagatgaaagtggaacaaaaacgcagactttatggaagagactggagagtgtggctacacgcgctgagagatctgcacatgtcatatcttttggtggagtctacttttgtactactacccattgaaacgttactgacttcgttgctacgaccaaaattaaaaagtaaatcaaaaggttaaacaaaagaaaagaaacagtaacatcctctctcacacaccaatcacacaaataacgtaatcaaaaattattacgacttttaaaagaagaaactttattttgccaaacattctaaagacgacagatagacgaccgccgtcgccggaaagtgacgtcaccaaacctgtcaatgggtgcaacagagcccgtatgttatctctgtccgaatctgctgcatttctctttctgttgttgctgaataaacttattaacgatcagtttcgttttgttgttgcgtaaaggcggtggtggagagagagaggaaagaaaaatcagagaagcaaagagaagtcaaggcagtggaagagggaggaggagaagaagaatcaaaggataaagatgaaataagtcatcatagatttttggcgagcttgaacagattaaacccaactaaccctcttaggatcattgttaatggcggctctagattcactactcctccgcctcctaatctcgcccaaccactccgatcttcctctagacagcctcctccgccgccaccacggccgcagacgcctcctactttcgtgccagaagaaactcagccacagactcctccgccgccaaatcaacatcaaactcgttccatcttcacacctacccctcaagtaatttcctttctactttgcatttctgtcgaaaagttttcatttttaccaaggaaattgatagacttttaggcctaaaatttgtactctttattgaaattttttggtgggtttgtttgaaattagttaggatctctaagttggtaagttaaagtttccaaatttatgtttggctgcagcaaacgttggcatcattgaattcaacaaagtacacaaacaagttctttctgctgctcttcatctttcacaaggttgtggctattgggtttgtaggcttccttgtcttcagaggcgttcaaggtctaattggatcaaatggtagcgtcaaaaggaaagagaaaaagatcctcagattcttacttccacaagtcgaagctgcatcgctcttgagcatcattcttgcattcctttggcaaatggcattcaggatttggcctgatttcatgattcacttcatactttggagtacgtttttgatgtctttatcctcaggaatcctcttactgtgtttccagatgccagccactgatgctgttggggtttgcctcattgccttctcaattggcaatggtttatatgcttgctgggtcactcgtagaatcaagttctgttctaagattttggtcaagtcgttagaacctgtttccaagttctcggatttgaatttgcccacctactacatgctagctgctggtttcctctggatgtctatgtggattttcggtgtcatcggtgccttgaacttctattttccgccacttgtgattattggtttggtgttaagtctggcttggacgacagaagtgatgaggaatattgttaatctaactgtgagccgggtcattgctttgtactatcttaggggaatgcagtctagtaccaggtttagtttccaaagggccttgtctcgtaacctcgggagcgcgtgtttaggatctttgtttgttccaacaatagaagccttaagaatcttggcaagaggattaaatttgctaaagggtgaagatgagttcatgttttgctgcgctaattgctgtctcagactcatggacttcatatttgaacatggcaatggctgggcctttgtacaggtactataaactaattctttaaaccatgccactcccactctcttttcttaattctttaaacctgctgcagtcattttgtttctatataatatcttcttacagagaatcagtctagtaatagtattaaaatcaagttgattgtggtgggtcttattttttatatcatttctgatatgagaatcttgcatcatcttgacaagtcgaggcacaaccacatgctctttttgcatttatagtaattattttgaattagaaaaatagtcatattgaatcaatagtattgagctttgagtggtaacaacagacggaacaaacttagactagatcactttttcaccattcgaaagtgttttgtaccattggttgtttacttgtttaaaccgtattgttgttacagatagcggcttatgggaaaggatttgtgagggcatcgcaagacacatggaaactgtttgaggatgaagatatggttgaaatagtagatgcagacataacaagctccatatgcttccttacaggcatctgcagcggctgcgtttgtttaattgtcgcagccgcttggactcacacagtttacaaaccttttacagccaccatctctttacttgccttcttcattggatacctcatggtaaattacactttgaacttttcaactctaaaatgtttgattcaaatagtattctcatcatattttttggattgttggtaacagaccaggatctctatggcattgcctcacgcctgcgtaggttgctactacacgtgctatgccgaaaatccggaaagcagattcttcgaagacaaagtgataaaaactaggcaagatatgatcaaaagtggccgtgttgccgttaccagtaccacccctagagttcgccgtgctctagcttagcctgatcatctttttttccttggtgctaaattttcagaatgaaataactagttttttttttaaaatgtatttaaatttgaaaatgtaatttaattacagaaagagtgaagagccaaccaatatcagtaggggtggggaagaaattgtggatagagataagctcgtgacatggacacaatccaactaatgacccaaaagccaagttggttgagagctttttaactttttattttttcctttgttgttgttgagacccctcaattactttctgtacataatttattcttttgttccttcctgtatatgggtatattcctttcttggttttggaaagtagtgtagttttgaactttaatgaactattagtaatagtggtacatcttgttaaagtacttcaagctttagctagctttctgtatatgggtatatatttctttctcttacttagcttcattgagttcagcaacagtgatctctttctacttataaaattttttagtcttaaaggcccatcttgaaagaatttgaaacttttacaagaatcctatcagttttataacatcttactacaaacaatcataggcccatcagtttttcagttatcaaagcagagaggcccattttacaattatactaaacgtcatatgatctccattcttcagagaaacaagtccaatcttatcatttacatgaaatctaaaacccgccacgtgattcgtcgattacacagaacccatatacctgaagaaaaaagaaaaaaagaaaaaaaaaagcgaaattgttgtttgaacgtgtggtcgaattttatcgtggcgctgaattagcatccacaagtgaagaaaacagagagagaaagacagagagatctctctctccttcacacacacagatacacatggccatcgcgagcgggtcatgggtagccactgtgaaccaccatgctaatccccacagcttcacttctccgaccaaacccattttctttctttctcaaaagcctcacaatttccatgtctgctcgtctcgatgctctatggttcttgaggaagatgaaaagaagtcaccgagtcctaaagaagacaagtggccattttttgaacctggtccgaatgaccttaaccgggtcttatccaggtttctccgagacccggaaactcggaaactttcttctgaattctacgagaaagctaaggagaactctgagttgagaacgaccaagcatctgataagttacttggtgagttccaagagttgggacttgcttgtttctgtttgtgaggatctcagggaacataaagcattgcctgatgggcaaacgtgttcgaatctgatcaggagttgcatcagagataggaaattccgaatcacacattgcttgcttagcgtgtttagatcagacaaatcattggcggtatctgcatctgatgcagcgatgaaaggctttaacaaactccagatgtatagtagcaccattcaagtatttgataggttgaaacaatctgtgggagttgagccaagcccgggttgttattgcaggataatggaggctcatgagaagattggtgaaaatcacaaggtggttgagttgttccaagagtttaagagtcagaggttgagtttcttggccaaggaatcaggctctatctacacgattgtatgctcgtcccttgcaaaatcaggacgtgcattcgaagctctagaggttttggaggagatgaaagataaaggaattccggagagtagtgaattgtactctatgctgatccgtgcatttgcggaagcgcgggaggttgtaataaccgagaagctattcaaagaagcaggagggaagaaactgttaaaggatcctgaaatgtgtttgaaggttgtactcatgtatgtccgagaaggaaatatggagacaactctagaggttgtggcggcgatgagaaaggctgagttaaaggtcactgattgcatactctgtgcgattgtgaatggattcagtaagcaaagaggctttgctgaagcagttaaggtttatgaatgggctatgaaggaagaatgtgaggctgggcaagtgacttatgcaatagccatcaatgcatactgtcggcttgagaagtacaataaggctgagatgttgtttgatgagatggtgaagaaggggtttgataagtgtgttgttgcatactcaaacataatggatatgtatgggaaaacacggagactaagcgatgcagtgagactcatggctaagatgaaacaaagagggtgtaaacccaacatttggatttacaattccttgattgatatgcatggaagggctatggacttaaggagggctgaaaagatatggaaagagatgaagagggcgaaggtgttgccggacaaggtgagttacactagtatgatcagtgcatataacagatcaaaagagttggagagatgtgtggagctttaccaggagtttaggatgaacagaggaaagattgatagggccatggcaggaatcatggtcggtgtattctccaaaaccagtaggattgatgagctaatgaggctgttgcaggacatgaaagttgaaggaaccaggcttgatgctaggctttattcctcagctttgaatgctctgcgtgatgctggtctcaattcccagatcagatggctacaggaaagctttgacgctgcacaaactagtacttcaaaatattcgaatacaaagaacacaggaactttaagttgaaagggaaaactgtacaagccaagattatttttcttgtaattaaatgtactatattgccaatagagatctgctatcttgcaaatagaagatttccagcttaagttgtaaagccttaatgaaagcttggaatttccaaaatgatacatcaaaaaaaggaacggctaaattttcaatacaaccaaagaaagacaaaggagtaacacagagtggtcaccaaatgtatttgtcactcggaatcatatgaatggaaatagtgagaagtactagagcgagccagtgaacccacctcaatatactcataattatctgctttcgaatctcatttggaaactgctttaccatctacggcttgagctgtttctacaacttttgcatcaccagaacaacatcctcctccatggtgatgatgatgaccgtgggcgtggtgatggttctgcttccccttgagattcttccgcatgtcataagcatcctccccatcggcgtagtactttgcttctacatcattaatcttgtagcctaatgtctcagtgtatagattgaatgctgctcggttacttctcctcacatgcaacgaaacatactcagcctcgtaaacctgccacaaaaccccgaccgagaatgaatttaaaaagtccaagttcgagagtgaaaacaactatcaacctttgaggtctgctattattagtttcacaggcaatcagaaactactcgtctccgtcagtcaaaagcataacacgaccggagacaaaacttaatctctttatacaatctacagagcttaagttacttcaaattccaatgacaattgcaacaatcactttgacacacaaagtttctaactttcaataaaatcctttaacttacaccattatatcaatcttcaacataaactcaaaccacacaaattcttctatatcatccaattattcaacacgaaactctatatcaattcaatgaatctgcttaattgaatgcaaagatatacgaaatttgaagattagaggagtaacctgttccatggcagcttgagcggcggtcatgagcttagtggcgagaccgagcttgcgatgggtacgaagaacggcgagagaagtgatgtggccgtggcactcgttgctctcttcctccatcttagccaagacatagccaacgatgcgaccattgtagtcctcggcgacgtagagaagctgaggccatgagaggatatggtagaggtagtacttcatctggtagttctcaggaagacacatgagattgcaggcttgcatcgccagcagatcatccaccgtcgctcgcctgatgcaaaccatggctgctcaattgctctcgcgcggataaagaggggttagggttttcggtctaatgcctttgggctttattaatctggggacgaattgtaattatagagaaatatgaggtctttattgaaacttttgcttatattttaggggcatttaatgaaattcattataaactttttcagtttaggatttgaggtccaattgggccttgattgtaatggagtaggaagattccgataaccttcactttctataagcttatttctccgcaaattttcttactatacgagatgtcaaataactctgtgccttgtaaagattatggatttcaaactctcagctaggcatatcttttttataggagagacagtcgagaaataatcaaaagaagaaggacaaagagagttggtgcagagattagataactgaatcttctcttctttttgcaagtatccctctaaaattacttttaaaacaatcggatacttgctaaagaggaaacattagtagccttctcccatacttttctaggactaaacagagaacctttgtcttttggcttcaggtggagaatttgctaaactagactgatcccctctttctgcagtttcgctgctcgtgtttgttgtcactgaatcgcttgacgggctctctctttctccttcattcgtccttctatcatgtgcctctcccggcaaccttggagaaaacacaagtagtaagaattttataactccagttagtgagtgttaaggcatatgcataactaacagaggaggaaaaagacttatatttatcttaaatcagctttccaataatgcaaccaatgacagcaaatagacttaaaagagcaataccctaattgcaaagttgtgtctgaatcggtgttctggaggctgcatttactgtcgtggtttatgagagcgttctttg

SEQ ID NO: 710 - DNA, 74613 bp, Arabidopsis thaliana
gatcctaggagaaagcaaaaaagcctgtcttagcttctgcttagctcctcctgtcacaaggtttgtgttgttgtatgatatcctacatgtgaattatgaatgattcagaattattttgtatctatcagggctcctcctatgtggggtgttatgaagcatttgagccagaagattccagaagttgcttttagaaagtcgcagacatatggatacttgcttgaagaagaagaaaagtaagtcgttaagagtgttttctttttttgcgtttgttttaacgaatcaaacaagataggtgatgatatgataaaaccacagggcaatgcagtgtttgccagagcttccagactttcagttgtcattgagacccgacgactttgaactgcctgaaatagaggatgtctcttcctcatgaaaccaaacccatttgcttagagaacatcttgagttcttgactactagctactcatgttgatgatgatgaccttgatcgttgagaaagaagcactctctctacacatattctttgggtattttaccacttataattgtaatgtaatattttgtattcttgtcagacaaaatctgatacttgagtatagagtaatgtaatatctgggtgattacttatcttccttgataaagaatttggaaggactagaagagaaagaaaaaaaacagctgctaattaataaaggaagcgtttagctatgttggagaagaaatgttgttgtgtgaggagctaaaaaacggcccgcattttaaattggaaacagcaggataaccgcaacgtcacgtgagttagtcacgtgtaagtgatgatgacatgttcgattccacacgtacaataaaagaagtggttgttgtgtgaggcgcttggaaacggcacgcagtttagtagtcttaatttggaaaaaagcggaaaaagcagaataacaataacgtcacgtgtgggatgatgatgagatgttggattccgcacgtaccaactttgtagaggcggtaagggattttgacggcggtagtgctaatgatctccgacacagacatgatcggattttttaatctcccaattaaggtgacggcgatgaatgataaaacgcaaaaacattccgattatcactcgtaacggtgatgatcgttaattcatcaaaatctgctgttttttttgttcttccaaaaatgcatcatccatgaaagataaaagtatcatcagaaacttaaaatcgaaacgatcatcatcatcgtcataagtaatatccaaaaaaggtagcagctagtttatctttcaaggaaatcaaaagcaggacatggaactctagtacatatatagctccaaagttgtacttaaaagagtcatctgaacaaaaaacaaaacagagaagaaagcagagataacttataaacggagagaaaggtctagatcgagaggctcgtcttcttccataacgccgtttcctccgtcgttgttgttaccggataatgcaaaagggtacacatacggatacggatgaaacggatcgtagccatccatcgtcatcatcgtcggctgttcctgaagcggttcgtttccagaagtagatccttgaaatgggttttggtaaaagcaagggtaaggacgaagaaacgtgttgttgtcgtcgaggatgggtggagagttagcgaggacgccgaggttacgacgagcagcggcgcgttcgcgtttgtgagcgttttggtgaccgccgagagcttgagatgtgtagaactttcgaggacagtactgacatggaaagagacggtgggaagctggatgtgcagaggaggagaaagagtggcgtttgcttgatgatcgagtttttgcaggacctacgaaatgaaggtaagacggtggtggttccgccatttttgagaggttcttaagctacagaggaagagagatagagaagatgagagtaaaagcaaataaaaagcgagagagagagagagaagagtgaaggatgtgtgtgggttttatgggaagggtttaagctgttgttgcttttgtttgtttgcgtcgtttgttgcagagaatatctgattctgaagttactcttttgccctcagcttcttctcctctctctctctctttggctttaacgaatttcacagatcccaattaatcctttttgctccatcgttatttgcatgctacacgaacagaagctcctttttattattatttaaatagtttatgcaaattgaattagttatttactaagtaaaaacaacatatgggtattgaaataaagttatttattttgtaaccagacaaaaaaaaacatttggattggatttggtaccattatccgataagtacattgctaatctgttttttcttttttgaatctttactatcgttaaattgtcaaagaataaaaagtaaatgagtgtagtgattgagagtaattaaagagtaaaagtaaaagaggttaaagattgaaatctttcgtcgttgagaaaaacagagaatcaagtggtgagagaaactgagtttgttgttgttgatgggatcacagtacttctctctctttcattttaaaatacaaagagagaggattggttgctttttggtgttgggggagagagaatttggtaacgacacgtgctgactagacagttgatgcagtacgagtgaatcaatgaacactctctcacacttccaaactcattagcattttgaaaataatcctaagtaacacatcacttcttttttgtatcaagtttcaagcgtttttgatttgatggtaccttatttgttgttcttgtgatgcacaaagaagacaagagagagtgaatcaagttccaagatgaaattgccaaacatggaaggtttctatgtttctcttaccctctttctttttttccattctctcactacttacctatctatcactctcattctttgcttctcatcattatttcttgcctttcctcacattacttcttggatttaatccacacatacctattttaaggcccatatacaaggaatatacacaatggcccattaacttcaagtatctctctattaactaaaggcttttgaaacatctatgttggaggcccacatatcaattgatacctctacagttccttcttgttgtctctcaatcttgtctctctcactttaaagtttaaagtcactctatagcaaaaagtattaaccaattgggtagaatgaatctactttttatttctatatttaggaatttatgatacatatggaattgtaaggaaaaaatgttatactcacaacaacgaaaataaaatagtaacttacacgatcaatcgaatctacatttttactacttatttagcatgaatgtttatatattataatttagagattcaaatctgtttaacaaaaacaagtggttagtcaaaataagaaacgtttgcttgaaattgaagcaatcctacatttaattttacctttggtggctcaaaaagtagtcttgctttctctggtaagcatattccaagcccattggctctaagttacctcttctcacacacaattacagacatgttcacattcacttttcacttaatgactcttcatcatttcattacttatttgtttttatttaaatgtaggtaactttgtaacacatttttctttgattacatttgaaaaccaaggatgatgcttcgattaaaagcaaagaaggacatgtttatggtaatatgtgtatttgtgtgggaaagaggagaaacttagattgccttaatcgatgttgtctttttctggattttacattggaagatggtgcacaatgcacatgtgacttgtctttgaccttctccaccatttttctctattgtttattttacaattgataggatgcacagaacaaatctaccataaaagctttgtatattcaatcattacaatgttcacaaatataaacccatgttatgtccacactctgccaatattttgtcatttattacattgaacctttttgttggcacacatactacatgattttctttttcaacgattacattagatcgaatttgtgtgttgtgacacaacgacgttttaacacaaaaccattatattgtttgttttggtcgatatatgtttttgtatatatatattgttggaaacgttacatataatatgtataactctactaattcatgaatttcatgcaaacaaatgtataactctactaattcatgaatttcactcaaacaaatgtattcgtatcaattatatctacgatgattctttctacaactcacacgcatgttatcatttggtttgtcaaacacatatcatatttaagaaaatatgttggcttctgatagagtttaaatttaaaatacgtgtcaatgacaataaatgtatctgtatgttttgattaaaaaatatggttcgacacgaagaactttagcttctcgacaccccatgcgatggcttctttcattttttccactcatttcaatttcaatttcaactcttgcttctgtctctttgttatttccaacacaccaatttgtttgtatatataactcatccatccacatatatatacataaataacacaccaatttatataactttttcaacttgctataccttaatacaaaatgcatctccatctcatattaataaattaatttccatacttattgatataatataacagtctatacaattgtttcttaaaaatacatagatgctatggattcttatgtggtatgaaaagaaaaggaatcaagttctcatccatgagaaagatagatacctcctttcaattcaactttacttcgtattcctcagctatatatcactttacttgcatgataatgttaatttaaaataccttcaagtaaaaataatcaacaagtttgacatatatttggttttgcccaacaaaagtgcaaatctcaactcatacaattcaacagtttcagatcaaaatgagctcccctagaaccatgttactttacttacttcgctaacaaataaatcaagacgttgaaattttttaaatagcttgacagaaacgtaagtggaatagtaggttagggtttaggagcttgtcacaatctcaacgtctcctatgagatatatatattactcatcagctgaggtaggaggagaaggcggtggtggaccggtttcatgatttgacccaaccgtaaaatggtcgatgcatctcaattcttcatcatctccctctcttgatttcctctgttttcttccttttgagcctttcctctcataaacattgtacactgcccattctccagacacctgtttaacccattattatcacaagttccaatgtctttcttacagtagtctagagtagttattgtgtaccttagccgacgcaaatcccgcaagacaatactctgtcatgctccatctagttttgttgcaataagaagaagacttgtttgtttcatagaaagcaagtgttcttctaatcccaaatgttttaccacaggcaatgattggtctctctttaccaataggtttccaataaccatcaccagaggaaatcttgattctatgctcattacttgacacttctctcttcttgcaaaagaagtacctctgcttctccttttggtcccctgaaagcaaaacttcttcagttttagcatcagacaccccggatctagacccaaacataagatagaccattttgaacaaaaaacagttgaggaaaacgaggagacatatacacacatagaggctttgacagaaggaacatagagagagagagagagagagaaagagacctgggaaactaagaggatgagagaagaagaggtcaaagacagggatgatggaggaaggcaaaggagaagcaaaggcctttgggagcaagtaatgaaggataagctcttgctcggttgggtgaaatctgtatcctattggcaatttcattcctccattcactacaatcctcttctccacctccatgtcttctcttttcttttctttttcaatttgcttcttcaaaacttgatcaaatttcaaacctttacaagcattgatccattattccatctaaagagaggaagagggagagagagaaggaagacttgtgtagccctttgtttgtgggctttgcaggctaaatgacagtagtagaggttgtcaatatatgttatatgtatatataaatccccacggctacacacacacacaaacacacatatagttgtgtaatataaaattataaatggtagaaatggctcctttgtctgaacatttattttagttcataataagaaagatgatgagaaagaataggaaaaaaaaggaaggtgcttttgagggatgtccattgacttattaagtaaaaaaaaaacaatatagagaagaaaatgtcatattattccttaagaaaaagaaagagagatgagaggaagagagaaacgtgcaagtttggggtttctccatttgcaaaagggtccctcttctggatcctttcacttattattaccgtttcatcattctctgttttctctcaatattttgatcttcttcatccaattggttaccattaatttatcaaacacagtaaaaagttggaactcctttgacaattgcgagccagcccacgtctgcctaaaccaattactatatagccttatctttctataaacggctttattgcatttattcgtgcatgtgaagagaggagacacaacactgcctagttgttcctcctactgactttactagtagtaaaataaaggcagacttgaatttggaaactataaaattgaagattattgggcccaacttttatgtgggctttttattggccttcctccacaaaaccagctactatttctcattaccatgtccattttaatattttagatgactcttggatgactagttttcattaaaaatagctaagatatatgattgcttgaaaacaaaacatgaagaaatgaaggatggtttatgcatgcacgtatagagttatgtgaggaatatgcgtgcgcaccatactcccacgttacccgctttttttattcaaattattgtttatatttcacttcgtcgtgtaatgtatacattttgtaaacaaacaaattaaaaagagttaaataattacgaggttttaatttgtgttggttaaaaatagattttactggtgttggattggatgaaagaaaaagtcaacggtcaaccaccaaaaaaacaaggctcccctacttcttcgattcagccattgcgaccatctctctcaatcgcctctctaaccacaaatcctaaaagtctaaacgaaaacagaacacatgaatctctccttcctctgcatctcaattccacttcgccatttttaaagctttttacgtaaataataagaaaccatggagaagaacgacaaggaccctgatcatgatgacaaatccaagggagatgagaaaggcgacgtcgtttcggatgctcatccctcagatgatgcgcatcatcaggatggtatcagtaacgaaaatgtagatgttgttggtaatgcggagacagatcatcaagatccaggagataacaatgtcgacaaggtttcacaaggagaagaagcaccagagattcgtcaaaccttggagtctttgtctgaagaactcgatcagtttctcccgactctttcccttcacatggaggagcacaaagatagcaccgaggagaaaggagaggatggttactttcagatcccacagtttgttgggaaattcttggatctttttgaggaaaaactctccaaatatgactctggtgagcctaagactgtgtggtaccaagatcctgaagaggtgtcttcgcttttggaggcagtggatcgtgtctcaaagcttatggggctattgctcaacaccaagtcctgtttggaccatcatgagtccttgatcaaccatgcgggatctattcagcagcgtgcaatggctttcttggaagacgaattccgcatcattttagaagaatctgtgaccaaagagtctgtggttgtcaccgatgacagcaacagccagaggaggagcactgccgatcagcaagaccaccagaacgatgtggtggtctcacaagaccacgaccagatgctcgttccggaatgcggtgatcaggagattgaataccctggttaccctgaggatgtggttgtggtgctgaggaaaatagcggaaaagatgaaagcaggagggtatggatgggaatgtagagaggtttatttggttgggaggaggaacatcttgatgcgcactttgaaacaagattgtgagtttgagaaagttagcatcgacgaggtgcagaaaatgagctgggacacgctcgagagagagatccctatttggaacaagactttcaaggactgctcttctctcttcttccctggtgagctaaaacttgcagagaggatattcccaggggacgaggggaacttattctgtattgtcacacacggtctggccatccagttcttaggtttcgcagaggccgtagccatgacaaggcgctccactgaaaagctcttcaagatcctcgacatctatgagactctgcgggatagttttccggccatggaggagctgtttccggaggaactccggagcgagctgaggaacgaggtgaccagtgctcgctcccgacttggagagactgcgattcacattttctgtgatctggagcactccatcaaatcagattcaagcaagacccctgtgccaggaggggcagtgcatccattgacgaggtacaccatgaactacctcaagtactcgtgcgaatacaaggacacattggaacaagtgttcaagagtcactcgaagatggagcgagaggaggaggaacctgtggagagcggaaactcggccttcgcaagccagctgatgaggataatggagctactcgacggaaacctggagacaaagtcaaaacagtacaaagacataccattgagctgcatcttcatgatgaacaacgggagatacatagtgcagaagatcaaaggatcggcggagatacacgaggtgatgggtgacacatggtgcaggaggaggtcgtcagagctaaggaactatcacaaaaactatcagagggagacgtgggggaagctactggggttcttagggcacgaggggctcatgcacaacggcaagatagtcaagcccaatctcaaggagaggttcaagagcttcaacgcaacatttgacgagatacacaagacacagaccacatgggtagtcaacgacgagcagctgcagagtgagctaagggtctccataactgcagtcatgatacctgcctacagggccttcatggccaggtttggacagtacttggatcctggtcgccagaccgagaagtatgtcaagtatcagcctgaagatatcgaggatctcatcgaccagctctttgaaggcaacacctcctcctcttctactgccaccgccaggcgaagaacatagcttctttcttttcttcttttttcttttgcaacaacactttttcctgattttctcaaaatttttcatgtcttcttcaactgtttttgtctgaatgccacaacttggatgacccatatttctacgaattcaaacaaacgatcgtggctccatgccatgtgtaaatgttaattataatcagttccagcatttatcaataaacaatcaatttattttgttgatagcctaacggtacgtttactaagttatgtgaatttgatgcaagactaactcaccttttattaagttaattggcggctggaacgaaaacataagagactctatccattaaacatacttctaccttatttaggcatcaaatctgtttatgcgagaatgagaagatggaagctctaagtggatcaacacggtcctaatctccatcgggtaaagctccatctccagctttcttggatcaatttctctccctctctttgccttcttctcctctccataagatccttcaccttctactttccacaccaacctcttcttctccatcgtgcttctttcttgatttgctgataggctcatctccgtcaatttcccgatctgcaatgcaagtattttcatcatttttcaccacaaaatttgctatctttccaaaaaagcttataccttctttccaggaaaaagctttttgagttccacgcttgctactcctgatagttccttgtcctcttccacctaattgaacaacctcaaatgcttcattttactaccaaacacataaataatatgatattattattacctcataaagatgagctagacgcaggagcacgtttccatcatccagttcctgaaatcatctcaaccaaaccaatgtgaacaacaagttatcaattcaactcacacaaactatctatataactttggactctgcaaaagaggcacctgcagagtcagaagtgccacattgtcaggcagactgtacgatggatcaatcccggagaatgatgctgcaccaaaactcatcggctttccatcatcctgaaatattttaacatccgctgcataaatggtctgggactgttagagaatagcatcctggtgttccattttacacttgttttcacctgttgagcaaaagccaagaggagtggcgagtagatttcttgtccgaatgtacgtctccattttgcaccttctccatatggatcaattctatagtaatattttccttggatctgtaataattgttagaatcagtaccttagagtaggagacagaatgttcttgaagggtataattttcactggaaccaagtttatcttatctgtctgtacttacagttagcccagtacacttgtcttgaacgcacactgtctcatttagattttctgctacacccctggagtcatcgaggagcagtctcctgtaattaaggtgattgtttgattagacgcagagagagagacgagtaatggagattatgatattgattatgcccaatacctatgaagcattagctcaacttgtccgtccactatgctcgaccccccgaaggctctgtccaccatcactgagaattccttcttactgtcttgcaagtaaattccatgatttatctgagcaagagatatatggaattattacccaactgatttggtcgaactcaatccaagatcatttgcagggaactgtaaactaccaaccaatttcctacttgatcaatgtcagttattcacataccgggtaataatttcctgcaataggttggttgacatctagtttccagtctgacctgtaatcacggatctgcaaaacaagtttttcagtttattcttaaacagcaacaagaaaagaacaataaagaacacatgcacaaaagaagataatgggcatcatacccttttgatataatcacgtccacttgaatccgtgtagaaagttttattgcttttcagggaacttgagatctgggttactacttctttgccaattccatcatcaattggtatattaccaacctaaagatccagataatcctaaagtctttataatggaatgtaagaaattaaaagcggtattggaatagttatgcatcagcctcacaataaattcaacttccacatgctccttgcccttataaactctagtgatctgcagagaataacaaggtcagacagtataatctacaggttcaaacagagtttaagaagccacagaacagtttaaacttaaggtagattccaagagtctgtagatgcaaacaatctagtgagcaaggagaacacactaaaaacttaggtacctgagatatccatggattaatctgttggtgtacttcgtccactagcggcccatgtataacagtcaaaggaacctgaaacttgagccagtggtttaacattgaatttcttttttatgattcgtctggaagatcaatacttttcagaagtgagtataaacctgtccttccggattgatggggaatgtaccatttggacggaaaacatacgcacccgagttctagttgttgcaaaccagacaagaagaccaggggaacttggagtaagtgtactgaaccttagccattgaaaggtaagtgttgaaaaaagagaaaaaagatctcctcttacttgaggtataagaggttctttgtcatttgatccattgtatgcagagtagtagctaaatgtctgtttgactggttctgtcatctttaccaaaaaaatcaggagatttatcagcatttttaaggatcactggcaggtagtgtttagaaaataatgacataccgaggttctgccgttaacataattgattgctgtcccttgatcagtggaaaaactaagcttcagatgcccatgaccaatgttaattattgactgttcgccttttaggatattggagacgtatgatttgctagaatatccatctaaatttggaaaccaaaagggccagtgatcaaggttaaaagcttgttccactagaccaaatatatatctgtattgtacctgttttcttagcagtggagatagtgtaagtagtgaagccaagaggaggcacagttactgaaaacacaagccaatactttggcacctgtgtagggctttgacctaagtatgcctctacatgatatttccttaaggccacatattcatcagtaaatggaacaagttgagactcaacttcgtgtccctcagagtcatgtaccgaaacgtctccgcccacaacctatcaacgatccgtcgtatacttgttactacataatagcggctttaacaaacattaacaaacaagaacttgattgactcacaggaagccggacaatgtccactcgcttccatcctagtgggttataagccaatacgatctacagagaggaaaaagaagtgtaagtggaaggaagcacattatagacgagctgaaagcccatagggataataatttttgcttaccaaacttttcccatcggataagttgacttcgcttgagggacagtaacttatgttaagtaacaaacactgaaaaggaaggccaaactgttactaagagaaaaggttgggttgttattatcaaacggacgtaatgtaagcctttacaatagtgatttaattcttctgagaaatacgtataagctaggagattatttgcctgttggaaggttggattcagggtgggatctactttagtcagatgagcaagagaagtagcaaccacactctcagcctggaaagttaacagatcttactgaggtgcaaatagagaaaacaggccactagagaaccacaattcacaggggaagttggcactctacctccacatagcctattgctagtcgttttgcataatcattagccacatgctgtttcgacgtaccagaaacagcgtcgtgatgttgagcaattgctagtgcatctgctaacgaatctgtattcggacccttctgacttctccctttgaaaaactcaagttgccttgccgcctaaactcttaagttaaatacatggataataacacaacttcaagtgcattattttaaacttggaagaacatataccaagtagtaggcactcatcactctgacataacgcttaagtgctggcctacttgtaaaatatccagtccaataagcatttatacggtctgcataactgaagtaaagattggtttaatatataagcaaaatctggatgaaggagttaaaaaattaagacccaactcacgggaaatagtcctctgttttcaggggccaagcctcatttgccgcgtgttttgcatctgtatatatggaaggggtagagtagaaagcattgacacgcccatcctataataatccagggtccacgaattagagatatctagtggttctaatcatctagcttactataaatccacaaagacaaatatctggagacataaagaggaacagataattaagactgatctttagatgaattacttacgaggttaacataatgaataagcttgtccatttgtcgataccaggtgtgggcatattggtacctgaaatctgttcccatggtaaacatgatgtgatttattcgagtaatgttggcctgcagataccaagaaacatgtcacaaaaatgtaacaaaaaattctaccaaaaaggaacattctacaaatgtacctgatccaaagctgcagctacaaaggcattcactcgctcttgaacattgtaatcaaacaggtcaggatcatccttcacggattaaaagccaataacttatcataggcataggataaataaaacgataagtgtaatcaactgccaaggaaaatacttggacaacgggggaatcatcggtgatttcatagtagaagccaccaggtggaggttcgtagttcgtagggaaagcaccggcaaaaatctgtaacaagtcagatcaatgctttcaaggaattgaaaatctagtggaattcatagtataagcttcatgacatttattttgctttgtatttaacctgtgaagaagaaccgagactcttagagccccgccagataacttcaagagtcttctctttataacgcttctccctgtcctggtaatctatccggccaaaaaagactgagtcgaagccaacctgcataaatcaatatcttcacacctctggatccagaaataaaataaaaccaaaatgaagggccagagaggagcttacttctgcgcctagcaagtaagcctgcactgcagaatgtccaaagggatcaatctgccaaccgattcttggagtcacattgaactctctgataatgaatcgatgcccgagggttgtctgatcaatcatatctatatagtgtggtgctgcttcatcatgcatacacataccaccatttctgcagaagagtcaaatataactcaacggaaagacacaaggacaaatgcgatacagataaagcaagctgacaaaacaaatacatgagctctagttggcctgagtgtataagttctttcacaatacgcttaatctcctcactttgttcattccaccaccgctgaaaaaacgcctgcattcatcaaaaactaaccgtcattcaactcgaaagattgttcacacctagctaacaacgagagtactattagttgtacaattcatctctcccgtaaaccttccaatacaggcctagccaacaacacgaatcaattaggactaaagaaagaaaatttacctgttcaacataaatgaatttgcgattcttatcagccaacagcgcaggaacaattgaatccagtacattttgaacacaagcaacctacgagcaaaaataaaacaaaaacgaagtaagtaccacaaaatctaatccataaacagctacaagaacaatagaaagagggcaaagacctggatagagttgttggagccaacatagtactggtcaacggtcttgagccaaccaacatcatcgtgagaatgaggaaccacatggacattaagttttccaggaacaatggtatgtgaagtattgtagaccatgtaccttgattctacgagtgagattcccagtagcaaaacaatccaacacagaaacttagcaagatccattgtctctcgaactcgaactgtgtttagtcaactcaattagagtgacgaaggagaagaaagatttgccctttttcaactctcaaaactctcaactttgtttccgaaaatgttgtcctttttcttctttaataatccattacttactttaataagtgacccttatccacacacaaaaccttaggccatttccagctttgagaatctagaagaaggttggttagtgtttggagtcgaatatgatgagaaaccttcaaagtttctcaaaaacaaaagaaattaatattttattataatttaattttgtaattaaattatttttttctttttttcaattgtccaattataaacagccacctatgcaaacttacaaaatttctttacacagaaacgtttccttaattatgttattctctcctcctttatgaattgtttatattatttcagtgaagaaaaactccaaaaattataatctatggagatgctcttagaactgacgttacgctccaacgtacggatcataaatcggacaaaaaaaagtgtgaagaaatcgaaatgattcttcagcctgtatcagcaagcacacgcttacgcgtggaactgaggtgagagaaggttgagattaacgacgaatttcaagttaaatgggttaggccttttaataagcccaataacataactggactttaatctggcccattagttcacactacggtacgatgtgaaaaggtcggtttgtgtttggccacataggcttatatatcccaacaccgaataaaattccccagcgtttgccatcgtcgtcccaaaaattcgtttttgcaatggatgagagtttcagagtgaggatagacaaggtttttggatctcttgcatcatcttctacgtcttcagcacctgtgagctctctctggtgtctcgcggaagacgagatcgatggaaaccaacggagcggagaaaaggaactttctgaatcattgaacagcttctcggataatggaaagcaggagcatgaatcagatgatttgagcatagatgaggaaaaaggaaggtctagtgaattgcagaagccgagtgattacgatgacgaagagtgggagatcaaaaactcaattgggatggactctactcttgatatggaggtatttatatctatagtctttttgtgttgttgaattgctctcattgatatttttagtatctccgaggctaagctttggtttttctatattttcaggaagagctagatgataatgacaaagtggcattaggtgaaaaagtgtactgttgcatgaaggatgtgaatgacgactatgagactgaagcagacgagtgggtggagcttccagcttctttcaatgaaagagagaaggaccctcgagctaatctcatagcagcaaagcttaggcttaaagaggacgcagaagctgttaacaagttgaattctttacatgtctctgaggtacttttactctcttccactttgtaaaatttgtgatagcatgttgattatcattagagaagtgtttttttataccaaatgtgtttgctaagagaagattgtcttgttgcaggaacttcaggataatctgtccatgtcgacggaaaacgagaaaccttttgtggtgtctgaagataacttgctgggggctttcaaggagtcacatgttggctcttcagatgagaatgggctgaaaccgatattgaagaggagagaaaaccaggctgatgattctaagtcgccaaagcgtgttaggtttagttctgatgtcaaagataggaccttgactgaaggtgacaacgattctgtgatggaggcaagttcccctaacgaagataaagtagaggcagtctatccgactgggattccagattatatgcggaacccatcaaaatacactcgatatacattcgagtcaggtgaggttgatgaagaatccaacaggaaagcatacatggactttctcaacatgattaggagcaaagacgagtcccttgtagaccctctgatggagcttccaagatcagtggctttcgtaccaaagagaaaaccaatggctgagagtaaagtagaaaatatagacaaggattgtgagggaagaagagttgcaatagctgttgatactatagaagactgcaccatttctgctatggaagaagatgaaccagaaacagctcaacatgtcacaaaaagacctggccgacagtatcgtgccagagccaaggaagatccagaggaatgttgaagatcatcaaccttagcttgctgatttgttacgttttctttatgtttcttgaatgtggtatttgataggtatttgatgattaagaaatcaaatttgttttgacaaacgatatgctacgtctactgtatctaatatctatcataagccagtcacatcaaatctttaggttaacacagcaaataagaaaaagagatgattaatattgttgacccgatagataagatgccaatggcaacaatagaattcaggaaacaacaatgccgaaaaaggcagcacgtacgctgcagaagaagctaaagtcccttaaataaaatgtgaagggttcttccacttgggagatagttgctatctatgtactccccaaaatagagtgaccaaaaaataagttcaccaatagcctttgttagtaaaggcgtttcctacaatttagcgctccacagtagcaagcgagctgcttcaccttcccatccggtccatgaacgctatcaagcgcatatccatagtcgtaagtgagctcctacaattgagacagagaatgtagtaagatttattttataaagggaatgttcgaatgagtcaccctcacagatgagtttctctcagtacctgcattggggaaatgttgtcagctgcgaaaagaaccacacgggcaagccttatatcctggtgagaactcaggacgcactgaacaaataggtttggttcacaactgtgatttataaacctagcaaagtttcctgttgaaccagcatcaatgcagaactctggcgcattctcatcttcactgctctgactgactccattattcattggtacagcaacatctcttagtcttctctgttggcgaagaaaaacaaggagatatacctcaaaaacttatatgcttgattcaataataatcacatagtaaattaagcatctctatgttacctgtcttccaccaagaccttgcattgtctgttggcagtcaatctcaaatatgtattcattgtcagagatagtatccacatcagcagttctcctgacaactcctatgtactcacatactggtgaaccagctggtatgtactcccatgatctaactgcccaacccttctttgcagagcggaaaacctgtttgaggccacagaccaaaacacaagcttcagattgtgattaagctcagatttggaaggacatcaaatgacacacactggattatgcattttaattattaacagataaaggatagtggactatatgattaaatccaagtgtacttcgtttcaactttagtggcaagtggttcttccttacgaagtcttaaccaatacatacctcaagattgaatcttagacgcttctgagaagttcggttgacacattttggcccacacccacagtgaggaccacattcaaatacaacatctcgagactcaattaatctgaaaagaaaaaaacagaaaatcaacccaaacaatgttcaactgtaaacattactccaacattacaccaagtactctaatagtcaaatttcatggaaaaaagaatggtaagaacaatagcagtaaagcagactaattttgtactctcaatgcaaacttcagttcaaaataatacgcaaaggttatacaaatgaaggaacatgagtaaatggctctacaaggaatatcacctgccatcattaaggtcaacatatggaaagttacccccattaagcttagcacatgcacatttctttgagtcagtgcagctgcctcggcagttacacccagttgaactctttggaattatgacattaggctcaataatcaaagatttgatgtatgtgaaacctgatactcaaaaaaggagaattcagctcatataatatcataaagtggatactaatattactttctagttctgctccaacttaccagatgttggtgaaactggtgaatcatcaacacgattagtggcggggatacccttaaattctagccctccggagatgtcctcacataccaaacttcacaaaaaacatgacattaatggatgttaaaatgcaactgattgtacaataccacatggaaatcaattgaacaggtacccctcaatttctgaagtactcgttggtatgcgtccagcaacaaagttgacctgcaatgacaagaaacaaacctcaagtaaaaaatgcataaatatagacctattcatagtaaccacatgcattctctgatcccggttagaaatcagaacataattgatattgccaaagaaacacaaacaattctacaaaacagcattcacaacaccagaagatttagaaaattaataatagaaataattgattcagttaatagtcaaatgtaaatgacaggtgagctgaccacatgttcggtacagaaactaaatggtaaaaaaaagccaagaatacagcaagtctaagaaaaaaggaaatgcgataaaaacttatttcttgaggtttgcaaatgttggctcgaataaataaaattctcttatgagatagatcagagattttctctggaagaatatataattaataagacagctttttagcaatgacagaataagagtgacagacataatggtaaacaatttactccgtgaatttatagcaaaactaaaaagatttcatagatatctttcctcaatgataaaccatgttcagatgaaaaaaatatcaaatcttggttttgaagggacttatttagtttaaaaggcgtcttttgaatgagctacgttatatgttcagaacattgagtaactatgtggaaatgaaatagcttatctaaacaatgtcgcaccagatatccacacaaggaaaatggaactttggtatatggaacgatttattaaaaacatcagctatcataaaccataacacaggagaacatacagacctgatcagtagttagttctggttgcccctccaatcgtttcagtcggtacttatacactgtaaatcctgaaacgcccttttgtgcccagaacttttcaacctgtacgaagaaagtatggaaatggaccagagttacaccaatgagtaaggaaaaaacataagaccttagatgtagtcctgagaaacaatttttccttgtgaatcgcctttatcagatgcaatattagataaaagttactcaaacgaataataataaaggaatatgtgcaccagtaccttgtacagtccatcataagtgtatactcgtttggtatagctacttttgcaattgtgaccacgagttactctgacaggcacattatattcgcagcagtgctgtaaaagatgcaagtaaaacataattatatgtcaagaacgatgaggtgtatgaactaaaagactagcttaatgagcacaacaagaagagtagggagagctagaaaaaaaaattacattcttaataagcataaagaaataaaacatacctttagcgccaaattccctcgttctaaaagttgatcctttatctgacgtttattaccagttaagttatgccctccctgtccagtgtaagtcactgtatctgcattgtctagatcatcctcgtactggcccgacataacaatagaaacagcaagcggtaatttgtagttactatactcctatagtgggaagaaaaaagtcagatttatgagtaaataaatgaaaaatgaaacgaaatatcttatattttgggatcaaatacaataacaaaaagacaagttgtattactttttcgtattccattgacatataatcaatgccatttagccaatggttatggaatcctacagcacacatttcagctcttgaaaaaaaacggtgtccaacgtctatacctgcaagccaatgtgatcagaagtcagaacataataatgaaaacttttctgtaaaaatcttaagaccaaagcttatgctggcttggaattaaaatttagggaaagaaacaaagttgtaaaagcacaactaccaaccaacctggaaggtcaccgattatttttcttgggtacaatatcgccttagcttttatcatctggaaattttcttaaaggcttaagtcaacttgcattgaagattacagaatagacaaaccatcatatttacaagaacacaaagtataatgatacatgttgcttaacaaaacattgtgacatcttccatttcttgatagacaaaacaatgttgcatgaggcaactaaggccagaggtaagaaaaatcatgacttgcctcagttacacccttcaaatcaggcctgctcaacttagcctacaataaaaaagaggatcaaaacaggtcaacaacacagcaaaaacgaaatttattatcagcattgctagagcctagagacaaaaaaaggaaaaaccacaaacctggacacagaggagatattgcttgttaaataacctcagacactttgtcactttgagatgaggttccaagttcacgtccttaccattcagagaaacactcaatttctgctttcctttctgcattgcggttagctttggagggcttcttcgtttagggctcccatcgacattttcctcttctttctcatgtaactcagtgtcatcgacacaaatttcactctttctgtcactgaggagcttaaccctctcctgtactaaacgcgccttctcatctaacgctttctgtctcactttctgaacccgaacactcgatcttcgctctgtttggtcaggagcattagctcgtttcctttttccagccatcgatcactctttttcccctgaaaacaaaaccctcgaaattccaacaaaagggttccacaaatcgagacacgaacggaacagtattacgaggaaatgggcaaatattgagaggttagagagacagacgtacctggaaaagctagcggagaagaagagacggaaggagactaagcagcgcgagattgaaactgtgaagacgacgaagatgagagttttttttttctcctcttttttttggtataattaattctttttttatttcaaggaggaaagtagacacgaaataaatgtttgtcctctttctttcccggcgatttcaacttttcggtttccctcctaaataattctgtcggatcaatggatgggctttctaaggcccaatttatttaaagaaatattaaccatgttgaaatcaaatcagagatttttccctgagaaatcagatcacttatctgtgaaagatctgcggtatttccggaaattcaaaaggaaacagattttaactacaaaagttgcctattccatggtttttcaaaactaaaatgatacacaaatttaaggaggattagtgagagtttgagttttttaaagacttaacagattctaatcaaagatttttatagattctaatcaaagatttttctatggaatctcggttgaaattttttttgttcaagaattatgtaccactcactgccagtgtgtgaagagaaagaagagatttgaccagctgctgtctgtacgttgaccttgaaatcgttatcgcaaagcccatctttctcccaaaggcccatccttttactcttttattttccttttatttttggatattcaaggaaatctcaaaagaaaaaaagaaaaaaacaaatcggttaagttcggttcggtacggtgggaggaacaaataagggtaggaaaatcgaaaccgaggcagtggtccatggggagcgaagcagcagggtgtttgacggctacttaacggagcccaacaaaaaaatcctcttttgccttatcttcctcctcccaaacaaaatctctcctcttctcttctcttctcttctctgcggtcgtcttgtctccaggtatactctcccttgcttctctactttaggttttctccaatcgccaccaatttcatcatccctctcttcttcaatcattaaattggacttgggtttcttactttatcgcattgcttactccccctgattgtatctcctcctcctcgatctctctctcgggttttggtttgtcagatagaaacaaaagattggatatttcagacacaatcgatcaaagaataaactattcgtcgctctcttctcaatcagccgtaaaagtaagtactttgattcctgaatcagatgttgttacttcatttttttcaatttggacccttatgcataaatttcaattctttgcatcgcttgttacaatttttcacattggtttttctttttcttctctgtggacgactcagaatggcagctgatcagaggagaaagcggatgaacagtgccaatgttattggtaccagttctcgggagcattacagagcaaaaaggaaaaagaatgcttcaccagatggtgctttgcgttccggtgatcacatcactcttgaatgggatcgcaaccgaagtaaagtagtctctaagaaggaacaagttggtctaagttttaggcatcttcgtgaatttgttgatgtcgttcctcctaggcgtaatgtcttggcacaagtatgccctgtcccgcatgaaactttccagttggaaaatctgtcggaggtgctttctaatgaggtaatagtacagtgctattcttgtctaccatctgcgtacacctttgaaatgataagttttcatcattttaatctccgcttatttttctttttcctcaggtttggcgatcttgtctgtctgatggtgaaagaaattatctgcggcaatttctccctgagggagttgatgtggagcaagttgtacaagcattgcttgatggcgagaattttcattttggaaatccttctcttgattggttagttacactggactttttggtttggattcctagaatgcactctgtgattgcttgcctataccaaaatagagcttgatttaatgccaacatccgtgatctgccttcgcatcctcattataaaccgtatacttagtgatggtctaatttatgctcagaaattcgactccgttttgaatctaaattgtggtttcaggggaacagctgtctgctccggtaaagctcatccagatcaaatcgtttcacgggaggaatgcctgagggctgataaaaggagatattactcgaatttagagaaatatcatcaagagtatgtgctgttttctctatttaaattataggagcacttgaaatgtttgtccacatgattgtaactcctctttccattgtttctggtagtattatagattatttgcagacattgaaggagaaatgggaaagctgcaaagatccagagaaggatattgtcaaaatgatgtgggggtcagtcctttacaattttctatttaaaaggagaactgttgaagtgtaatgtaaccaagcagatttattgcaaagttatgtagtttggtgaagaaagaatagtcaagctataaccgttgttgattatagtatgagccttacaggaaatggatttatattgagcttgagtctagtgatgcctttatcaagatcttagttcattatttgtaactagtatcaatgaatcacctattgcttacatttatttttcaggagatcaagagggggcaatgcacaagtgaacggtagctgccagggtctgactgctgcctcggggtcgagttcctggaatgaagatgataaaccagacagtagtgataatatgatttctcctgttgtgaggtgtggagaggttcagagaaggtgctgaacacttactcttcacatgtgtacgcaatttctgttagtattcttttccttgccccagacctgcatactaattcttcctatccaacttaggtccaagcgctctggtttagagaaagaaaaaactcaaaataatggtgtaaacgtgggtggaaaagttagaaagaagaacgtgttgccgaaagatagcattcagcaaactgatggtgctaaatacatgtcctatcttaaggttagttattctttggcgtttcttactgtattttagttcatccgaatgttgtcaatcatcaagcagcagtaaactggctatctaaattaattagcttgaaaattattagaatgtcctgattccattagacagctgcgtgcattgtatttggaagtaggaccttatcttggagctgtttggaaaacaaacgattgctatcctctgtggcttttgttgtgttgaatgtgcagttgccgttcatgtaattgatgtgcctattgatcaagcttttaattgcattttatatattcagataagcaagaagcagcatcaaattgtcacaagcatgaagcagtctggtaaaagcattcagtcgagagcacttaatcgaatcttcggtaacatcgatagtttagatgttcaaccatacggagtttttgtggaagaagaacagaagaaactgaacgctcactggtcagtgttctggtgaaacaacctaaatcttcactaaattccttcaataagccattaagtctgatttcctgaaactttggttgtttcatgcaggctgcatcttgttaaagatcttcctgcagcatatgcaatatggaaaaggctacagttacagaaacgagatataatcagctctatgggaagggaactgaaggaaaaatgcaatctgtggatggaggtttgtcttctctattaacatgtattatttattgtttcggtgtacccatgttattaatgactttcttgggtacaggataaacaacaacagtatgctgcagaaaaccctctgcagaagcatgatgttcaatacaataatggagaaagtttgaatcctaatcagagtggtgatatggcaccagatggtgaagattctggaattttcagtcaaatttctggcaagaatcactccccttcaaaggattcttcgtcttatggtgaccaaatcacagattcaggtcgctgcttgctagttggtacacactcctcacaggtttcatcaccagattgtggaaataacatcaatcacgaggatagagaagagaaacaatattcttctccttgttctcccagcaggtgtcacagctttaaccgaacagatgttgaagtaaataattattccagctctatacaaggtcagtctctcccacaggcttcatttcctaatgagccccatgcttcagatctcgaagatgcagatcatgtaggcaagcactgtgcaccagaactagagaatgcttcgttagacgagaggattccgtgtattgctacaagccttggagaagggtcgcagttttgttctggtggagatgtgtggcagccagtgggagggattaggcagtcctacattagccgtcaagcttacacccccagtggtggattgtcaatcatacaccatcctgaaggtgatgaagtagctaaaaactgtttcatagacctggaatcgaacatgcctgaagaagttgataggaggaagatgttgcagcgaaatgcaaacaacagttttggttctttccctaacaacaaccaaaatgaaatactacagtctttgtttaatggccagggtatggtatctcgcaccactgagcagcttcatcctcttctcaaagtcccacttaacgaggagcataaacaaattatgggcattggttttcagcaggaaggaaacaacaatatgatggtgggcaatcaattttctggtcagttccaggatcagattcctgcatctcatgcatttccccaggaccagcagagacaggttgacgcctttggccaaggaagcatgtcagacaacatttaccgtggattcttgatgcagcggccagactggaaccccaattgtactcagataggagttaccgcacagcccctgttgagcaccgggcctttgttaaatcagaattggcaatttaggagcatgtgggcaaacacaaacggtgtcggatgtacaagccaaggcagtcaaaccgggaccgagagagatccgagccttctcagagttgctaataacgcagagcaaataattcataggggaagtagttcagatcaaagcttattctctgttctctctcaatgcagtcaactgcgcccatccagatctgctttcgagccagaaagttcaagtcatcaaatggttgcgtctggtaactacggaatgctgatggggggaggttcaactcaagtaagcagcaatttggttcagcctgcgaacccgcttgattacttgagcggtagcaaccctacaacatctttgatgccagatgatgtagtgtggatgaaccagagccgccagaactctggtctccatgacccactaggcaagttgtatccaaggtcatggaatccgtaaccatgtttctaaagttttgtgttgcagaagcatctggtcatctttaagatatacaaaacccaacatgggtttcttagttttcatttctgtgcctgtacatagaaagttacagaggaactttggttttgtacatatttaggttttgagatatggattaggaagaaagtgaggatactccagctaccttttttgttttttacattttgtcatttcaccttctctctcaaattagtgaattccatttcgcataaaaattgttggacaataccaatcaacgtcttgattttagcaaagttacaaaaccaatcaaacgtgcgacaaaaggtactgtctcacagatgttgtggacctttccacgccattactctcggctctataaattgtggtgatgccttcacctaataaaagacacggaaaattattgaaagaaagattcacgtgactgacaaaaagaagagagaattgcatttggtaaatgaaagtgttaccaaacgaaccttaaaccttgatcgatttgtgatctcacgcacacgaacctctctcactctcaaaacaagaaacactcaaagaagaaagtgacacagaggatttacgagttcagctactcgggatgagtaagcctacgtctcggctggattctgaccagcaattcactatatcaatggagtttctcaagcttttacacacaccgttacaagctcaagatcagaggaagaagaagaagatacaatgtttgttacagaggattgaacagaaaagaagaagacgagtcctttttatagtcaacgtcaaaccctctaaaccaagtcgagtcttcagcttcaatgattaaaccgaactcaatccttccttctttcaataaccaaaccggtttagctcctccaatccaaattcaaactcagctcaagtcaatagtcgacattagactttagcaacttaggaattggatcataactccaacagaaagaaccattccaaatcataaagatagatcaatattgttatgtctccatattcaactgtccctatcttcctgtctgcatttcatttcaacggctaccaatatctacgtacagtgatgtcttcactgcaaacaccttgaacgaagagagatgcaaagagttgaagatgggtacttacctatctgttgctgctgcctcggcgaatccccatcatttcatccaccttgtctataaacctgccagtggctctgctaggacttgtactggttaccaagatgttttgttggggttacttgatattttctttgatgcttctctgtagattttgtgtactgcacttgaatgcaacaagatagagataattcttctagcaatttctttcatttcaggcactgttgtcaccaatacaaatgacttatccatttataacaaatttatcaagactatctctgatcggtatggaagaaaaccgatcatactcgtgggaataatctccatgttagtatcattaaacataatttggttattgtatccatgttaatctgtaatatgactgattaggtggttattgcagtgccatttttaacgctctttttggcttgagcgttaacttttggatgaaaattagcatgaggtttctccttgggaattggcctctcatgtcatctatcattgtgtattgtattctgtgtctacatgagacagcatactccgaggtaacctagtctttgcacagaaaattgtacctgttaaagtctttgcaactgctttgtcttgcccgaacaaataaatcttcatcacttggaatctggctatgcagatatttgcactatgggccaacagtccaagaagatatggaggtctgagctactagaccaatgatgtggctacagttcttactatctcaggtatgcagaacatcctcgctcttgatgtcttatgttttagtaataagaacttttgaaaatgatgactagactctgctttgatttgaatctgtttgagaattaagtaatcatgagtaagcagaattcttacctatgaattcgagactgttaacacttcttttttaggtctcggcatattcttctttcaagtttttgtttatcctttagccaagagactgctaggacctgtgctggtaactcattttgctgaggtcagttgatagttgttttgatacttctctgcatatttaatgatagagatcactcttctgacattttctttcatttcaggcactgatgagtgatgataccaatacaagcggcttatccattatagcaaatttatcaaatctcagtctaagcttgatgttaagttgtccatcaatcctcctaaatgtgctaagtgtaagttcactcggcacatttaggaggattaatgcccaatttcaacattaagcttaaacttagataactcatttgtaatggtaagttgtgagcagtacagaacagatcctagcagtctttgtgtctataggtgtctgcaataaccggcttgttgactcaacaaaatatagctgtggtaaacaaacattcgttaatcttccttttgtaaacaatggtccattacttatgcttaaacacaaaactgaaaacgtatgcagaatctcatatggtgttcctcgtcctgaatgtgatagtcctggtctaagtagctctcaggttcaagccatttctaaccacgtctcaaaggtgaaatctgacaaggttattgactacatcaagagggaatacaacatcagtcacgtcaccattcagattgaacgccaacgatgcttttgagggggcttgtatatgaatgaatgatcaaatatcaaaatcctatttctctacatatgtttttattgcttacctatttccacttttagtttttgtttgaatgagacttttattttattttagactttaacctaagaaaaattagattacgtattcactactctactgataaacaattaaaggtaaagaaatagtaaattcgtttttgttacaaaatggaaataactaaccaacaaggaaataaagaggaaaaattaagtaagagatgtgagaggaggagacgcaacaaaagaacttcccctccgagaagaatggtgaacctacaaatgaacacctaggtcatttttacaaaacaaaaaaccatgaagctttcttgttttgttttttcattttctggttccttaaaattaccatttcaaaggcatctacaagttcttttcttggtcagaaataaacacaagattaagatgggggagaagaaaaaagaggtgatcagattagagagagaagctgtgatcccaattctaaagcacaaactcatcactgccttgtcccttcactttggtctcatttttctacttttcattgtttctctgtttctacattcctctgtttctcctctttaaaacaattctacattctgatcgttcaccagaggacaaatgggagagagaagagttcctgagattttgccaaagagtggaatgcaccattagagcttggtaccaccttcactttgaggatcttatggtatattcatctcaccaatctatcttcttcaattctttcttgagatcatattagtaaaagagcttgtgtttgtagcaactgtattcactcttcgagcccgtccgtggtgcacacaggcttaaccaacagaatttatctactcgtgaaatcgatgctcttgaagatcagtttcttcttcatttattccaggttctatctttgtttccactccattcttttctctaaatgtaccgatgaaatggaaacgatttacatcttctaggtcatggagaagagcaacttcaaagtgataactaatgaagaaatacaagtagccctctctgctcaatatcgtctcaatcttcctattgttgttaatgaagctaaggtactacctacaacaatataacaatcttcaacaagatttttggaaatgaaatcttcataagttctatattgatatttgatgtagcttgatacaaagttgttaacaagatacttctccaagtttccgcgtgatgatcttcctcatttcgctgataaggtaactgctctgttcgtccactatgaatccattaaattgctttcctctaacaaatatataataatctgatatatgtctgtcttgtcccttgaagtatataatattcagacgtgggtttgggatagatcatatgaaagcttacttcttcctagccaaaatagatacaatccttgtccgtatttggcactttctactcaccatcacatggtcagccacctcgcactcttctattgctgtgtgtgtatatatatatatacctcttgaatgcaatcaaaatgcaaaactttagactaagaaattctctgtttcagtttaaaaagacttgtttatgggaagaagaatgatgtagggttgtcagagcagattgatattagtattgaaacagagaaggatagtttatacatcgaaagaatccgcatagagaagctcaagctcaggttctcaactaatctttatctaggcttagctgttacaattatatcattgacttgtctctttgtttctgatcactgattcagtctctccaacttgatgaaaaagataaccatccaagagccaacctttgagagaatcattgtagtatacaggtacgaaagcagagcagtagtgtgatatttagagggttgtgagtttttgatctctcatcttgggtttggattctctctcacacacacaggagagtctcagggaagaaggaatcagaaaggaacatatatgtgaaacactttaagaccattccaatggctgatatggaaattgtgcttgtgagcatccattaaaccaacactttgagataaaatgtatcttagtgattagagattaactgatttctcataactacacagccagagaagaagaatccaggtcttacgccactggactgggtcaagtttcttgtctctgctgccattggactggtcagttctgttacattattcaaaagacagtgagaaatgtggtttatcaactctgcttttacaggtcacagtggtaagttcagtgagcctcaaaaaagctgatatcagagtcattgcagccatacttagcacagtcgttgcctactgcgttaaaacatatttcacgtaatctacactcatattaacgatacctttatccacttttgtcactatatcctgaatatctctaaagtatatgtaaatacaggtttcaaagaaacttggtagattatcaaagtcttataacaagatctgtgtatgataagcagctagacagtggaagaggtactctgcttcacttgtgtgatgaagtcatccaacaagaggtgctaattatcccctgttattttttatgtcgtattctctttctttttttgcttacaaactgataaaatgtaggttaaagaggtcatcatttcgtttttcatgctgatcaagaaagggtgtcccacaagcaaggtatgtgtactctgcaaatttcttatatgaatatacgaaagccgcatacatgtagaggctgactcaaaagatgcaatgaaaggaggagcttgacatgaaaagtgaagcattcatcaaagaagaatttaacgaaagctgcaatttcgacgtggatgatgctatcacaaagcttgagaagcttggacttgtatctcgtgtgagtcccttgctatacctctcttctaatcagaatgttcctctgaatatgttcagttaagtaaatattgtgagggctggtcaggattcagaagacaagtatagatgcgtggaaatgaaggaagcaaacgagataatggggacaactacggaagagatggtactcaaggcaagacaaggtggagaatatgaagacgaggatacaacagcgacagagcctcaaatgaatcctcaagataaacttacagcaaaggaggaacgttttcaatctcggtatgatgagtttgagaccttgtggatgtaacaaagatttgatgtcattcaagacccatagatttaatattgtaaaaagacacaaaaaagagagtacaaaaacagtcgaatagacctgtccagcacatatcacatatcacatcaaatgaattcttccttaattattgcgtaaacatataatgattatattatataaaacataagacaggattaaagttttgcgtaggtaggtaggcagatagaaggcaagcgttctgtttagagaggaacgctgtgcaagacgactgtctcaacagtgagacctggtccgaaaccaaacaagacaccccactccaacccttctcctgtcgtggccacaccatccttagctgacttcctcctcatctcgtctagtatgaagagaacgcacgcgctcgacatgtttccatactcgctcaacacgtgacgtgtcgccctcatcttctcttcctttagtcctagctttatctccacctggtctaggatcgctggacctccagggtgggctatccagaagagggagttccagtcacttatccccaaaggtttaaacgcttcgtctagactcttcacaatgttcttggagatgaggccgggaacatccttgaggagatggaaggtgagaccaacttccctcaaatgtccgtctatggcaccatcagagtctggaaggatggtctgagcggcagacaccatctcaaagatgggtttctctccgacagatgtgtcagggtccgaccccacaatgagtgcggcggcgccatcactgaaaagagcctgaccgacgagggagtcaaggtgggtgtcagagggaccacggaaggtaacggctgtgatctcagagcagacaacgaggacacgtgctccacgattgttctcggcgagatccttagcgatacggaggacagtaccgccggcgaagcaaccttgctggtacatcatgagacgcttgacggaaggacggagaccaagaagcttggtgagctggtagtcagcaccaggcatgtcgacgccggaggtagtgcagaagacgacatgagtgatctttgacttgggctggccccactccttgatggccttcactgccgcttctttgcctagcttagggacttcgaccaccacgatgtcctgtctggtgtccagagaaggagccatgtaagcacacatgtgtgggttttccttgaggaattcctccgtcagatgcatgtgacgtttccgaattgtcgacttgtcgcctgtgaatagtaaatacttgttagctaaactatgtgaatgaagatatatgccaaaggaaatgaaagtagaagttaataagacgtacacatgcgcttgaacttctccttgaggtcggtcatgtgttcactgttggtgatgcggaagtagtagtcaggatactccgcctgaagcacatggttctcagggttagcagtgccaatagccaagatgcctgcaggtccatcagctctctgagcctgtctgatctcatccaaagaagaagcaccagccatcaccattatagtatacaccaacttgggtttattagagtttgatgttgctgttgtgtactaaacaagttaggtgtatttggaaatataccggagagtgagagcttatataacaaactgacacgggaaaaagaagatgagagtgtggtaggttagatggacgggcagatgaagatctacgtgtctagttgttagcccccttttctgtggttcttcttgcttcccttttttttcgttacttaccaagattgaatggtgggttttaaatcttttgattgatttatatatttgcaacaacaacaactcatattaatttctactatatgcctatttattatatatatacaggtgtatactgtatatatatcttaagatatttattatgagtaagatatatatttattatgtcttaagatacgtatcgcttgtgataaaagaataaaaattaatacgtatacaccaacaaagggctttgttgtatagtttcttcaccatacaggaggtttcacttcccagttcttacacgtgcatacttaactccatcattagctcctactaatctaatattcattcttcatttttaccttatgatcctataactaggcccaaacaaaaaaaaagtcctataactaacgactaattaagtagtgttacattaggtacgcctcgttttctttctctcaccccccatcatagtgatatctgtctgaaaatctgccctatttgcgctttccaacggaagatgccaagatgcatttattttgtttttcattaaccatcaaaataaaattactaatgttcatcacattctttttggtatgtgtattccactcgtttttattgttttttgttttatcgacctaacaatagttttaattggaaaaattataccataggcccacatgggttatgaaccatatgtgccgggcccattatgacagagaaatcacaaaacccgaatgtgtgaaaattcaattgcaaggaaggactccaaaccgttttcttttaatccggttgacccggcctaccaaaaccgccaaatccattattgacggttaaatatgataggcatgcgaggcgtagacgccgtagagtcatatccgcagaagcctatagatgttatttggtcagctgtagtttttaaccgatcagaacgacatggttctcatattatacacaacacacttgtttcgttaatctgcttaaagtcttcaggcccattaagcccgtcccatattcagcatgttttgttcagtcatagctaaaaataaattatgtgggcttaaaaaagatgacctggcccatattaacatcccgagaaggagaatgttcgacgaatgcttaacggcacaatgcagaccggagattgcttccgatgccgtcaggctggccactggatcaacgattgtcctctcaaatcctacaccgatgatcctccaccggcgatccaatgcccatgcggcggaggtttctgtgaaatcaaggtcgcgaatactcgagaaaatcccggaaggaagttctacaagtgtccaacggttcgtactcgctttctttactgattcttcatctcctgcaaaattcgcgaggaaatttgaatttgttactgacgacatttgaaattcgcaggctcagaattgctgtttcttcaaatggtgtgacaaagtaaccgacgaagatatcaaattccgtcctgccttcaccatcccgatttgttcctgcggtgctggaccttgccggagagttaaagacgtttccggtagagcttacctgatatgctgcatcaaaaaggttttgactcgttcgcaagtttaaagctcatagttgataattctggttaacattgttttaagaaattgtgttagggatttggagcttgtggattcttcaagtgggaagatgttgagatgattcctagttgtgatgttatggatgagattgatttttgggttgaagctgatcaaattttgagtgatgttgagagtagcttacaggctcgtggtggtgttataccggaaattgcaaaccaaatggcatcagagaaagaatgtcaagcttctgttagtggtatagaggatgattgtgtagtagaatgtcaagattctgttagtgcagaggatgattctacattagaaaatttggattccatttcaatgtctgtttctgatgtacactctactgctctgaaccaaggtacttcacttatggacaattttgattctattaaagtattatgcttggaatacacttttttgttctttgaactcttatgctatttactaggtatctctctgtttgatccggttacgagcgaacctgaagagccatggaaaaagactcagaatggtgatcagccaacaaatagtgctctttctaagttgagtgtggatgaagcgatgagtgatttgatcagagatacggtctctagtggttctgttgtgatacatggaaggacaaaccatgagcaacctgaaattgatggagctgagtggtcattcccttgcttgcagaacctaattgatcagtacaactcagagaagcttcaattggagagtatttcagggaaacatgtacaaatgttgagtgaatttatggcttcgtacaggcgactaaggttacttcatgagaaaactagtcatctcaggaaaactttacttgaaacagagaaggagatggtttgttgtgaagctgagacattaaaatttggagcaagttgcagggaagtggctggagaaatggctgagtctcagaagaggatgcaggaaactgcagataaactaggaaaagaagtagaagtgtttaagcaaaatgagtttgttggtctaaagagaagaagaacctgagcatttgcatattagtgcccttgcaagtgttggaaggtaattatcttttattttaactcggcaattccaacattttacacttcttcatcggataacgtgtatagactagttagattaatggattaattgataggtgactgcaaagctcgtgcccctaaattttctcccatgtcaccttcaggtttagatgagccaaaagcagacatactttgtttttaacttttgaatgtggttgagaattatgaatctacttagtgcgctcatcacatggtcgtttgattaaaagagtaattagatttaagtaagacaaaagatgtttgtgttaggcaataattagaaaaaggattaattatgttaagcgtccaagaaaatgcctttccacgttgggcgcacatgccttctcttctttcttccctttttttttctttctagtttctactaaactaacacaattagaggcccaaaccctcagataattgatcatcaaattatttgcatcaagaatagttcgagatgagttatagagaattgctagtttcgtcaatttgagactcggaccatagaacaaaacatccttccaatttccataaaactgatatagttaagaattgggatatgcatgtgttcacttgtcagcttgtgtatatctccagttgttcgaggacgttacatacaacgttcgagaatggtattgcaaatgccgaagtcacttaagagtagtgatggtagtgaaaaaggcggtgatctgactgggagggcttaattagggctcttgacctaaatcctaattaagtaggattcgtataaatattttgtccattgatacattttatatagttcttacatgtactaatattccaccgtagaccatgagaacgtagtactaattaagtaaagaaacctgtggtctgtggatatcggagaataataagaggcgatagagaatagaagcggaacgtaaatgtaaacaagattcaatgcatcaagattggactttagaatataaaattaaacgagaaaaatgagagttggtcaaaagtgagggaacataaattatagggcttgtttactccaatgaaattaagattaaagataaaatttcaaaagcataaaagattgctcacatgcaacccaaattcctttgttctcaataatgcatgtttgttttaaaatagtatatagcaaatgaatatgaatggagtattttggtcagaatatatataatttgagaaactgaatttaggaagagacgatatcatattcatagccaagaggacaaacacataaatgattaaattataaggaaatagatagatgccttgggattagaaagtgggagatgaaagaaaaagggtgtggcaatattcattgaagttgcagcctataaaattgggagcacatgcactacccctatattgtttttgactaatctctaattaattaacgctaacacacattgtgattattgtacatgtagacaaatgggacgtatatattataaaagattaagaaatgatacgatccactatcaccgtccataacgttggtcgtgtagccaaacataaacataaatggtctttggtcttcctctgacacaaaataagatcgtcttagaaaggctaccacttgcttccttagatactcatatcaaatatcataatctctctctaatgcatgagacttcaactcttttaattttgtgttggtcaaaagtcaaaaccctactctgacgtattagtaatacaagattaatacacatataatgatataatagctgcttaagtaatgactttcctcctcataatttagtcgactaccttccatcatgcggccatcattgcacccttctttaccaattattaactttaaccaaaacaccaaactcattgtttttttatgtgttgtatgattgataagacggaaagtgtttgcgttttcatatatgcaataatcagggtttgcttctctttttcatgttaaattcgcagttcatgcacattccatcattcaatatggaccatcacatgcagtagtatttggacgcgttataccaaatatattctctgaattgaatagtttatctattacgttatctctcgttaatttgttaatcaattcggacatgttattattattagactcgggacactggtatctaaggtaacatgctaatcatggctcttatcattcctaatccctttgtttcagcttattattgttgatgaatgatgattatgtgtatctatcgatatttatatataatatgctaacggattgtatttgtttaagttatttttgataatgatcctaatttctttgttattctttcactctcttctctaatatatacatcacctaacaaaaagaagctcttatgtattactattgtaattgattgagttgatatattagcacttgtatgattaaaggcagtcggaactcagcattatattttagcagaattaaccatgtataaaaatgaaatcactagtgtagaacaaccttgagaaatgcatgaaacatgctatcaagtggtaacttaatcataattatatacttttgattgactgataattgatatatcatgggccacaattaactcaacacagagccatttttaaatgttgtttcaattggaataaaaagatatataaaagaattatacacaatgaaaaaagagagagaaaaaggaaaggtatagctcttatataaaagggttgtggtaagggatacttttccaagaccaacacacattccctctcttccttcaactagaaaaaagatagatatatcggacatttattgatctgtgtatgcataaaggtatagtatcattattagaaagatgaacacaacatcatcaaagagcaagaagaagcaagacgatcaggttggtacaaggtttcttggggtgagaagaaggccttggggaagatacgcagctgagattagagacccaactacgaaggagcgtcactggcttggcactttcgatacggcggaagaagctgccttggcctacgatagagctgctcggtccatgcgtggcacacgtgccagaaccaactttgtttactcagacatgcctccttcctcatccgtcacctccattgtttctcctgacgatcctcctcctcctccacctcctcctgctcctcctagcaatgatcctgtcgattacatgatgatgtttaaccaatactcatccactgactcgccaatgcttcagcctcattgtgatcaagtggacagttacatgtttggtggctctcaatcttcgaattcttattgctattctaatgacagtagtaatgagctgcctcctctcccgagcgacttgtcgaattcgtgttatagccaaccacagtggacctggaccggtgacgactactcgtctgagtacgtacatagtccaatgttcagcagaatgcctccggtttctgactctttccctcaaggtttcaactactttggctcctaattctttctcatcgtccatatttaataccttcctcatttgtaccttttccttcttcttcttttttgggtttatctatgtttcgccgtccttgatctctgcctatgtgatcaaagtgactgtttgtcattagtttttcaataacaagttatcatttgtatcttgattaatgaaaacaagaaactgctcttgtgttactttcaaatacatatttaatatatatgggccttggacatcaaaagcccattattcgatgggttattagttggcatgacatactttgtatagcccaaacctctgtgtgtttttcttatggttgaacgagaactatattctaggatggaataacaatttgttattctacttctgtggttttggtatttgcttacgtaatgtaaaattatttcatatttgatgggttcttctggtaacttacctgttgaggatggtcaaacggtggtagtaggtttgactggtgaaccatgtctacctatcttaaaagctggtcaccaaacataaaaattaaacaagtacaaaagtgttttagtaacactcaaaatagtaaactaaggtgatatgatgatggggatgaagtttttctctttttacgttgtacttcttctagttgcagctagctcggggatgcggataaatgggcagagcgtttcgtgtctaaaccaacttgctccatgcctaaattacctgaatgggaccaaggaagtacctcaagtttgttgtaatcctctcaaatcagtgataaggaacaatccagagtgcttgtgccgtatgattagtaaccgttggagttctcaagccgagcgagctggcatcgatgtcaatgatgctcaaatgttgcctgctcgatgtggagaacatgtcaatcccattgcttgcttgactcgtacacactcaaaccttagttctttctttttttttcaatcaaaagatgtttcatgaatattttgtgttcttgcaggttctagaggaggatctacaaactcagaccgaagttcctccattggcaacaccttttctcagtcctattggatgacaacattagctattgcagccactgttttgtcatattgccatcacataattagctgaatctctcattgtctatagcagctttgctttgctttgcttaattaagacggttgattctttgtttttttaatgctctattagttaattatgattattggtcgtcaccaacacattgtatgtaccacttcgtccccataaatagtctaaatccatttctattagttaagaatgtgaaacatcatgctcatgtagtcatgttgcaacaaatcaagcaccaatcaatctcttcctgacaaatacaatattgaattaccaactaccgggaaaatccattataaaaccggtttaaatagtgcaattaattgtcaaataaccgaaaaagtcagctggtttaacaatactaaccggtcaacttaaaggagcagttgaccagatcgtcctctctattacctctcttaagcagatcggagaaagtttatcagtcatacaaatcccgaccaacaacaacaaaaccctaaaatcaagcttcgaaaatgggagagatgatgtacaagctcttcgcttcagcgtcactactaaccctaggattgtatcatctcatctgcactttcttccatctccttaaatctccccaatcctacgccgcgaaacccttttacccttttccacgtctctcctccgtcaccggaaacaaccaccacaatcacaaccgcctccaaaatctaccactgttcatcctcatactctctctattcgtcgctttccttcacgaaaccctaatctccttctactccgatcctctcgtcaaaggaagtactcctgttcaccgattctcatctctcaattccgccgccgtgttcttcctcttcctcatcatcgccatttactatctcctctccgattcaacctcgttaatccctctcccttccgatctcctcttcgcactcgcctccgttggtttcttcctccattactccgccgcgtcttcatcagctgcaattcaaacatctgatcttcaagctcattgtgattccctctctgctcgtatctccgcgttatgctctctcctctgtttgcttctcgcttgccgttcaagactctttattgctgacgctgctctcgctgctgccatttgtcttcaaggtctctggcagcttcagactggactctctctctacgttgatgggtttattcctgagggatgtcatcgtcttcttgatgttcaaagcggtgttgaaggatcaacccaatgtgatattcaggactctaagctaagagctgtttctatattggatctaatgttcactgtacacgtcgtgcttgtggttatcctcatctttgtgacttacacgatggtggtgatggcggccggagtgagaagaactggttcttatgaagctttgccgactaacaatgctgattctaatcacattcagatgaagtcgttgacaggcactcaggcttgaaaccttatcaaatcctatcgctttgccttttttgtaagctctcagtcactcttttggaacttgttgctgctttgacaagtctttatcccattttgtttgttcaatatataatgttcaatcctcgtatagatgaaagatggtgatgacttgcttaatagaagaatgatggtatagtccttgttgattgagaatagcatggttaattgtcactttagctgatgtttatgttccatttggtttctggaaatgttgtttccatcatgttacatttataagtttgtcttggttatcacaaactcagcctgccctgtggtggtgaaagacaaagatgatgatatggatgaagataaaactttcagattgcacaagagaatatgaaaaagtattaacacaagccttatagcttggcaatctcatgtcaaataaggaaaagaagaggaacccaaggtatgtttctcatctaccttctttgacatgggactgcctaagctaaaggcttgccatgttatcacatccttctttcatttcgtcgcaaccactttatccttatcatcttctttgtctttcaccgcagtctgagttagctttaacgaaaaaacaaagatatgttgaaatgaattcaaacattggttgcaatttaagatgttacagactttggtactcttgttaattacttgaaaagatacatgttataatgctaacaataggtttgatttgtttgttgaggtagatgttgattgattattaactcaaaactaaactaacagtgagatttgcatttggaagcctaacgacatgaagctgtcttgaagattggatcttcttattatgggcccaagcactggcccagatatgtcttgtactatttgtatgctttgatagcttgaaatttggagtagtgcgcgtggggagagggaatggtgaaaccttagtggttaagttatgaggaaaatgataaaaggataaaacaatcaaatgcagcttgaaacggccataacataaagtaccttatggtggtgcgaatatttttgtgtttctttcactcttttattgctgaaagctacgacacttgtcttaatatattgtttccgcaagtcacatgatctactttttatttaacgtctagaaacgccgagatatatgatgattagtatatcacgtctatgcaaattgttagttcgtgtttggccaaaagatatcgagacatgtctgaagaaccgagtctggttttgagatatttcttcaagcattactatacaatagaaaaaggagacacgcgaatatgataatagcaaaaggcataaaaaggcgaaaattaaagaaaaacgtaaagtgatttggcctcaatcaacgggaacgtatcttaattttagaggttcttcttttacttttgagacgagagagtttgcgtctttgcgagctgctttggttgactaaacattatcatattgaaaaccaaaatacaacggaggaatatttgtcacagtttcactttcacattgtttccttaacgtttaatcaaccttgttcaaaatttctatagttgtaatcatcattgtttacaaaattttcgttcaaagatgattttaaataaaattgtgaaagaaaaccttttctgaaataaggattggatgatagtgttaaaagaaaaatatgaactgaggcaaaaagaggagtggtccccggaagattgtgaaatgtgtcatctaaaccagccagacgtagtcacgtgttctctctagctttatgaacttccttagccagcaccatcattgtgattgtagtatatatgtaaccctaccttcatctctcccattttccattctccatatagactcctttacaatatacaaaacctatccaaaagcgaagaagccaagcaaacatattataaaaatgaagaaggcgtcagatttcgtgaagcagataataaacatgttgacttgtctagcaaaggacaagacgaaggagcttaagaggaagacaagagccttcaagacacgtctcgtaatattttcgctgctccacaacagacacatggtggtgggttctttgtctcacaagctcaagagcaatcaaacatcaaaaaagatagatcatgataacaaggatgttcaagattatcatgataaaaacatggtggttgtgtatagccaaaacgttaacgccatgtctagcactcctgtctctccgcatgtacaatatcaatatacagaggaggaagatgatgaagaaggggaagaagaaaagtatccagacttgagacactcgttgtttgaggcagaaggttcggtgatagagatggtgaagcactccaaggaggacaatggagaagagtttcggttggaagacgagatcgacaaagtggctgatctttttattacccgcttccatagacagatgtggttacagaagcaactgtctctcgagagtccagatacaccctccccaattcattcttaatatacatgtatttgacgctcctccttgttttttgtttcggggtgaaggactcaatgatccatacagatttttgttttacgtagtgaaaaatatgaaaacaggacatatttattaatttcttctatcaatctgtacctaacaacgtccgttcttccttcaagctccttgacgaaataaaatacagttttttttcttcatgttattgttgtttgtgtgattaattgagcacttggcgaccattaattcttcgtttccatggaacagcatacacggactcatatctttacgaattgtgcaggcctgttttcaagttcattaaagcctattaaggcccatttactgatataataattaattcagggtccgtcgaaaatagatatttaattcaggggccgttcttttgttccgtttaacgacatcgtttcgtctttcccctccttctcccgttctccggtcctcatgcctgccggaatcagctggttagtagaactctctctctcgctgggatggacttgctagttgctaaggatttttttcttctttttgatgatgattggttgataattctagctggtttctctgaataatctagttttatatgtacatctttatattcagtttaaaatttttgcggattaatttagagttatctgtttagttgaggggacaagggtttatctttaaattttgttattgatgtttttgtatgcttataaacttgtaatggttttggttctcgataatgtgcttgaacagtattgctctctgtgtttctgtccatggtgaatcgcacatgcttcttcaagtcatgtgatgatgtctctgttgtagccatcctcttgaaacttgaacctttttggtttgttttttgccaaatctatctttactgagttattattccaattatcaggtcggtttggactctcaatggagagtgtggaagcttccaagcaaatatggtggtatctggtgtcaaatagtgtttctttattatcttctgcccatagatcttaaacgtaaaagcatccaaagatgcattaattaacgataacatggggatgaggtccatgtgcctctgcaacacctcttatgcaatcacattctcttgcttccctaagttactgctgccaacattgaaagaaacacaaagtgcagtgattttaataatcaaatattatgttaagacgtaagagcaagctgattgatggctataaatagaaatgtccgcatagtgtttgtttggtgtgatcagagtgagaatgggtcgtctttcatcaactctctgcctcacgtttctgattttggccacagttgcatttggtgtacctcctaaaaagtccattaatgttccatttgggaggaactacttccccacttgggcttttgatcacattaagtatctcaatggtggttctgaagtgcatcttgtcctcgacaagtacactggtgagtttctctgccttgtatatttctctgacacagttttattatctaagcccttcttctgactgttcttgttcaatgagcaaaggcactggctttcagtccaaaggttcctacttgtttggccacttcagtatgcacataaagatggttgctggtgactctgctggaactgtgaccgccttctatgtaagcgaaagtcgttactcaatcattcggaacatcttcttaagtgctaactgaaagttgtatcttgctttttcgtgcagttgtcgtcccagaactcagaacatgatgagatagactttgagtttctagggaacagaactggccagccttacattttgcagactaacgtgtttacaggaggcgccggaaaccgtgagcaacgaatcaacctctggtttgatccttccaaggactatcattcctattcagttctctggaacatgtatcagattgtgtaagttcgcattcctcaagtattatcctttactccacatttcacagctaagtgtatcaatgtatatgtaacacaaatacaggttctttgtggatgatgtgccgatacgagtgttcaagaatagcaaagacgttggggtgaagtttccattcaaccaaccaatgaagatatattcgagtctgtggaatgcagacgactgggccacaaggggagggttggagaagaccaactgggaaaaagctccttttgtcgcgtcctacagaggcttccacgtcgatggatgtgaagcttcagtaaatgctaagttctgcgagacgcagggaaaacgttggtgggatcagaaagagttccaggacttggacgctaaccagtacaagcgtctcaaatgggttcgtaagagatacaccatctacaactattgcactgaccgcgtccgatttcccgtacctcctccagagtgccgcagagaccgcgacatatagtgatttttcagattttatctagattgttttcccactgtatgacaatatttcctacttttgtaatgtttattcttcttattacaatttaatctagaaaagtttggattgtttacaaactaaaagtaacttaaagtgaaaccgagaatatgaattcataagtttccctgactggttccaacttccaacctccattgtcaatttagcatgatcaagatcatatacactaaaactattcattaaatcaattcattatagatacgttttaaggaatagttaagacaaaagtgtgaaaatactaaaacatgaatctaacttctttttttaacatctgcattgcattataactaatcaaaatgttttacatagagagtttgaacaatgcatcttgaaacataaaagtgatacaacaaagtcagaattggtttcagattgttctttagctaataatagaatgaatgaatgaaaactagattacttttttgattttaggattctttttgcagaatgattttgaagtttcaactattaagacttttatctttggggtcaaagttttggtttaggtgcagaatattggaatttgaagttcagactttttttattactttgaagaaatttacattattttttcaaaactttagactaaattggattaatttctcccaaactattcgatccggtataaaaccaaattcgcctattcataattaagaagaattcgttattcgtcatctgtcgtcgtcttcaagtaatcggagtttgacttgctaatggctcctcctccggcgaagatgcaagagatccaccaattcctctcctccgcactcacccagcgtggcccttccgctcttccatacgccgagaacaccaagtcgctaatccgtcaacacctcctcaacctaatctcttcctacacttccctcgaccccaaaacggcaacgtttacacacaacgatggccgatccgtgattctcctccaagccgacggtacaatcccgatgcctttccaaggcgtcagctacaacatccccgtcgtgatctggctcctcgaatcttaccctcagtatcctccttgcgtttacgtgaatcctacacgcgacatgatcatcaaacgacctcactctaatgtctctccttctggactcgtctctcttccttacctccaaaattggatttaccctagctccaatctcgtagatctcgcctctcatctcagcgccgccttctctcgtgatccgccgctttactctcagcgccgtcctcctccgcaaccgtctccttcgatcggatctggatactcgagacctcttcctcctcgccagacggatgatgcggcagaggtatataagaagaacgctatcaacaggattgttgagatggttcatggtgatattgtattgatgaggagtgctagagaagtggagacggaaggattactgagtttacaatctgatcttaagagaagagaagaggagatcaacaatggttttaaggagatggtgattgagaaagagaccttagagcagcaactacaggttattgctatgaatactgatgttcttggctcttggattagggagaatcaagggaaagccaaggatttgctagtggatttggatgttgatgattcatttgaatgcattgactcattgtctaagcagatgttagagtgtactgcattggatttagctattgaagatgttgtttattccatggataaatcgtttagagatggttcgttaccgtttgatcagtatttgaggaatgtgaggttgttgtcgagggagcagttcttccaccgagccacggctgagaaagttagggagatacagatggatgctcaggttgcttccattgcagctaggttgcattcgtgatacttaagcaaagattttttggtgattactatttctattcgatttttattgggtataggaatatacactatatacaccagtgcatatacaaagttgaattgatcacgttttgggtttatcatcatcttctctgtcagtatttttatctaatgagaatcattttgtttggaattttgtttttccttctgcaattcccatctctcataacttctcatttggtctctctataagaaaatagttcgagttgtggtgaaactcatgacaatccactcaaaagtatttctccactatttagctttgctccaatttctggaggcttcactattgacaaaagaaaatgaagcacttgcaattctcttaataggatgataagtgaataaacagagtataaactcatgaaaatccactcaaatttctaaaatatgaaatgagtccaaacgtatagtatataatgatacaacatgcaaaatcacttgaaaggaaaatgggaaaacaaaaacacgaaaagcacatcaaagtaggaaaagtttcggatttaggtggtaagctccatgatggcagagactatatctccattagcgagcttgagcgccttaactgcccttggcttagacactcctgcttgggtcatcacaagctcgatgtcctttggctctactccctcctcgtctacctcttcatcatcatcatcttgaacagcagctgcagttgcagcactcgatgtttctcctgtgaaatcacgttgctgaggttgggagccttgaactgctctgcggcttgactctgcagctgcgagctcaaatcctctatcttggcctcaccaaagatcacatatgtatctgaagctggactcttgaacacatcaggttttgatatcacaaacaagatctgcaattttcaatccacattctatcaatgaatttggaaacataggaaacaattaacacaagagagatttaattttctgaagagcacaaacattcttgctctttttgacggtgacacggctaacaccagtgattggtttcatcccaagcttcaacatagctttacgactctttttctcacttctgctttgctttgaccggccaccggcctccccatcatgtcctggttaaacaaatcacagcactgtcatgacgtagctcatcagaaatgataccgaattcctcattctatatttaccaaaccaagtatcaaactttcaccagtcagggtgacataaaagcaagagaatggattaaacagataggctcattacaacaaagtttcagattatcaacaaatagacatctctgttactcttctacacgcaaagtaaattcaacttagctgcccgagtagtaaaaatgaatggaaccaaccacatcaaaaatttgaaacatgtagcattttggcaaatgaacttatagaatgcggacaagatataattgaagagaattgaaagaggcaaaaacaaaaaaaaacttaccctccgcctcgtcatcgtcctcggaatcatcctcatcattgtcatcatcatcttcaacctcaggtttatcaagctacaattccagatcagaagaaattagatatttatcgacttaagcaatgcgacaatcgacatatgttcatggagttcgacaaaagaagattcagatctaaaattggtaactctagtgttacaaaatctaaaaccagtcactgagatcgaggtaggaagaaatcaataatacgaatccagctaaatcattttcagactttgaaatgaaaaaaaaaagaaacaaaaaaagtagaaaaagagagataattacatcgatcttctgctcttccaatttggcggcgagctccactttctgttcggcagtcatgttttctagagagagaggattatcggcgagtgacgaaaccctaaaaacccctttgatggaatggaattgattgctttcaaaggtaaaatataagaatggttaaactcgttttgaagtaagtgcaccgagtcgggtttggtttggagtttttatatcctaaaccaaaaaacagactaaaagttttcggaccaaaccggtaaggacaagacaagaagacaaaactgaatgtactcaatagaatcgccgtctgtggggatcgaacccacggccacgtggttaaaagccacgcgctctaccactgagctaagacggctttgttgattactgagcacttgattatttaattgacatatattattcatattgattatcttttacgctaggacccaagatctgaccgttggagcatgaactccagaaatcgataatagatgatttatgacataaatgtcccgataatcagatcccgctcctatttcctattatataatctctccgaccatcataatttgaccgttggagaacattactacttttcgcaaaagaagggaaaaaaaaagagagagataaagctctcttcgattcttttgcaatcttctctcctacggttgtttcaatctccgaccaaaccgtgctttcgaatagaacccagaaatggcatcgccacagagtaccaaaaccggtttgaatcttcccgcagggatgaaccagacttcgttgcgtttagaaacgttttcgagctcatttcgtgggatttcgagtttatcctcgccgtctaaatcgacttgcagcgacagattcataccgtgcagatcttcttcgagactccacgctttcgatctgcaggataaggaaccgactaccccggttaaagagggagggaatgaagcctattctagacttttgaaatctgagcttttcggatctgattttgcttctcctcttttgtctcctgcaggtggtcaaggatctgcttcttctccgatgagtccatgtactaacatgttgagattcaagacggatcgttccaattcaagtcctagttcgccgttttctccttccattctcggaaatgataatggtcactccagtgactcgtctccgcctccgaagccccctcgcaaggttcctaaaacacctcataaggtattatatcgtttagatccaacctgtttatgtgatgttattacagattcatgagaagtagaaatgatagattgttttgtttttgatgtggtctcaggtcttggatgctccttctttacaagatgacttctacttgaatgttgtggactggagttcacagaatgttcttgccgttgggcttggtacttgtgtttatctttggacggcttccaatagcaaagtgagtgttttgatatacttgactagttcttaagatttgcacaatgtttttagttgtggtgtattcatttaacagtgaatttgttggttaggtgactaagttatgtgacctagggcctaatgacagtgtgtgctcggttcagtggacacgggaaggttcatatatatctattggtacaagtcatggtcaggttcaggtgtgttgtttgttaccttccaatctgtggttgtggaaagttttgttatgatgcaatgaagttactaacggtttactttttggcaggtttgggacggaacacagtgcaagagagtccgaaccatgggaggtcatcaaacaagaactggtgtcttggcatggaactcaaggatcttatcatcagggagcagagacagaaacatccttcagcatgatatccgagtccagagcgattttgtcagcaaactcgtgggccacaaatctgaagtctgcggtctgaaatggtctcatgatgatagagagcttgcgtctggaggcaatgataatcaggtgatcttgagcataagctactcagtgctctgcaatctctgtgttccatatgttaagagcaaaagttgaacttctttgaagcttatcatattaacactggtgagtactttttttggaaacagttattggtatggaacaatcattcacagcaacctattctgaagctgactgagcatacagcagcggttaaggcaattacatggtctcctcatcagagcagcctccttgcttcgggaggtggaaccgcagacagatgcattagattctggaacacgacaaacggaaatcagttaaacagcatcgacactgggagccaggtctgcaatctggcgtggagcaagaatgttaacgagatagtgagtactcatggatactctcaaaaccaaatcatgctctggaagtacccatccatgtcaaaggtacatagttttgttcacacttgaaagctcattttcttgatctttctctcatcttcaatatgtataactgacgcatcaactgatgtaggttgcaacacttacgggccacagtatgagagtactttacttggctacgtcacctgatggccagactatagtgaccggagcaggagatgagaccctgcggttttggaacgtctttccttcagtaaaaatgcaggtttgtattcttttttcgagtttataaattccttcagaccagaatcagatcttctggctctttatgctcagttgattaatgacaatttttctgtttacagacaccagtgaaagacacaggtctctggtcattggggaggacacagatccgataataacagggagacatacacaactgcacagagatacagacagagaagctggaatgtaacacgcaaaacctgcattctatttatttcatttgttcttttcctttgtaaactacacaatccaagaaaatactgaatacatctataaaaacaaaagagttaccatcggatttccattgtatatgaaagcttaaattatcgaaatccctggcaaatcaagtaaatttctcgagatgatggtcttgtagcttttggcctcaaccaagatgccttgttgaagataggcttgcaaattcgagcaaaatctaaacgaaaagacaaacaaagtgttaatgtaaggaagaagaagcatttttcaattgtatagcaatgttatacagttctttccagtagtaccttgagcatcctcgctttctagaagcttgatcacaagatggccaccatgcctaagtacaccaggacgactttcgtttgggcctccatcatcatcattaggtgactgagagatggcagcttgaccaacagccaaatcaagtgctcgcattcccaattcagcagacagagctgcatctctagtggttattccagatactgagtgacacatatctgaaagaatgactgaaaatcccaattgctgcaccacaaagcagtccataacttgtgttacaacagttttatagaaaacaaaaacatcaaccatgcttagaaccaagtctaataaagtcacagagacagtttcagaacctgaggtgataactcccgaatcttttgtctgggaaagtttaaaacatcagcagcaatggtttgcactcgagaatcacactgtggaggaaccttcaccttctgctctgaaattgaaaaagctcatggattcacacagtttagagcaaaaagattacatttttgaagcttcctctgacctttatatccataccaacgacaattccaccacttctaagtgggcctaagctttggcaagcaacctgcaccgaatcatagcaacaaaattcaagtttaggcctctttacacagaattcgaaacttgtaacttatggaatctcaaaaaaagacctgaagccaagcaccaggcgcgcaacctaggtcaagaacagaggagcctggtttgatgagcttgtactgtttttgaatctgtagaagctgtagttgcagagacagacagagagaagagtcaatgtaagaagaaggagacgaagctgaggagggtatgaatgtaatattgaccttgaaagctgagcgagcaacatagccaagacgttgagcttctctgtagaaaaagtccggtacacctgccccactcatttcctccggcgccgacaacaaccgatgtcttctgcttccttttttgttgttttaccaaaaccttataaaccctaaaatgtccacatttttaaatattgcaaactagtcaaaaaaaatattagcgaggataattctattttaaatcaaaaactgcaaattttttactcattcttaacagtgaacaaaatataatagtgaaaagtattattaattaggaggataaaaatttgaaagttgatcaagtttactatttacctctatgtgaaaagtattcaaaagatgatattaacaatgatatttcaaccttgacaaaaaaaaaacaatgatatttcaatttaaacacaaacaaaaaataaacaagtttacatctatgtcaacagggtatattcaaggatgcaagactaagaaggggttattggtttatagatttataaggaattgaaattccaaacaaaaatcatttgttattcaatcattgattttaaaattttaattaaaatcatgtgttattgattcgatgatttataaatactagttaaaatcatttgttattcgtttagtcatttgttttttgatttgaaaatccaaattatgttttaaatggaattgaatggatttgaaagagaaaaataaaaggattcaaatccatgggtaaacacatgttatttcaaaattcatatatcttgatttcataattaatagagattttcaaactctatatagatttacaaatcaatagaccaataacccctcctaagataaaccaatacaaattataattagagaggtttttacatatatgtgagtactcatctaataatatatgataaattaatgttatattggtgaaatcctttggaacttaacttggactatatacttgatttatcttctaattaattttgttttacagcaatgtaaccattttctcaacttgaaaattttattaatttaacgttaaataatattaattaaattcagaaaaagaaaactcaaactttccaaaaacaaaacttcaataaaacaaattaaagagaaattcattaaaccattttttaaattgatatttattttatgtttggtattaagtgtaaaaatacataattttatttatggaaataaatacattaatgtattatggacattgtgtaaatttcttaagatacttttctatatatagtgcagaataacgaaaataaaaaagaaatacattaatgtatttggagattttgtaatctccttaagatatatttctatacaatgtgcaaaaccaacgaagatgagaaaacacatggcacaattgtatccttaaggtgataagttttgtgtaaatacaaagacttgaaattcgttaagataaaagtgtaacaagacgataatacaaggataagatatggaggctgaatctagtagttctggacatcgacgacagaaacgtccacgacaaaagagatcatcggatgtgatcagttatgagagcagcgttgcaaatctgtcaagagaagggaaagagacgttgatgattgtgagtcgcagaagacaattgaataaaatccccaatacgtcttctactgtgtttgataatacatgtcctcgttacaactggcttcgttctggttggatcgctgaggagcgtcttaaggtctatgaccgactctaccgggtaactattattttcttttgatggaaaattaacatgctatcaactaagtggtagtagtttagttgttcttgtcatgttgatttagatttttttactagactcaccttctattgtcaccgcaaaaaattcattagttttaagaattagtaatctatgttttgggatagaatctctctttctatgagaattgtattcatttttcaagataatatatgtttgatttggcaagtatgattaaagtatagtttcgagacccgagtcaagaaaaatgtatgcacatgcatatagtttcttctctaaatctcaagctcactcaaatgttagtttttatcctagtttttacttcttcttttttgtcaactcttagcttttactgcatatatgattcttcattctatatgtgtgtgtttatatatatcacacatttttatcatttaatttcaatgtacattataatataacagattttaatatttgtttagttttcaatgtgcagtatttttatgatccattagggcaaatgtatcatactcgtggagaagtggatcaaatctatgcagatattgaaaaatcgcgcgcaatagtcgtcttccgaaagtaatctatttagtagacctaatttgttgggaattgatggttctattatgtaagtggctaaaaatttcgaatccaaattatttagataaagaaacattttttttttttaatgtgacaatcaatcgaggattttcttgttttggtgtttagttgaattgaatcttctttgtttattttggttaatattatattgtgtaaccaagattaaatttggtgttttactgctaaataaataatttgagagggattgtggcaaaagtgcagcaagccaactttagtagttgggccctgttaatccaaaaccccattctcaatagaatccaaaatatttagaacccaatgtgaacgaaggaaagacgatggccgacaaagtattgtcaaatggtttagagattgatgaaaaccagtcactgccatagtccatagatattagattgaatggaatgatgaacaaaaaaataaaagaattgtctaaaattacatttcccctttttccatggtcctaccaccaaattacataatcaaatcaattagaaatttggaatgaacagacttaccataaaagtaaccaaaagtgtcaaggaacgtcttgtttctaccagctatgatttaaaaaaaataaaaatatagactcttcttttcagaaattaagtatgtttctgtattttgttgtttccctttgtacagttgcccactttggttccttagtcgtcaagtgaaagttattgttattaccattctccttctttacatggacgaacctgcttcaaccaccattgttgtagccacctgatgtttcccgttctgtttcatttggtgctgtgtccagtacctatgtgctcctaagactctgtctagcagttcttgaggcactggttctcctcttcgttgctgtggtgatatacttgctgtgtgaaccaacgttttccatttgtcctgcaacaaatcacaaagttattggaaccatttatgtagtggctaagactcaaaagtgtgtttgaccagtttctgatatgtgttctcataccttcaagtccacataggttcgatgacttgcattctcaaaagaacgcaacttcacatcacgccatctgtgaaataagaatatctatcattagtttgaccacataaccaaattattgtattaataaccctcatcaaccaaaccagtctttttaccttccagtcccaacttcttcaactgcgcttactagagcttctacctctgtaacagagaatggtctcctggttctgcgttgtgaaagctctgtacgcttaggtttctcgttaactggaacaagtgcaagagcgtcggattccaaggccaaaactggaaccagcgctcttgaatctgatgaaggttgttcatcagctggtatgtcactcagatgtgggactaattcatcattgttctccacactatttcccaaattaatcaagtaatcttcatcttggggagggagaggaattccagtctctaacgctggagaagctgcggacctagcaagatcgaatgattgtccttaggtatatctctagagcttcaaatttatccatacacaagcaaaacttgcagtaacaaatatatatatatatatatataagatcacgtttgttagtacctttctgacaactttgtagagtcagttggcagagaaaggacaggagtttcagaacaaagaggtacaggcagtgtttccaaaccaggctctaaggtgaagccaaggttgccaagattttctctacacgaaagaccagtctgtgatagagtgttgttgtcatctctaacttttttcccttggactaacaccccaatacgtattccaccaccgagtaaagcagtaaccgcctccttcaccgtcctctgcaaccaaaaaggtttatgtaaataacacttcatcattgtacacagcagaaccaaaacatctacagagaccggtaggaaaagacatttaatcacgcaccttcagtaagcctactgttgctgtttctggaacttcaattacaagctccggaatcctaagggacttgatgctgaactttactgcaaacaatgaaataacatgagacccacatatcatgtctccataagtcagtaaattatcaactgatcatataccacgggagtctttcgaaagaagacctatttttgcagcagagaaatcaccattttctgcattcaacaaagaagcaaaaaaatcatgaaatcaaaaccatatcagccaaggtaataaaccatctagatatagactaatatgtacctgattctcccttttcaggtgaattggaaacactttcactactgagcccaccatcataatttacgaccaaacctttgtcagacaatcttctcttcctatgaatggtctcacgcttccatgggttgtaaccataacataattttctcttgcggtagagagccttcaaacgaccatctagaaatatatccgcaagcaaagtaagggcagagcggcagctaaaaagaaatgcaccaaggagaaacacagtaatatgatactaacctgttctagtgtcttcaaaacacttcaacttggagattgctctcaccgactgcattattcttctattgccaacccgggagagaggcctatatgacttacatttgtcactaaatttataatacttacaatagttttcgtcatcatctctgcaaactaacttagaatgattcctatatcctttaaaagaatcattagggacttgatccgtgcatggtgctaatttcacatcgccatccagaaggaccgattctggagactgcgaatgtaattgacttggatcctttaagctgaaagtattagcaccttgttcagatccggcatcctcattaacaacacatgtctcctcagtgatgctccctaccagggacttcaaaccagatgccctcttacaatcagaaaccggtgtttgctccaaaatgcaatcattttcgaaagacgaaaatggcaaacaagtcacgctagtattttcactagtagactttgaagcagggtttcctggatcgaaaaactcggatttacaaggcttagtagtatagccatcttcaagttcttgcttaatcagtccacccaaatgatcaagattatcagcttcagatgcataggtagacgttgaggaactttcactttcttccaacaactttccagcaagagaagctagcaaatcaattgcacagatctcactttcatcatcagatctcttacctgagaccttcctctacaaaagggaaacaaaagtcatcagagacgtattacaaaagcatacaaaaaaaaaaacaaaaaaaatgaagaccatgatctcttaccctgcttgaacgaggagccttgggaatattggggaaatcaaaaccattagagccaccacaatttaacttccttttgaccaccatctctcaattatgcataacaaaacaacaacctgcaaaaaaatcaaagacttttaatgtcatgatcatctccaacaaaattaagctaatcagtataatttgaacacattcttaaactaatgatcaacagatccgaggtcaaatgcaaaaaaaaaaaaaaaatcaggaagataaaactaagccctatacagattcagatcaacaatgaacaccaaacccttgatcactttgtttgttttttaaaaaacatgcaaaaatgcagcgaaacaagcaacgtatagatgaaacgcaaaaacttagatcaatgaaacaaatgtaacttaaatgctcacaatttacgtagaaacaaacaataaaacataatcagatctcgattgccaacttctgacaaaccgccaaataatttattcgacttcagattcaatacttttttgtcaccaaaaacagaacatgaattgagtttgtggatcagaaaaacagaattgagaacatgaattgtgatgaacaaaaaaactcacctaacaagccaacgattcctggatcacaatctggcgccagttaaattatagatcacgcaaactgaataattacgctacctttacctctcacgaatctctgattaagaacaattgtgctatacaaatgaaaagagaaaaaaattacagagactttgaaattctaagatttaagagaaaaagatttaacgatcgtccttgtctttctctctctctctcttctagaatagaaataacgaagaagaagaagaagaagacattaaaccctttgaaaaagaaaaaaccaaacaactgaaaaaaagcttaaacccccatttgaagaaaataaatacaccattttttttttgtaagtagaggaaataaaataaataataaccacgcgaccggatgtggcagttcaaggatagtggatttaccgggtagagccagtcactcttcgaaccattttttttgtttttaatgacacgtggaggatactcttactacacgaaacctattttgtttgtcattgtcagaaccaaaaaaaagagagttaatttcgggattggataataattataatattcccattttgaagggaatattatgaggctgtgataccgcgtggtatcccttcttttactgttccgtgcacgtttttacatcattggtccacgtgttttctcttgctgacgtgcttttacacctggaatttgtttttgcctattagcagaagagtggggtggttcgtttaattcgattctttgcttttaagtctagttattaggtagagtaaggtttaagatgtttcgaaaactattgaattcttccccattaatattttcaaagctttatttatgactttttattggtcaaatattaatgttgggtaagtttatttactgttattaaaaagtttgcgttgaatttgtttaatattgactggggaagccaaagacactttaggattatcatccatgaaatagtttacaatggaatccttcaatagtatattaacatgataacatgaatgaagattaagtagtaaatttattgtacatttaggataatcatccatgatagtgttgttaagcatattcccaattggacggaaaagagcatattcttagttgtaaaaaatgttaaattactcggtaagacggatataggaaaatttaaataaaacgagatccaaccacctaacaaaacgagaatattccattttaatttgaaagtcagttggcataagcttatcttaagatatagtaaaataacaaataaataaaataaaacaaaaagttctaaactagtatatttatagaaagacaagatttcacatggttgattgtcacactcatacattgtcttatttttttaatacgccgataacactggatttatatccatgtcgttgtgtttagaagaaatccatgtgtttgtgtttgtgtttcatgtagatgtgatatagtctatgtgcacacatgattttcatacttttataatatgagatctctgttatatatataacataccaagttgttcttcctaccattcaacgtttaataatgttatgggaatcatttatacactgttgacgaaaacagttaattaatattgcggtgacgataacatatgtattgtcatagtatgtcaaaataacatcaaattatgtataacaattaacaaatatatttttattcatataagatgtcttttgatcccaatgtttttcaaatatcgacaacgaatgtgtagcaggcagaaatatcctaaataatagcacaaaaaccgaagagagttggattctagcatttcatgcattatgcttcagcggatgaggcatagatctgctctttactcgtttgcaagctaattcggttgggttgaacagcttttgttcttttatttctcctttaaacttttttttttctctgtcaccaagttgaagaaaagcaatcacgtatatatcatcatcacatggttctcatatcctggcaacatttcgatattgatataatattccgttagccaacaagaatctcaatatcttacattataccctaacatctacgtttgatttgaaactgcctttgagatggttacgtatgcttcaaggccgtatatattccttgaggtggttgaaataaaacttactcaacttggacttcatttccaatcaaatttcctgtaatattttatacgttaatatatgtgtttatatatatgtaaatgtatatatcattcaaaccaaaaaaaaaaacactattgtatatatctggtataacaattgtttttcgtgttcagatcttgtgtgttatggaaaatagatctataggtgtgttttgatttcatctttcctacacattaaaagagaagtccttattaaaaaaatgtatagcaaatttgtatgaaagatgattactttttagccagttaatctcatcgtgattctatatactttcgttttgttttcattacataagatttctagagttaatttcaaagtttgaaatattcttacaagaaaaatcaatcatttaaattagtgcacactaacacttgaaatactattacgaaatatacatattttaaaaaaaaaaaaaaaaaaaaaaagaaaaaaaaaaaaaaagaaatatacatattttaattaatgtttttagtcaaatcataactctaaatatttatattaacggttggaataatatttagcataccaattaagacaagacatgaatgccgcgtcaaacatatccgtattgggcgaggtcgtcgaattaacgagtttccaaaacactagaaaacgatgtttttttggggccaaaaccagcataagtagttgttgagtacattgtcaccatcctaaatgtatgaaatcatgaaatcataatgttttatgcagaattgactaagaattgatagcacccacatagtcgttcgatcatgctcatgcacgagcacgagcacgacataggcaaaatgtgtcacattgcaaaaacaacatggttatccaaagctatcaataattcaatactataccctttcgactaaaaacacggtagagtcgatcgagccgtcccgttctcagattcacgatcatacaaaataaactttggtttttgcttgaagcacggtcgatagaaacataaattttccatataggacaaattttttgattatgaatttatgattgaaaatgggtcggaaaccggaataataaagtaaggtatgtattaagtgggtccaagtggggggtggatgcgtgagtgaagaagataccactagtaagaagtagttcaactgttcaagtaaccttttaattaaagaaaaaacgttgcgtgaaaaacaatctataaccgtcaattctgactaaaactataaaagaaggaaagttgcaaactcaaacgtaaaaaggatttcctcgtgccaaaagataagaaaacaagtagctaaagaaaccatatacttctctgtataatgatgacaataaggcaaaaacaatattgggctttttaaacgttgagttttcagataggttgcctcatcgttttatacacttgggcttttcaagattgaaatttgcttctgattgcaaatatttattcttggacctaataacgtaggtaggatagatgcattttcttaagaaagcctcagaactctctttgacattttagaaagagttggatagtttccttataggtcacacctctcttcaaacaaatcaagtaactagtgatgcaagtgttcacttttaccacgtctgattttgtcatttctccaaacttatcggattggctccaacctaagccaaaaggactagttggtccgttggaatgagtaatgaattagtttcttttaaggtaatgattttgccggaaatagaggttaaatgttgagttcacctaataagtaattttgccggaaacaaaagtttatcaaatgcgaaaatgaagtatgacccttttcttatggacttgtcaccgatataatcatgaatgtttgcggaatcaagattagaatattgtcaatgatacatgattgtcttatatgttatgttttaaccaccaacattcaattacgctcaaccaataaattggttctgagagcccttgatcatacttgagagttagcgaacaagaacgatggaggattatgtcggtagaaaacttctaaccaagttgtcataaaaagacgatcaagcgagtagaaccacccaattactgtcgtaatcaacaagatgcccataaacacacgaaatatttacaatcaaatatatagcataagaacacagttgtctttcacaacattgacacacaagagtcaaaatgcttactacccgtttcagacattttgattacacaattacatttagcccttagtagcaaacacatacataaactaaatccacgatcaccggcattcccattaccgttgatcgcaaaccttaaaaaacccaaagtgaaatgctgctgatccaaaagagattttcggatacttgtggcagcatcattcactgttctacacaacaatggaaacatcaaaagagaaataaatacctcttttttcttcttttttttaatggttttttcaggttcattgatgatatatctcaagaagagcaatcaggacaacgtatcaatccattctcattgcattcaggacatctcttgaccctatcttcatcctcatcaaacagtttcttgctgccactacaattggaacacggaacaaatcgaatgtccccacagcaatggcaaacaaaccctggttgtctcattggaaactctttaagaatcttagcaagctcaccaatctcaaacaaactcttgatcacatcagcaccaccaacatacttgcccataatgaaaacttgaggcaaagacacagacttctctcccattgcaatctgcaactctttcctataagcgatatccatggagacgtcgcgctcatcgatccaaacccgaaaccctctaaatatcattctgacagcatagcaatcctcatacgtccgtctaatccctctcaagctagtaaaatacaccacaatcctgtcctctgtcccgggaagacggatgaccgagttgtttaagctcgaaaaaggcgatatccgcgattcgggtaaaagggatttaccggatttctgcttctgaggaatctcagctaaggcaggtttaacgggtttggaagtctcgaataatctacaaaggtttttgactttgcctttaagagaagttcccatcgattctacgggggtgtagaatttggtaatggaggtggtacgattgagagaaggattgagattgtgggatttggggcccgaatccaccactgttcttccgtgaattgtaagcgacctgttgaagaacgacgtcgttgtagccgatttcgtcgtcttccctgagaaatcagcgtttttctctaatcccgccatcgaaattagatcaaagaagcacccctttcgacggctaatttggtgtaaaacctaaaatagtcaacaaaatcaaaaccctaggatcaaattcaagcaaattgacgaatacagaaagagaaattgaaaaacataaattgaataatcgtcgatcacctcccaaggaagaaatggaaattggaatgattggaaaagaatcagcttctctgatttgagtcgtaaaacgatcgggtgctgcgtttttgagctgatgaattctcacctaagattaaagaagacgagattgatgaaagaatgatctgatttttctggaaatttgggggtttgtttgtgttttggaagaagatgtggaggagagctccgaattagccttttgtctgtctgcctttgttgcaaagcaaagaatttttctgttttttttttaaagatataattattatgtctaagttattaaaggctctttaatgatatatttactcgatgctccttcgaggaaaaacgaatttgaaaaaataacaaaagtgggattaaattgcgaggaaaagtcgtttactggtaaaacgcggttgtcttattaagaaaggttatggttacagcgaaaccagtttctacggtcggtttattgctattgattctacgctcggtttagagatagttgtctgtattctaattgaagagtagtgtatttcgctttctagtcttcgaccattaggatttttagttcacacaagatcaattctctaacatttaaaatcaactagaaaactcaaataacaccgttaaaatagtgattaaaccattcaaaaattaaacgggttttatattgtttgatatgaaaactgcaggtttttcgattgttttttttgttttccgattgttacacaatggaaaagaagatcaaaaatcaattgtttttaaaaaaaatattattctgtcatatttttgcaacaaacatgtgtttttgcaatgttacatcggtgtcaaattagcaatgtcagatccaaaacaaaatgtcatattgtgaaaaaaataaccctacacttaataatacagtatgaattttggatcctttaagaaaaaataaaaactcgataaaaacgttgctgtcggtttgcaccgaacgattgaagttaaccaagccagcaagcaacccaattcttctatttcttcttcacctttagatttttcctcgcttaatttctcaataacgctctcagagagaccatttgatgaagcttctcgcttctggaatttgaaaaggtacaagttgcaactctctcttttctttcttttcttcctgggtttattatatagctggagttctttgtcgatgaatcgggtggtgttgttgttgtttggtttcaatttgatagaagattggcttgaccttgatttgctttgttttgattaggatttgataagacgagttcatagaagattaccgcaagttcatcaactttttgtatgtggtttcagcttttgaagcaaaattctgataactatacaaagattccagcttcatatgtgattttccttgttattcttagctttgctatgaagttgagatatatgagtggaaaattcgtattaaaggatatgccttttggttgttcatttgcaggaacttgttatggagataatctcactgaacgttgtgccccagtgctctgtggttacttggagtagtaaattagcaacgaaaagattggtcccaaatcggtcaagtttgttattctcaggggtcaaaaaatccagacttgtgattcgaagtggaaattccgatggttatgttgttggtgagaatgatgacttgggtcgtatagccagaagaggagaatcaacgtcaaaggttttgattcctggtttgcctgatgaatcaaatggtgaaattgctgctcgaatcagtcattctcactgcgagtggaagcccaagcttagagtacattatgagaaagccggttgtgacaatctcgatgctcctgcggtgttgtttcttcctggctttggcgttggttcatttcactatgagaagcagcttaccgatttgggaagggattatcgagtatgggctattgattttcttggacagggtttatctctccctactgaagatcctactaccatgactgaagaaaccagttcctcggaagataaggaaccattttggggatttggtgacaaaactgaaccgtgggctgatcaacttgtattctctctggatctctggagggatcaagttcagtattttgtagaagaggttagcaatatctgagttcagttgttctattactctttaagctgttgattttgttcttttagtcgtaatttcaaaagcagtgtgttagctttttttttttagtgtagattgttgctatgtgtcgtatactcatggatttcaatagttttcagctcagaacctgaaagtgtgggtatggagtcttctggtgttgctttgggaatgggaaagtttaggatgcactagatattagaattcatctctgttctttgattccgtttgtgttctagtttgagatcacgatctttttcatctgaaataagctgctgagtcggtaagagtatgtggtatttgtgttgtacaggttatcggtgagcctgtgtacattgcagggaactcacttggagggtatgtagctctctactttgcagcaacccatcctcacctggttaagggtgttaccttgcttaatgcaacacctttctggggtttcttccctaatccagtaagatccccaaagctagcacgtctctttccatggcccggagcattccctctgccggaaagagtgaaaaaaatcacagaattggtgtaagggagactttattaacacatctcctcacctgaaaagtatcattttctatttctatctctatcagtctaatatctttacttcccaatgaaactgcaggtggcaaaagataagtgatcctgaaagcatagctgagatacttaaacaggtctacacagaccattctatcaatgtggataaagtattctcacgtattgtggaggtcacacagcatccggctgctgcagcatcgtttgcttcaatcatgcttgctcctggtggagagctatctttctccgaagctttatctaggtataagacagtgtggtttcttgtttttatatgttttttactctgcgtgattggtgttattgcttatgaggaatgctgctatttgatggtttatgctaggtgtaaggaaaacaatgttcagatatgtctcatgtatggaagagaagatccatgggtgagaccgttatggggaaagaagataaagaaggaaatccccaacgctccatactacgagatcagcccagcgggtcactgcccacacgatgaagtccctgaggtataatgaactagtcaataaattcttcaaactctgcaattaggtataatgaacccaccatttgggatatgaaaacgagcaggtggtgaactatctgatgcgcgggtggatcaagcacctggagtctggtggttttgaagcgctcccgcttttggaggacactgaagaagattgggaggagtccaggattggtagagaaattgagttcccgagagatggttggaaaaaagcagtgaatctgtggttatatgggtcaaactatacgtactggagaggagttagagaatctttcagatccagttttataagggtgtttggagggaagtctgcatagaagaagcatggaacagtcgtctagtgtaaattaattgtaatctatgttgcatccgatgctagctatataatgttgtctgtagaatcaagtttctaaaatgttcaaaaggaaaagttagaaaaatatctacttgatagttagtcacctaaatcgaaggaactcctttcttgcattgttgtatataatccacaggttcagattaatataggaaggcgacattgcaggccatatgagttgtcttaaaaattggaagagagcttgaaattactctgattccaaaagaagaaagtgagtgtatttgaattgttaataatttccaaaggtgaacagttttattgaacatgtatggtgtttgaaaagacgtatcattggttacttttctcgaggcaaagtcgtatccttgaccatattcttcccttagcttgaatctcatttttgtcagttccacggtcaacaaataagggactgaattagaaggctatccaaaccacttttgagaaacttacttacacaggctatatatccaacatgagatttggtctgcttcttttcttaatttgtttcttagtctctgataaaatctcgttatctatttattgatttgagtgtcaaaaaaaaaaaaccggtgttacaaagctgctactaaagtgtcgttctacactagttgtaagaaattacttctcagtatgtttttttatctctcactagttgataacataatggtaaccatcaaacaatgctagttgttgcaattttattcttgggggtactttgaaattgtttctaattgttgctctgaacttttttttatttttatgtcggtcaacattgttggtctgatttatgtcttacaacaacattaaagagaaaatacactagtactaataaatctaattttaaagggaaggaaaaaagaggaaagaaaaaaacaactttaggaagaaaagggaaagtaggacccagaagaactgacaaaatcctccaaatgtggcaaaaaggtatcatgcaaaaaaccctaaaattgaaaaaagagagcacgcaaaacagtggccatgcaacacacaacattcattaccgagtttttacctttctttcttttttctataaaaacaaaaatattccatccaaatttagcaatcttttgtgttcccattaatagattcccaaaaagcacttctaaacccattttggaatacattgaacctttcctcttcttcttcttccttctaccttcttctctctgttcaattttgggggaaaatgggtcgtggaaaaatcgagataaagaggatcgagaatgcgaatagcagacaagtcactttttccaagaggcgttctgggttacttaagaaagctcgtgagctctctgttctttgtgatgctgaagttgctgtcatcgtcttctctaagtctggcaagctcttcgagtactccagtactgggtaacacttatttctttttgattcaattttgtttttgcatgtcttgtcttgttgtgattagaatcgatttcgggaactgtaattgatttttgtttttgcatgtttgttaagattaaaagttttctgattgagctgaagagagtcctaattttgaattctcatttgattttagaatgaagcaaacactttccagatacggtaatcaccagagttcttcagcttctaaagcagaggtgagaatcattcattcttgtctcatatatcttgaaattgtttttttgaaaatctgattgctgtttagaacctccaggaggattgtgcagaggtggatattttaaaggatcaactttcaaagcttcaagagaaacatttgtatggaaactaaataaatctcactatgcttgttcattactttattcttctctactttgtgtttgtttttagtgtttggctttgtgtgttctgttctgttgtagacaactgcagggcaagggcttgaatcctctgacctttaaagagctgcaaagccttgagcagcaactatatcatgcattgattactgtcagagagcgaaaggtaactagtaatatcactcttccatcatcatttctctttgcattgtcctgattatggttatctgatttcaggaacgattgctgactaaccaacttgaagaatcacgcctcaaggtaaacactagcttttcctctctagcttccaaatgtaagcttatgtgtaatcacatgattctgaaccttgttaaaaccagtggctatcctttgacaagctcatgctctaactagctagtgtgcagtttatttgtcttaagactcctatataactaggtacagagtgcaaaagtataattcgtttcttgattagccatatatatactttgcaggaacaacgagcagagttggaaaacgagaccttgcgtagacaggttcttattatttttgttgaatcatctcctaatgaacgcttcttcctctgacttgtaattacttgttgaaacaggttcaagaactgaggagctttctcccgtcgttcacccactatgttccatcctacatcaaatgctttgctatagatc

SEQ ID NO: 711 - DNA, 65465 bp, Arabidopsis thaliana
tctgcagctgcaaggaaacaacacacagcgctcaagtgacaagccggctcacttcccttgtctgttaccagtccatggtagtagtatgctgcagcctgttaagaaaaaagcagaacataatagagagatatattttatgaaagaacaatagagatgaatatatatcggatcactctcaacaatagcttacatacacatacaatacctttgcttccagaaacttccagtagataaaccggagaagtttcttggcgcatccatggctaactgcttcacaactagacaagcagtgatatgcctgaaatgataatgagatcattttatagcaaattaataattaaaacagagaaaagacatatgattgccccgaaagcatgccacagttataagaagctgaagattgttaaactatgaggaggacctgagtgaagtagatgacttgctcacatgcaattctcctcttcacagacaatgttgctttctgactatcaactgctaatccaagttgaatctcagttccctgcagtgagattcaaccaaacttacaaattgaaaacatatatacaagattcaggtttaggagtcacagtttcaaagtaagcatgtgtgtaacctggcctagtgcttgtatagagagagtttgtaatacactttcctgcatatcatctggcaacttactcctgcatacatatagcaaattttcagatatgtaagtattaatgtgatcctagaatttatgtatttgtgcttcatactttatatcatgaggaagttgagtcagaatctctcggacgcagaactccaagtatccagatgccttgagcagcaagtcaaccgcatctctcctgcaatctgtttgaaagtgacaggttaattagttttttgtaaacacaataaattaaaataaaagtgtgaaagtcaacgaggccacaccagtggagaccacacggacgccattgccagaaccagaagcatagcaatcctttggaatcatgagagagttagcttcagtcaatgccaaagcagccatcatgtggatcactatcaacatctccatccaaaggtttgtgcaacatatctctgcctgtatacacccttcacattgttaagattttaatgatactagaacaaacaaaatgaatatccttaggatcagcttaatttaagcaaaaaccgaacttactcgtcgaccatcgccaagggtcctccatttgagctctacgcagccctccattccatctttacctgtagagttaaatattctaatatcaccatttgaatatactaaactgtttaagttaatcaaaacttgcaaacacgaacttttcttgataagaccggatagaagtgacaagtactcctccaaagctgtacgcaactcagagatggctgaaccccctgcagtagaaaagatggaaccttatgtcttgacacgcaagaaaagaggaagaagttggtctaatttctctatacctgtgtcctcagctaccaactcaatctgatttcttaaacatgtcaaccgattgatggttgtcttgggagaaacacctttgagttggcgctgaagatcagactgaacaggaacacggaactgtagaacaaacactacagattcttgaatgatcctcttcttgttcttccttcccacaacagcaatagtagattgagcacaccccatgctctctttctctctctctctctctctgctatgatcttttgctcacaaaatcatcctacacaacattgacatatatatatgtcaaaataaggatgttttggaacaacctgaagcagatagatccggattaattttgaagctctaagtaaaatataaaaagaacaatctggaagagagaatctcagagagctaaccagaagagataagtaagcatgtgatgatgggaagagaagatttactcaggtttcagagttcgatgcaaatccctccacatgctcttatattcaacgatagatatacgtgatttagttaaccaacaaaggaaaatcacatgcctttcggtttaatccaagttttaattatgtttcttacgggtagctgtgaattcttattctatgtccccacccacttgcctactttttattggctctcctgttttagttttagtacttccttcctcgttgacttctttccttaactttcccgccaccttgattaattgaatcaaatcaactttatcagtttttaccctcttttcttactccaaccaaaagattgttagaaatgaaaatgagattatggtaacaaaacctccattgattcgagtcaatatgtcttttgaatgatatgaatcgttggctattacatcttaagtagactttataattagacgagataattaatagacaaagtcatctatgattataaaagtattagagaatatttggatccaatcgaaatgtggtgtgggaaaagaaacatgttagattgtggcaggagacaggctgtgttatcttcattgttctactgcaagtgcaaacacacttcccttctttaatttggacggtatattaatacactttattattagaatgggcttttataagtaggcccattatcaggtgaaaaacaattgggcccatcattgactttttttgttaatgggtggtggtggtggtgattaatatcgtcgtcggaggtttcttgagctgaagaaaacattcgtagatctatttccgcatctgcttaaacacctacatcgtcgtagatcgcaaaccatggccgtcgctgtagctaagcttctgatctccgccatggcggttttcatgcttgtttctgcttcgttcgcgacctcggaagtgccgttcatggtggttcacaagaaagccactctcaacaggctcaaatctggcgccgaacgcgtctccgtttcctacgacatctataaccaaggatcctcgttagttctctatccttcatctagttatttcccgaatccgtttgatttctccattttcatttccgatccgtgttaatttctgattgcatggagagattggtcaatgtagaattaggagattatgcttgagctatcattagatctaccgtatgcgtatcagttaaacgaaacgccatttgatctgatctcattgtttatcggaattttggatttggtttgtgaattttgtatctgccggctacgatgactttgagatttttaatgaatgtcagctaaaagcgtcagatatttgtggtgtttgctctcaggtcggcgtatgatgtgactctgacagataatagctgggataaaaagacttttgaagttgttaatggaaacacttcaaaatcatgggaaagacttgatgcgtgagtttcttcctcaatcataaaatcttatattggcctgctttagcttttactctcgtcactaatctaatatttgctgtgcagaggaggtattctgtctcattctatcgaattggaggccaaggttaaaggagtcttctacggtgctcctgctgtcgttactttccgcatccccactaagccagctcttcaggtttgccatttttaagctcccttcattctagttcttggaactggttgaagcaataaacctccccaattaatctttctaatcagaattactttctgttgttgtggccgttattttactaaatatttggttttgtgatgtaatcgtgtattatggttttattgtttgtaggaagcatactcaactccactactacctctagatatcctcgcagacaaacctccaacgaaacctttggacgtggtaaatttgaccttctaaggactattctttcaatcatctagtcagagtttttttcttttcttctcaatattgactttcattgctatcttctgttgtgtcttggatgttgctcttgatgctgccaaaataatctcaggccaaggtaactcaatgaccgatgtgtaattctcacttcccagtgaaatcatcaaatatatatcagtttctcatattaccgtgtttcaattgttgcagaggttgctggcgaaatatggatcactcgtctccgtgatctccatggtggtttgtttcatatacttggtggcaacacctaagtccaacgtatcaaaggcaagcagcaagaagaagcgttaagttagtgaaatgaaaggtgagaaaggttggtacggtgctgttttctgtttaacagttaaacacagtttcaaaacttgtaagaattagagaacacactttaattttggtgttgcagaggacatacttcaagttcaaagagttattttggttttacttaatctctttgtgagagcatagtcatggagttctcttttatttgggttatgccttttgcttatggttttggtagcattatcttttacacatgttgataatctttgttgtgttaacttgtgtttgtttctgtctagtttcattgcctgttctgtttgctttgtagtctgtttaataccacatttttatttgttgttgttgtagagtctagtctggttattggttaagtattatgatttcgcttagaagtttttttctgttttgataattgctatgttttcttttgttgaagtttgaaaaagagattcttgcttaaaattgaaagagctgttgggatgtatatgtttgctgtgttgatcccattgagattgcataaattgttatgtgctttatcgttcgtgattcccttaaaagttggcagatgtgtgattcccttcaatttaaagttagcatgttattagtataagcggagcagaagagtaagtttgttatgctactaaaagaaagaagactaggtttgttaaaagggatgtgactggtcaggtgtttaattggattttgagtctgttacaaacaacatatagaagaatgtgtactaagtagcttataaacttctttaacgcctttatatggaacatttcttagatagcttttaaggtgttttgttttttgcttcagaaacctgtataaattaaaaaaatgaggaataattttgtttataagatgcttcgaaaacctggatactactattacttataagatgcttttaacaaaatttgtaggtatcatatgtattaacctactaggcatttgaaagccggtcctatagctctttcgctttatgaatacttagaaacaattttgcacagacaaaaagaattattgaaaatactacatgaaaaaaaaaaaagagaaacgatggtttgggtcttaactttttcaagttaaacaaatttgactttgtttttagaccaagtagtcaaataagttgtgataagtttatttttccgggttggaatagtgcagcttttgccatgtttatcaagagttcaagacgggattatacaacaatcagactagagttaaaagagataatcaataaagcacgcacaactttcacactatgttaatttagggcatgactggtttaaacgcagtgggtgcggttgcggttgcgttatcaagcgttttgaacgactggttgagcgtttgataatggatgcgtttgcgaaaattttatgactggtaaaccagcgggtacgatagtaattaaataaaaataaccaaaataaatataatatattactattaaaagaaataaaaatacaatatattatgataaactgataatattagaaaaattgattttttgaccaaacaaaaatacaatatatcatctcgtccggccaaatgattttctaatcgagaaaacaaatcgaaaaatgtattcaatcaaaaaactcaaaacaatacaaaataaaataaaaacaacgatgccatgaaatagtaaaagaattacactagctaatgaatgaataaaaggatagatgatacttatgtttgattcttgattttgattttcatcggatgccataattgagagaatagagttacaatatattgattagggttttctaataaaaataagatatataaaagattagattattttaattatagtgattagggtttgggtggaagccacaattattttaattaattaaaaaaagattattctttttaacctaaccgctaccgcccgcaaccgcaaacgcttgcggaaaggagcttttgaaaactggcgatttcgagcggtttaaagcgatatctagcggtttttatgattggtgtcaatcgctaacaaccgctaccaaccgcaaacgcagcgtttgcgggtggtagagggagaaccaatcaagtccttagtccctcaatcgtcgtcgctcaaaattactggtttgacaacagatggttggttgttagagcctttagacgaatggaatccaattgcaagggtacatctgttaattgggatcaaactgttaagtaacttagttgggcaacaaagcccgtctagctcagttggtagagcgcaaggctcttaaccttgtggtcgtgggttcgagccccacggtgggcgacgttgttttttttatcatatgtttattaatcatttgcctacataatattttccttatgttagcgcttagcggttaaacgtatacatatgattagtattcaagatctatctatgatttgatgttttaaaacgagattttatataatctctaaaacaaaaaagtaaaataatagatagagcaaccaaaagagaatttcaactgaaactgaataaaaagtagtgagtgggtgtatgcccactctctctatcttggagtgtgtccctctcatcttttaagattacatcacacaaagaaaaaaaggacaagaaacaataggaagagagtatgtaaagagagagagagcactatcctgaattcaggaacacaaatttcaaaaaaaacaaaaatgataaagttcaaatcaggaagaaattgagcttactcactcttcctcatcaccgtatggtttctcttatttttccaaacaaaaatcctaccccatcgaactcctaataacctttttcgtcattgtttaggctttggcttcagtagctgcgatggcaggagctggagcaacaccaccagtggttggcctgaataccaaatcaaaagaattgagagttttgcattttgaaggtacaattaaggtacgaaagtaagtgaagagagagaggaacttacaggccaacaaacactttgaaggcatcgtataatccccactgtgctccagtcaacgtcccgatcatcacaattctaagaggaagccctcttgtgaacagtcccaccataccaatcttcttcaccgcctgcaacatgtcatttacaaacattaaatattatttctaccgtaacagaaatcaatagcttgtatacaactaccaaaccacagccattctagcattaggctattgtattcaaacatagtgacttacatctccaacggttgctcccttagcgttgttgaggaatgacactagattgtctgctggatgagaaacgatggcacagaacactccggcaacgtaacctccggcaaaactcactccgagttgcagacctttgctgcactcactctttgggttggggattgcgtacttgtaaatcatctcaacaatggtctcaaaggaagcaaacttcatcatagtgtctgtaaaattcatagatatcatcaccaccttttgcttttaaagaactacatatgtttcatcaataaacaaaaaaaaaaaaaaaaaaagattgtgcaacaggttgcaaaatagaggccagaacttacaaggaatctgacgtccccagagtggagcaagacccttatacaagctgcaaaaaaatcagaaatcagaccaaaaggctagcagtaacaagggagataatgttattggtattgaaaaactcaccctccgtatccttcggacttgataaacttgggaaatccatcagacatccccctagcaaatccaggctgtgtctgaacacgaaccttcacagcttcaaatgggcaaagtgcaatatcggcaatgatctcagcagaagcagaaccagcaaggtagatgagagtcttgtatttggcagtgtactcaggtccagcaaggtcagagtaagtcttcttaaagtactcgtagaatccaaacttgcaggcaccctgagcactgtaacccaaaagagtaggaacccatccacggaaaaagcctttgactccttgctctttcagcaaaattccaaaaccagacgagatgctcttgtacttcgctggatcaatctggataacaagatatatcagttttgcaagaccaagtgaaccattcaacacataacacgtcaagtaacaatatttcgaaagaagaaccagaaatcagaccatattaacgtatattgaaatagaatgattcatatataacatggaaatggatagacgaagatgcgtttatcagagatcaaacaattcttcagatattgaaatcaaacacaaaaccaatagtcaggaaaacaacaaagcgataaagaaaatcaaatcacagatctagcaacacagatctcactacctaaacaacacaggaacacagatccacaaacatgagctcagaaaacaaacgaaagacaacggatctaaaggttacatacctgcatattgcacttgacgagatcgagaggagtcacggtcatgtgagtaagaccacagctgagaattccaccaaaggtacaagcagcgtagaaggcaggtgaatacatctcgatccccttccctggctcggtgggagatgcaataaggaaattcttccgagaaatcatcgacgtaggagaggaacgcggggccggagaaggagatttctcgaatgcagcgttggagttggaattgagcacctggtcgaggaggaaagatctcggagatgaagatgatgaatagaggaagctcgggatcagagaattcttcggagattccatggcggcggcggaggaaggagatggagatagcgtttgaaatgagagacggaggcgatgtttgattcccgatctcactcacgctttgccaaaaccaaaagcaccaatgaggtattaactctcgaaactcgggctttattgggcaaatggaatctgatggaacaaggcatatactttgcgataattacgaaagtgacattgttattttacctgtcttggcccatgggctttttcaagagacataagacccgttgacccattaaagggctgtattaacgacaagttccaatttttatttgtttatcttttgttggaaaatgaaattctaaaaccctaaaaaatccaaccagaagggtagaagctctctcgccgacaattaccggctacaaggtttctctgctcgtcaacgttgtaagttatttcttcattgtaatcaaatttgtgcatgaattaggtcaaattagtagcttttgtagtaattcttcccgaaatgagagcttaattacggattgataacgagcttgcgaatcttatcgttgtttgtttcatgcagctctgaattagtggtattgaaagatgagcttatctcagaatgctccgaaaagtaagggtattaaaagagaggagctcaagaaacagtacgaagatgttgaagatgaggaagagattgggtccgatgatgatctcactaggggaaagagaagaaagacagagaaggagaagcagaagctagaagaatcggaactggttgaaatgaaaaagcttgagaatttgatattcgggtcactctactctcctgttacgtttggtaaggaagaagaagaagatggttcggctttgtttcatgtagaccgttctgctgtgaggcagattcctgactacgaggatgatggtgatgatgatgaagagctttctgatgaagagaatggtcaagttgtggcaattagaaagggagaagctgcctgggaggatgaagaagagaaacagataaacgttgatatagctagtgtcaaccgtctaaggaagctaaggaaagaggagaatgagggtttgatctctgggtctgagtacattgcaaggctgagggctcatcatgctaagctaaacccggggactgattgggctcggccagattctcaaatagttgatggagagtcttcagatgatgatgatactcaggatggaggagttgatgatatccttcgaacgaatgaagatcttgtggtgaagtctcgtggtaacaagctgtgtgctggtcgtcttgaatactctaagcttgtggatgccaatgcagcggatccttcaaatggtccaataaactctgtccacttccatcagaacgctcagctgcttctcactgctggattggatcgacggttaaggtttttccagattgatggaaagaggaacaccaagatccagagcatttttcttgaggactgtcccattcgtaaagcggctttcttgcccaatggctctcaggtcattgtctccggaagaagaaagttcttttacagctttgatttggagaaggcaaagtttgacaaaattggccctttggttggtagagaggagaaaagcttggaatatttcgaggtgtcacaagactctaacaccatagcttttgttggcaacgaaggttatatcttacttgtgtctacaaaaacaaaagagctgataggaaccctaaagatgaatggttcagttaggtctttagcatttagtgaagatgggaagcatttgctgagctcaggaggtgacgggcaagtctatgtctgggatctgagaacaatgaaatgcttatacaaaggcgtggatgaaggcagcacttgtggcacttctctttgcagttcgcttaacggagcattgtttgcttctggaaccgacagaggaatcgtaaacatttacaagaaatctgagtttgtgggaggcaaaagaaagccgataaagacagtggacaatctcacatccaagatagatttcatgaagttcaaccatgatgctcagattctagctatagtctctacaatgaacaaaaacagtgtaaagctagtccatgttccatccctaaccgtcttctcaaactggccgccaccaaacagcacaatgcattaccctcgctgcctagacttcagccccggaagtggcttcatggctatggggaacgctgccggaaaagttttgctgtataaactccatcattaccagaatgcttgaagtggtctttaacaagggcagttttgggattgttgtgtttcctctttttttgtcgcaagtactctttatgttatcaattttcctatccaattatcgatcaatgaaaaattttctttctgattcttgggattgagtgggccaagttttgttttctcacgattttgacagcatcaaccacttatttggtactatcatctaaaaataaaaatgcaggagaaaaagaaagatgtcaacattatttcatggattaacacaaagtacaaattttagtagagtggcttactaatagctgaaagggtatctcgacccagagattgaatctgaaccgtccattctgggaagggcaaacaaaacagtgtttgtgtctcacgttctcttccttctctaatagagtcttaagccgctttttcactccttaaacccaaaaaaaaacattagtactatttccttcggagcctggccggcgaatccgacaggtcgtttcagctgtgtccgaaggaaagttccaatttttatctgtttttcttcacggaaatccagttaaggtaattgtctacatttctcgatttactttggtttctctgggttttgctgttttcttttctaatttctcgaatgattcatcatttcttgcatttggggtgatgaagaagcacaagtttacacattttctggtttatatgcttcacaagtgcttctcttatgatgttgtttattagtattggttgtttgatttcactgaaaattagtcagtcaacttacagtgtattaattggttcaataaatttttcataattcatttcttaacatgattttacctcattcattatatttatagatttagatcccttgataatgatctgatattctttctgtgaatttgaaagttgcaggtttccacattgcacagctgtaccatttgtcgagatcacaacacgcaagtctcttagatttagcaagcttatggcttcattgcagttgtacggagttaaaactccagggcttgctttaagttcaaagaggcttgagtttgcttcaaagggggcatgtttttcagttacgttgccctcaagtagtgctgtctttagagacgtagagcattcttgtaggaatataggtttgagagttagttgtgaagctctaagagtcgatttgcttcaaagaaaagagcctgagacgtgcgattcaagcggaactggcaaagagttgacatgtgtaatgaaatttggcggttcatcagtggaatcagcagagaggatgaaagaagttgccaatcttatactcagctttccagatgagaggcccgtcattgtgctatcagcaatgggaaagacgactaataagcttttgaaggtaatacaactatactaatcttttctacgtcttccttatgacgtttttgttatcggtagagtgattattttcttggttttccgcttttgttaggctggagagaaggctgttacttgcggtgtcactaacgtagaaagtattgaagaattgagctttataaaggaactccatttaaggttaaagaaaacaatgttatctcatgtgtatttgattgttatctagtgttcacagtccaaatttagccttattctcatgggaaataaaattctctatgttcagaactgctcatgagcttggagtggaaacaacggttattgaaagtaagtaccttggttctcgttctcctattgtagtttcagaattttgctttgctcattcagttgagtttttcttatctgaatccgtttttctggttaatttatttgtagaacacctagaaggactacaccagcttctcaaaggcatatcaatgatgaaagagctaaccttacgcacaagggactacttggtttcatttggagagtgcatgtccacaaggcttttctctgcgtatctcaataaaattggccacaaagcgcgtcaagtatgttgctttataacactctggtcctagcataaccttggccctgcatataattgctgcattcatcatacagattacagaaacttgagagtgtgtcaatgctcacaagtatgtactctaacatgagtttagttcattacttgatgagttgtttgcttgttgttggcagtatgatgcatttgagatcggatttatcaccacagacgactttactaatgctgatatacttgaagcaacataccctgccgtctcaaaaacacttgttggcgactggagcaaggaaaatgcagtccctgttgttactggctacctcggaaaggtttatatttttctgactttttatgttgttctcgtggatcaagaaatatgtggtgctcaactcgggttctcatctattctataaattggaatgggttctgcacaagagttgttttgcttattgtatcaattttgaaaacaaaacttcattctcgtatgcatgtgtttctgcagggatggaggtcttgtgctatcactacgctgggtaggggtggcagtgatttgacagctacaacgattgggaaagcgctaggactgcgggaaattcaggtatttgatggctttggccaagattgcatcatgtagatgaaattttgttaaacaatgattttttaatataggtttggaaagatgtggatggagttttgacttgtgatcctaacatatatcctggagctcaatctgttccgtacttaacgttcgatgaggcagctgagcttgcttactttggtgcccaggtaatctcgtagattagctatgcactatgctgatgagttcttttctgtcagatggctgagcatattcctcttccattgcaggtgttgcatccactgtctatgaggccagcaagagatggcgacattcctgtgagggttaagaactcgtacaaccccactgctccaggaactgtcatcaccagatcaagagacatgagtaaggttcgtgaaacagatgtgtttttttaactccttatatcaaaatatcaatgaccttttcctcctttaattccttgtaggctgtgctaaccagcattgttctgaaacgtaatgtgaccatgttggacatagcaagcacccgtatgcttggccaatatggtttccttgccaaggtaatataattggataatgatatctttattcgactttgtttaatatctcactggaagcatactcactgtctcgtgtgcaggtgtttaccacatttgaagatttaggtatatcggttgatgttgtggcaacaagtgaagttagtatatcattgacattggatccagcaaagctctggggtagagagttaattcagcgagtaaatgtaatactcctttgactttgatagattgtttcttttgtgagggtcatatgtggtattggttaaagggactgggtgtgaacaggaactggataatttggtggaagagctagagaagattgctgttgtgaaactacttcaacgcagatcaatcatctctctcataggaaatgttcagaaatcctcactcatattagagaaggtgagtgagagtaacatgtcttgtgttctcttttgaattttgaagttttaatttagtgggaatggaatgaatgacaaaacaggtgttccaagtatttagaagcaatggagtgaatgtgcagatgatctcgcagggtgcatctaaggttagatggaatccgctgctacatgatagtgaatgaatatggtttacttatggttatagtgaatggggatatgtgtgtgtgtgtgtgtgtgtttcaggtaaacatctcattgatagtgaatgatgaagaggcagagcaatgtgtgagggctctccactccgccttctttgagaccgatccttagtgcaacacagagcacccatctctctccttcaactctgcttctgtgcgtagtttaatgctaagaatgtgtcaagacttggaactatttcaaattcttgtccattgttgttgttgttgttgttgttgttgtgatacaatacatcataatttgagccaaagcctataatcttttaatttaaagagtacatagacaagctcaaaaagaaataaagaaataaccagtgtgttgagtagggattcagatttaaagcttagtttttaggatttaagatttggttttatgacataaggtttacaattattagtcaatggtaattatactattttgttcacaagaattaagatataaattagtttcttcattttgacatcagtatattttcataatttcttcttgtcaacaaaagaagaaaaaagaaaaagaaaaacaaattcagtatagaagagaaagtgagcattgaaggagcaggcttaggccaactccaatgggactctaaaacaccattttagtgtaatttttgcactaaaagctctccaatggaactctaaaattcacaccattttagtgtaatgctacagtgttacatcaaatttggtgtgatactattcacaactctaaacactattcacttattatatcaataaaaattcaattaacaaatataaaattacaaatgattaatagatataaaatataaaaatgaatggatacattaatatattatatctcttgaaatagtttatttagttatgatatttttatattattatgtatgaaaatactcaaaatagttacaattttatgtatttttaaatatatatttcaatatactatgtttataatgttatgtaattctatactagtaataaatactaatcaaaactattaaataataaaagaaatcttttaaatagataatataatagtatatattttttttagtatgatttttggtgttatggtcggaaaaaacacaagttttagtgctaaaaatgatgtaatttgaacaccaaaatggtgttgagccttgaagatgcccttagaaagtaaagaaacactttaaatgataccgaaaatacccttcctgaaaagcataagcaacagttacttgaccagggtcatatccgaccgaccagccggtcaacgagaaatacacatctgatgaaatctgttacgtaaggcttctgtaacggccttccaattttttccatataatatatgataaagtggtccgacaaacgcaatccctcaaagattgttattttatcatcatcttaagaacaaagatttagtcctccaaatcatataaatcagctttaattagtttatacaccaaatcttaaaccaatgaagggacatttaactcttcggactcacttaaactatatatacccatatcttaagctttcttttattttcttaaaaagtaacagaaatgttctcaaatagatcgatgtatagaatatgaataatttagggatattattcatatataatcaatcgatgagaggtgactctatattgcagattgggtacctacaaatttcataacaagttgtttgtgctgacaacgataaatgtttttattttagcatttttcctttttatggaaggggttggtcaaacatgagaaacaagaaggcaaattttgcagataacaaaaggaaggcagaagcatgcatgaaagccaaaaaagcatgtgaccaactttgtaaaattcaaccttttttctcagccttttggtaaaattatctacaaatccaaactatatatatatggaactatacatttttgtctaactgaattcacaacatttaataatcatatataaagaaaaagatggtagcaaaccaagaacacatgccaacttgtaatttccatacatcaagaacactgacattctgatggtaagcaactaaacactgttggcaactacaatctcttttaaaagttcattctcaagaatattgatgactcctttatttctttttatataacattaactagccaattttctatatcccattaggggctaagaataataaaatggttacgaaattcgatcttgatcaccaaaagatattccaacttgtatatatgtttagcgctacatttgtgagatgctaattggattacacaatccaaaatatatattccactccttttgcgatcatattgataatggtattatatgtagcttgtttatagagattgattagagaggatttgagagcataaagtgaatacggaatataatggaaaaccaccggccatatatccaaacattcgacctcatctctgcgttacgacttgctcacataatgttggcagcatcaaatttattattcggcgcgtctctatatacaatatatatatatacacatgaatattggaccatttgtatttatatatatgcatatattggaccatttgtatttgataatattggaccaatttcgcagacaaaaactagctagctagtgtaaatgtgtaagaagatattacagaaaaagccgacaagaaggatagatatatccattaccaacaattcccttattctactaacctatttaactgaataatattctacttttatatggttgtaaaatcttgaaaaaataaataattatacttaaatgggactcaaatgtctcttaaaaatatcatcctatcataacaaaagctagcaaccatgatggtccatgactatcacatcaataactttgttatcatttggcatatcctctctaataatatgccattttaaaataaattaaaacctaccagttaaatttagaacttcaccatgtataaatactctgcatgcctctcactctctccccaaccaactctcacacaaattctctcgctctctcactctcttattctctttctctttttctctaagaatacaaaaaaagatgcaatacaaaacagaaactcgagggtcgttgtcctacaacaacaacagtaaggtgatgaacaacatgaatgtgtttccgtcggagacactggcgaagatagagtcgatggcggcagagaatgcggtggttatattcagcgtgagcacttgctgcatgtgccatgccatcaagcgtctcttccgtggaatgggcgtcagccccgccgtccacgagctcgacctcctcccttacggagttgaaatccaccgagctctcctccgtctccttggctgttccagcggtggcgccacatctccgggggcacttccggtggtgttcatcggagggaagatggtaggagcaatggagagagtgatggcttcacatatcaatggctcactcgtccctcttctcaaagatgctggcgctctttggctctgatgagtgctaatctcatcctccaaatatcaacctttggtttatctttggtttttaaggacagaagaaataggttaatcccagtgttgaattagagacagtgagagagaagagtgatgcgtttgttttaagcttagctctttgtctatcttaaatcacactaatatataaatgttaactaatcgctatgtctcttgttagctttcttatctctaattttacaatttgacagttgatttgcaaaatttaatggtcatttttcacaaataaaaatttgccatgaaaataaaataaaattaaaggtcaaactaagacaagaacgaggaggttattttcatgacctaaaatcttaaccgttataactgttaacttgtgggggaaataatcacctcatgaggggtccccactccagattacgtggagacccactaacaataatccgtgattttgacccgaccgttgcgtcaagaagagcccgtacatgatcatccaataacgtcactgattttacagctatcaattccttcctaattcatttttgcttttaaaaaacaaattagagaacacttcttcagtcattcatatttcatacaatcacatgtcaccttttctttgttttttcttcttctcaaagttgtaagaaaactacaattacaaggtcacattatctgagtttggaaggtttttaaacatttcacttccattacaactttaaagggctcatcaattaccatgatgagtaaaagaaggaactaaatagcatatataccttgagataagttatactcattagaataattcttacgtagacaataaacgactcgtaacgtgtaagtcacccagagatcttgattacagcagtataggaatctacacagaataaagggaaatacaatttggggaatctaatctaattgcctattggtgtaattatgtgttctcaattgctcgaataaatggaagaatggaatcaggatcagatgatgaacagaaagacgccaacaggtcagaagatattgtgtgaacaagagatggcgatacctctttgatccattgcatatgtctaattccaatctcaacctctttcgcatccgccacacatttcagcaacacgacatgtgctcctgtgtgttctaagtgttctctctcgcgcagcagctgcgatgcctcaccagaatggccttcacacatacacaccaaacgaatcaataaatatcttgacatgaggcaattggaaaagactagaagacatatttgttctctctcaccgttgctgcatagatttaagacaaactcgcttaatactcttcttgtaactgttttatgatccctctccatgcactttctgaaaacttccatagcagcttcaatttttgtctccttgcataggccttcaatgagtgacatatagattgtttcatctggttctatccctctctcaagcatcttgtcaaacagccttaaagactcctctgcctcgccttcctctgataatttcctaataagtacattatatgtcgtcagattcattttgcagccctccacaaacatctcatcccacagtttctttgctggacggatcatttccgctttgcaacaagcttcaatgagagcgttatagagtgaaacgtctggagcaagcccttccttcttcatttcttgcagagcagtgtaactttctctgactctcccagccttgcacaagaacgatatcatcagactgtaactctgaagttctgagaaataacctttgcttgacaaaagctcataagcctttatcagatgatcactcttgtcatgcctgcaaagattcttacttaacttgctcagagtccgaatagcaggcaatttccctgtgctgaccatgtaaactaagaattcaacagcagaatctggatcaactgcagagacagatccaatcaacgcgtctaagatatcattatccatagggaattttccactcacaatcacctcagccacttccttagcctccgttaatcgcttagctgaaatcaaatccagaataaaagctcggtaatcgctgctcctaggtgctactccgagctttctcttcttctttaaaacaacctgtctctcatacagattcccagtaactacaaacgcttcagctatgaccctataagccataaaatccggtttgcaatctatgttccttagctcttccaatatataaaaagcatccatttctcgtgaacacttacaaagactatggagaatcaacagtgcaatgattgagccattgatattcaaattagcctttttaacctcatccaccaatctcaagagctgattcgtttcagaacttctacagaaccatcctatatagacaccgaatccaagagtgttcaacgaaacacctttatgacgcattttaacaaacagtttctgtgcataatcataacatccatcagaagttaaaccagctaaaagacgattgcatacatcgggatgaatctcctgacccgttgaaaaagcttcttctaaaacccaaaacgcactctgagctttcctacccagcacaagcgtatcaatgagggagcgatacacggaagaatcgagaaggattttgttcgatttaacctgtttgaaaagagcgtccatggcggagaactgacgagaaagcgaaagagacttgaagatagagtggtaagatatggagtcgtgagagtaacctggttgctgagcagcccaattgaagaaaccgagagcaagagaatgatgattcagcagaaacgggtctatgactcgagccacaagcgaagggcttattgagtgacgaaaaccgagaccgtgaagactctgttcaatcaatggactccatatccgagcagctcgagagcttccggaaacttttagcagctctcggccgatcctcaccgcaagctccgtcgcaggtctcatggccgagaagctgacgtcaacattttcagggagtcgctgacaagttggagaaatcgaatttggttaatgagtccattagttagaagtcaaactcatactggcccagtccaaaaagtgatttttagtgacccaaaactttgcatacgagattaatccttattacttgcccatttttggcccatcaaatatctgcatacacacagtaaatgtcgttcaattgtttacatgagaattgagaagtttcctagaggaaaatgacaacaattcacaaccagacatgacaacaacaacctcactttttggtaattttgcagatggggtctataggagtgacccactaaaagaataagaagaaaagaaagaaaccattacatgttttacggtttcagtaattaaatttttgttttaaaaagagaatatattatctctacttgggaataatgtcgactgggagatacaataaggaaagtgaaaatataggataatataccaaaagaagatatgattgaggaacaagaaagggagatatgtcgacttatcgagtgtccacgtgaatttgacataagtcgatcacattcttaagaaaaaatatagaagataatggagtgggaacaatggaagtgactccagattgcaaaatttagcatttgtaagtttgtttaaatctggcacaaaagtgtattgctttccctcttggtccccatacctataccacctacttctgtttgttcctttgttccttgttcctttgtttcatcccaatatgcttccctgtaatccccaattaacccatttgctttatcattatcttttcatacttgttcaaactaatctaatctgcattgtctatggtgtttgtttcacacagacgcctaggttcaagattcaccatctaattcttaccactaacaagttcctatttgatctacaaaaacaaaactatgtgcttctaacgctaaggagatgggtgtaggataattaatagaggagaacaaacccatagcattacgagttgtaatattaaaaacactgaagcaaacaacagtacctgatgtcgtggacagcttcacttgtctgaatcaactagccccaaagtcttcgttgttttgtcacggagctcccatatgcctcctggaaaaagtactctttctttacttttctgcaggatggtcatcaatccaaattgcattttcttcttgtcggagacagacagatcaacaaagcagactctttatataagaaaattattaccacataatgcagcctcaatcactctaggaatagaatgcagccacaatcactctaagtgagcaaggagccagcattgattgttgtttcaagtaaaataaaataaatctctaggcaaagcagtatcagtgtaaaacacagtttacattgttactataatcaaacacagaatgagtttgtacctatgtaactagatttcaagcagagtgcatactccttctactgtactagagaagaatagaccatttcactcaatttgcacgaaagaaagtctaaatatcaaggtttttacaacacagagcaatagcaaaaattgactatttattcatgctttatctgcaaatgacttgtaaatgtaaacgccacataaaatccactgttttacaatgtagaaactcaaatcaagataaaatagtaatacctgagatgctcgatgattgtaattacggatagctactccatcaatgaatttgaggcgtcatgtaaccacaacagtaggggctcaagtatgtaatggccctccaacttgttcttgatgtgatcttgaaagagaatggccaaccaaaattttgtagctttcttggtgttggtctccactgtcatcaacctaaaagacttgagatacagttgcaaccaattcactgccacagtaagactttaccaatcattgttctctataaaagtcactttctcctctagtattctgtagcaactgaagcacgaaaatgaaggtatggtctatatctaaaaaccaaaattaaatatctcatagctaacacttacaaaagctcattttctggcagttttggggctggatgcatcataagttccgggagaatagcaaagagccattaaaagatgcttctactggtaatttgactgtacttctctggcacttcttttcttgtcaaatatgtagaacaagaacatgaagtgtgtttgaatcctaggagaatagcaataggacttagcaagcatttcaggactgagtaataatctcactactattaacatccatttctagaaaatcaatctgctgacctgataaaagactaggatcatgcactcgtgtgcaaagcattatgatgggtgtcagctagctgaataaaaagctcacctactcaatttgcctgaaaccaactttgtcttgcgcttcgattttgtgagtgatagatagcagccaaaccagctctccctagcgagtattatctagtaaatgccatgcctctacgtgcatgttacaataactcagacattttccctagttcttgtgcaaatgcatctttttccaaatctcactggccgttcttacttattcaaagaaataaagaactcttctcttcacatgaccatttcaggcaacagctattccattctttcagctcatccatcccttgatagccaagaggtttacccaacagcatgtgctggctccagatacaatactggattcagaaaacaggtcaacctgttccaggaaagctccttcgcaggacccaagcaatacacagaggaagacttcaaggatgagagaaacagtgatttttttgatggatttcttgccattggaacccttggtggagaaacacttcttgatgaacaaccagcaacgccgacatttggcatgtcatttgaggacccagcaatagatgatgcagatgtgacagagaatgatttgaagctcataagcaatgaattggataagttccttgaggctgaagctaaagaaggacaccaccaaccatcaggaagaaacagtgacactaacactattgcatccaccattgaggccattgagggagtagatgatgaagaagataatcagccaatgaagttcccactccaagagtatttttttggatctctaatcgaactcccagaatcaaagattgcagggaagaaggatagggcatcacttggcgaactgtttcaaataacagaagtgcaagataaacaatcagaaaacatatatgggaagaaaaagaagcaacccaattcagctcacaagtccgcaaagcatcttgtgaagaaggtactgaaaaagatacacccatcctcaaggggctctgtcagtggtaaacctgaagtggattccacaaaaaagaagttccaaaaggtgtggctttttcagctctgcttttttaaaaactaataatctaaaaaaacgactgcgtgatacatgatacatgatacaccaaacttcagatattttatcccttactttgatagcattctctggagctatcatatactccattgaaaagcttgctcctaacaaacttgaatttcatgtgaggagtgcagatggtacaggttttccataggaaagtacatccagaagaatccataatggaaaccaaaatatacagcagcgtggcaaatccaaaaagcagcaaagcaaattctattgacttaacattcgagaaggtgaaccattgtcacgaggcaagtaaaagatgtatccagtatgagcttagaagttctcgctcagccaaaaacggagaacactggatcaagacagacgaagactgtaagtccaccatcatatgcaattcatagaattgtttgcataatcccttttaactcaaaggaagaatatgagtctaaattttttgataaaatggtatttaggcatgcacaagtattctgcttgtgacccaaccggctaataatccataattgatttgcagatttcgtgttggaactgtaacaaagggatcagaagaactatgtaaactaagaagtgtaagtgtataatttcacttcatgcatgtgtgaattgtgtggtatgattaaggaaaatgtgttcaaacttactgggaatgtttattacgcccctctatgtaataataaatgataaagggtgttataattgcagcaagatatctcatatacattgtttggagtagtagaattaagagaatgcaagcattgattcaaattcaattatctgttttaatctcagaagagagaggcataatgtttatgcctctcttagctaataagccataatttatcattatctcctacacaaaagaacttacatagaaaatccaccataaagtatgagcggctatcttatatttcatgcaataaaaaacctaagccagggtaaaagcctgtatcactttttagctaaacaaaaatcaataacatccgagccaaacctggtatggaccttccgtaatagtgaacattgaactaaagtggtggacgttctgcaacaagaacaccacctgtttccatcctccatgattggtcaaccaaggctgctaactctctgcagcaaggttcatacaaaaagcaagagaagaaaatgcactagtagttaatgttaaagggagaaattggatacatgacttttatgagagctcaaactgatttatattgagacaggccaagatgaatacatgaaaaggtttctttcccggaaaggcttatataacaaagttctgaacagctatttgcgtagagaaagagctgactctatttccataccttagatcatgacttacaacaagtaaagtcagttccttcttaaggtgcttcaagagctttgcaacatctgcacgtgctttccagtctgattgcagaacaaaatcaataatgaaatagtatgagaaaactttcacggttttcattcaaaagaaaagaaacgcagagcatatgcagagagaacgccaaagaaaaaaacatcttctgtaaagaatgagaagcagaaaaccatgggagagatggacatcaagcacctgttgataaaagaggataggaaaaatctactaaaactcaagaattagaagatgcaaaatcataccaagaccagcaaggggctcatccagtatcagtaaatctggagtttgcacctacaaaaagcagaactatttagaacagttcacactttggaatacgtcaaaaaacattgttctcaccaattggatagctagtgcaagccgacgtttgtagcctccacttagtaactggggatctttatcaagtgggatgctgtctaatccaacctaacgtttcaagaggaaagctaacataagacagatcgttggacataagataaacactgtccgaaccaggaggagtggaatacccaattaaatgctctctggagattcgaagtcagttgctccttaagctgcaaactacctttttgccttggccaaccaaaagtaatctcatcaagcacattatctgcaacaaagaatctagccacacacaaaaaagaaaaatacatcgatattttcgtgtcacttaaacagcagcacctaaacctgataaggtaaaaaaaaaaggaaaaaagatgataatgagaattacctttctggaaactggaaaacaatgcccaccttttcagtgggaagcaagtcaggatccgccttcggctggccatcatccccatatccttggatacaaatggaacctgatgttggtttgtttagcccagcaagaagctacagaaaagaagaagaaaaccccaaaagttgctacagactacaaacaactcaaagaacagtgccggatagctgtgtgtgatgacaagctcgtgagacaacaaaacaaacctgcaaaagggtagttttaccactcccactcttcccaaagatcaagccaaagctgcaaagagtaatagagtcacaaaactattaagtaggcatgttgtttatacacagtacctcaagaaacagccggaattaccttttctcgcgcagggaaaaattaactccattcaagatattcaactgtgttccaggaggacggtagcagacatctctaaccttgaaaataaatgtaaggcattctcacaattcaatcctttagaaagttgtatcaacgacattcactcgaattggaaacccacctcgatgcaagaataatcgcaagagattactcgaggcttcttcgtcctccgaaatctcaacctgtcaccgaaacaaaaacaaaccagacacggtgagccttcaagttgcgatgaagagtacacaaggagagtgatagattatggaggtcgtgaggaagtggcgtacggttgcttccagccaattgcagtggaggagaatgatgctggtggttcagcgatgccgaagacaggcgtggggctcgaaaacgtcgacactgccatggttaaccaatatactgaatgtcctccgccaatttctcgaactgggaaattaaaatcggaatctccggaaagaatccccggaaattttcaaattcctagtgaaaactgaaaagtgaactaaaaaagaataaaaattgactaccggaaaacgttggcggaatctccggtgagtttaataaatcgtaagggatgagtagaatgggccttaattgggcttttgaggcaattttgttttccttttaacggcttggattgttttggttcagttcaagagctgaatattatgatgtccaattagaattccgatttaagagaacaaaaccttatgaaaattatatgtaactgcgaaagaagatagagattatattattatgttttcactcgcaagaatgcttaaatgttaagaggtgagattgagaactaaaaccctttaaacatataaccaaaactctcagctaaaaatagttaagtgttgaaaccaaagtcataaatccgactcttacaaagacccttcttcgtgtatacatagaaacacactaatccttctcttttggaatgtccttcttcggaacctttacctctatttcctttggttttatggactcagctgccctgaaaaacgcatcaaattcatcagttacacacacacacagacaaaactacttgatgtttctacaaatctatcaataacacaaacattgaacaataacatagttgtaccaacccaaaccacatcatcaatcttttctgatttctctaagttaccaaatctcagtgatcctaaaatacaactgatgatcacaatagaaactacaacaaaatcgtttcaactatcttctagaatctccacatataaacattgtatattggttagatactaggatacaaattcaatcaaagagaattagagaacttcttatataattggttaactctctataattccgattactttgaaactagcagctgcagataattgacacaggatcaaaatatcaccaagtgaaagaaaactcggtaaatagaagactaaaccggtttacgaaatcaaataaccaaaggaacatcttcgcgaaaggggaaattagaaggaatcaagagagagatgatttacttggaagaggcggcggaggattcttcttcgagccagtggcggatgtgcttgacgttacgcctgaggacggtcacagattgcttcacgtcgctcctcagtagcatcaccacggcgcctactccggccaccgtcaatatgaaattcgtcaaacccattttccgattaaagatccgtaatagcagattttgatttttcccagattgaacaacttctcggtggaagctagctagggatttaaagagggcttatgttttttttttttacttggagaagcagctaaagctcatgattcgttcatcgtgcgtaattcactatgattcagtaccctttttatgggccgtcgttgtccatattatatgggctctataaaattatttaaagcccacttaactccacaatatgacatggccatgcagagttatttcatgttgataccattttttattttatcttttttaatgttaacaccaatataatggacagtgtgttaaacttacttacatatctttgaccaagcaaggtctaattttttttttttaaccatatattccacatcgaattttagactaatagacaggtgtttgtttttactttttagctataagctataggtttaaacttgatgaagcctttgaccacaaaaaaaaaaaaaaaaaaaaaactggtgaagttgtagtacatttgacgtgacgatagctcgttctgattgagtgcaagttagagtcgagagatactatatccttgaagatatatatcaacgtatcttcacatgttgttttcattagcaactctatcaattgattatcttcacatgttgttttcattagcaatatactatcatccatattaaagtcaataccgtatatatctcttaatattagtctacttcttctaattatgtagtcttcaatgattgtgttgttgtatccgtataaatataatcttcaattacaatctagaaatacgaatagtcgtcgatctcatctgcgattgcatgcttctttatcaaaggatggttcaaataagaaatgatatacatagttagaagtaacaacaaaacaataaagaaaaaggatttattgtaattccaatacaagtacttaaatggtaatcataaatcaaagcttaccaaaaaaacaataacaaaaaatataagaagttaagagatacaagcagctcacgagaggaagaaagaaaacaataaaatgttaaattaattaggcaacatagatgtggatatgaagagcgataatagagactgtaatgcacgcaaagaagataagagtgtggatgacaatggctgcgccgcttgtttgaaagccgccaaactcaaccactttggtcttccctggaagctgaaacaatactccaggcgtcaatacgatgaacagaaataccgacattaagactggtccccaattcaacaccatttcaatataaagaatcaatcgatttgatgtatatatgtctatgtaaattagaatcgttattgtatgagctaggtagtgtgtacgtttctatgcaccacttttatagagtgattgaattaatatggaggatcgtaatgaaacagtggcttgaaccggacgaaattagaaagtttgcaaggtgaaggaaagaacgattcccctgcagctactcgattgtatcaaagttatatattattatattgtcacactatgtattgattgttgggtatgctaagaatctgattcttgtctcacaaacatttttgttcaccctcttgtttttttgttataagagacatttgccttttttagttcttgttaggagagacatttggcctttgagagtctgtctcttttattcaacaaattcataataagtaaatttctatatatgcctagtaagtataagtgttttccatgaaaatggcggttactcccgacttatttgaatacaaaatcaaatggataagttgatcgaataattaggaaacgacattatgtgccaaaaacaaagatgataaaatatcaattgctgtccatataaatctaaaacttatccatatccgagtcaagccgctcacatctttattttattatttaatttaaacgcatgtttttatttaatttatttgttgatacgaacattttatttaatagcatgttggtctactataaaatctttccatatacttctctcatataaagacacgggaaaacgactcttcacccaattcttgcttgatttccaaatgctaatccttgatgataagaaaacgtataaccaaacaaaccaatcatattcatcaattgatttaatgccaaaagttaaacagtgtcttatgctatgtgcaaagaacacatgcatgcaagttgcgttcatactggcaaaaaatacatgtttgcaaattgcaagttgtgtaatatgtcaaattatatacagataatttttatttttatcacaaactaagttatttttccttttccaacattcataaccccactaaaaagggttggattgaaccttaacgacaggtcatggtggaaccacccccacccaacaggccacattttgattataaagaaaatttactctcgcctatatataacctcctcaacattctatgaaacagcgtattaaaaaatgataattttatctcatttcacttcatttgttacgtcatccaatttccgtcagaagaaaaactgtgataagatcgattccattcaactagttggtaccaacaatgacaagaagtatcacttttgaggatattcactaatgttaactttcgtgaataataactttttaaccaattcaacgtgcatgtatagttggtaagaataccagactattccacgtactaccaagattagtttgtgttttagccggcttgtataaaattaataaatattattttattattcttattttcataaattatgataaatatgctttgaattgctgtttaaattttcttttattaattggtccagcaaagacagatttaaatccagttaacgataatgttgaaaaaggcttaagggataatcaaccttaattaaaagactgaaacaatgacaggcacgccatttaaaaagatggcaggcacgcacagagaattggaaaacagtgacgaaattcacaacagtcccacggtgactgactactactcataattatcaacgagccttttgttctacaatttgtatacgacttcttcactaaaatccacttttttctttttcttcttcctcactaaaatccacttacaagttgtaaccaaattttgatcatattaaaattatcgtaattaacaaactaaacaggaatcgcatatctgcaatagtaactatttcacagattggttttatcttttctatgtcttgtccttttttgtccaatttaagaccataaaaggagaaaatcgtgtgaaagacaagacagatagacagacacgaatattcaaaaaaaaaaatttcttttctctttctaacaccacagatttcgcaatcgtgttttgatctgattcttccaggattctcccggtggcggagagaagaaacaaaggaaacccagaaagcatttttctcaatggcgtcgactacacgagaaaagtttgtatctttcataaacaacagatggctcgtcttcgtggctgccatgtggatacagtcttgtgctggcatcggttatttgttcggaagcatttctccggttatcaaaagctccttaaactataatcagaaggagctttccagacttggagtcgccaaggatctcggtgatagtgtcggattcatcgccggtactctctctgagatcttgcctctttgggccgctcttcttgttggcgccgttcagaacctcatcggttacggatgggtttggcttatcgtcaccggtcgagccccgattcttcctctatgggctgtgagtatttgaattctctgtctctttgatttatatgtggtcctttaaattcatatgtttttgggtactgagaaaaatttggagactttctattcaaatctgcttttagataatctctgagaaagtttgcttttaaggttgtttgtttactaataatcacgtcgctatcaaaactgttactggattccacttttttcttcttaatctcttgttctgctttagttgaaatcgttctgtttctggcatttcttatgataatgtagtggattagcttgtttaattttttgtatgctgatacaagttgtttttgtatgctttttgttttcagatgtgtgttctcatattcgttgggaacaatggcgagacctacttcaatactggagcattagtctctggtgttcaaaactttcccaagagcagaggtccagtggtgggtattctcaagggttttgctgggctaggtggtgcgatcatctctcagatatatacaatgatccactcatctaacccggcttctctcattctcatggtagctgttacgcctgcagttgtcgttgtttgcctcatgttcttcatcagacctgttggtggtcacaagcagatccgtcccactgatggagccagctttactttcatctacggtgtctgtcttctacttgctgcctatctcatgtccgttatgcttattcaagatctggtcgttgttagccacaacgtaatcactgtgttcaccattgtgttgtttgtcattcttgttgtcccaatcttggttccaatcatgacaagtttcttcacggagacaaacgagcctgatgacacaatagaagaacctcttgtcccaaaacgagaagaccaagaaccaggactgcaaacacctgatctaatcttgagtgaagtggaagatgagaagccaaaagatgtagatttgcttcctgcctcagagagacataagagaattgcgcatttgcaagcacagctaatgcaggcagctgcagaaggggcggttcgggtgaatagacggagagggccgcatagaggggaagatttcactctaacgcaggcactggtgaaagccgacttctggctcattttcttctccttgctgcttggttctggttcgggtttgacagtaattgacaatcttggtcagatgagtcagtctcttggttatgataacactcacgtgcttgtgtctatgattagcatttggaactttcttggacggatcggtggcggttatttctccgagctcgttgtcaggtttgatatctcagaaagccaaaaatcctctgttttgtgctctgttctgatcttgatttgaatgatgtgcagggactacgcgtatccaagaccagtagcaatggctgtggctcagctaataatgtctgtgggacacatattctttgcgtacggatggcccggagcgatgtacattggcacgctgttgattggactcggatacggtgcacactgggctattgtcccagctactgcctctgagctctttggtctaaagaagtttggagcgttatacaatttcctgacattggcaaacccggctggatccctcgtgttctcgggtatgatcgcgagtagcatatacgaccgggaagcagaaaggcaagctcacggctccgtgtttgatccagatgacgcccttagatgcaatggttctatctgtttcttcttgacatcactcataatgtctggattctgcatcatcgcttgcatgttgagtatgattcttgtgcgtcgtaccaagtctgtctacactcatctctatggcaagacccgcacctaagatctctgttcccttttatatatgatcgtgctcagcttcttattctttggtttttgtcttcaattctacgatccagatgttttcgtctctgtatcgatttttttgtttgtttctgtatcgattttgttgttgttgtcaattttgtaattgatttgtatgttttttgtattcatatccacggcaacatctaccatgagtagacttacacaaagatctttagacagtcgcatatatgaaataaatttctgcttgttttcaaataatgttttggaatctgaataatcctgaaaaataggtcaacccctacaatttgagaagttccattgtggattatgacattttagtatagcaaaagcttaaatcaaaagcttcataatttatatgttttaggttatagacatttgttcaataaagctagttaaaagcagagcagtcccttcgaatctcgccttgattcccaaccttaaccccaacgcggccaagattcctcatagcagagctaaaagcgctgtagaattcttcagcgttgttagcaaacctgaccaccgtagcctgagacgagagatcgttaaacagagcttgatcggaggtgaaaagtcctttccgagccacgaggttctggtagtagctattgtcgaaggtatctctggacgttaggtcaatgtctactacagcatctgggttggggtcagagcaggcttgtatcagctgctgagcgtagaccgggtccatcgtagggtccactggcatgaacgtcgagaaattgtggagacggttggcgaaacggttgcagtgagaggatccaattgtatgtgcgcctgaaagagcgatcatgtcggtcaatgaaagcccgttactagcgaagatctggactagacctctcacgtcaagccctggttcaggtaacttgccggtcactctagacgctttcgacacgagcccgtctcgtctccctagctccaccttaaactctggccctccaacctgttatcatcacaaagtaaatgatttatacttggagaaatcaaatgaaacgtcggtgacttcagaaagtggacttacgagcacgacgacgtctctagcggcgagagctagtatatcggcacatgacacaactccgggacattgagattctacagcggttttagctttaatcacggtgtcaaatccgtctccggcgagagatttattgtcatctgcgtctttctctgcgtcttcattctcagatgctataaacacagacgcatcacatccctataaaaaaaacaccaaaattattgacaaataccaaaagactccataaaactctaaaattctacaaaagctagcatccattgtttgtacatatacctcgacgaagcagtcgtgaaagaacatccgcaacgttgcaggagccgttgtgacagtttgtttgaattttgtagtaaccgcctgcttaacgatgagctctacgctaggacatgtcgaggcgtagtaattctctgacagttgagcatttgactcggccaccatggaaaacaacagcatccctaagaaccacatcatcataggtttttttgcatcatcactacgaatatccatcgtgatcgatttttctcctttaatttctttgtcttctttaaacccttcttctgtcgatacagtcctttcttgaataaataggaccacaccaatctgttttgaccctccgatatgccacctcatttatctatagccactggatctagtctctatagtataaatgtgcttatattttaattttttgttaatgaataagttatttgatgattaaaatctaatcacattcacaggtgaatgccagaattttacaacaaggatttctcaaattttacttaagcgagtacacatttcttgagttagggggtttaactgacagtgacagtttaacaaacctcattaagtcagtcatctgcatggaatttttttctgatattttaaaatactttgtcttgatgaaacgtataatatagtgtcgttaaacacaaaatggataaattaaattcaaaagatgagtttgaaaattagtctttgtccatcctaatatgataatgattttgactgatcgccatgaattcagcggaatacctgttctaatttagttcatcaactttagctcaacggttcctctattgtagccgaaattcaaatttaacatttaatattacccaattttggttattttctgatacagatatcttttggtataaattataatagtataaatttatcatatcacaggactagttccccttttgatgataatagaaacttagcaaatattcaaattgctgatgactaaagtgttattttctacaaaagaatcatataatgttagtgagaagatttctagatcatttcaatttcaaccacaaattagaaaactatttataagctcattgcaggtgaccaatatataattatatcagcacgtgtacaaactacgaagtgacaaacacattagagcttaaccaaattactttggtatatagaaatatagaaaatgtttttaattaactatatacaccaccataaagttgattaaagaaaaaagttcaatctggattgatttagaaaatgtttgaatccatattacatgatcaacattctagctatctgatttaattaataaaaaataaaaattcagaattttttctctcttcatttcttaatcaactgatagaaacataatgagttttgttaagaaactcgagtttaaaaatatagtggtgttaaccaatgaggtagtggtaaatctctcaagtgaaggtgctaggttcgaaacatgttggaaaggattttttctccaaagaagataaatttaatctggtgtgaatcccgtttttggaaaatataagatttttgggcttgaatttctagatataaaagaaaaagaaaatggtgtttcttatacgtgggccttctttgggccgaacaagatatcatatagtccaggaaggatccagttaataaaccggagcggaggaaatgttcagttggatacttgtttcatgtttgtgagacgtaaacggaaaattttgaatttcttctgctctgctcagtgccggaagcgatggctacgggtatggcggtagatacggtaggcgagttaggctttccgtactggaacccaatccgacgaagatttcctccggattcgccgttctttgcatctggaaatgtcgagcgcgagctacttgctaaacaggtactccttatggaatctgaatcgatcgaatctgacgtaatgcttttcttagggaataaacaatctacatgatcaattttcagtaaaatcggtttcttgtctagacactctcgttaatggtccacttgaatacttgatgatgatattcgtgttagcatagctcaaatcgaagcggttctgagattttgaggtcgaattatttctttgtggtagtatccagaaacgatttttggggaattcattttcttagtgatgataactgttcggttgctttcgatctgtttggttattctgtaacagcgaatttttcattttgaagaagtcttgtaattaggtctgctttgtcaatttggattaaacgattgtttcattctccttctccatgtagttatatgatgcttagtaatcgttttataagtattatgctgtagattgtttatcatctacaaatatttatgctcgcaagagttgagtcataaaggaggattttaatttacaggtgacattggacttcacagaagatgaaatcaaccatctgcataaatttgtggaaattgaaaccaggtatttctccttcttcacggatgagattttttttttgttgcggactgttttctgatagtaaatgaaaacaattcagtcaactatggcaatgattataatttttagattagattattgcttacaagagtttcatgtgttttacattggtttttgatgtgttattctcttgattggtatactgaagctaagaatctgtactgttatttttgtttttttgtcttggtgaatctggtttggtgtcaatgccatttatcctatttctgattgtttactgtgcagttcacatatgtgttggtagtgcgtgtaagaattctagctaatagtaaccaaatggctatgaatttgatcactgttatctatgtagttttctttcaatatccacatttttaagtggcaatcagtaatatggcattgtgtcactgatcaaatttatgtagactagtttcaattccaaatttggtccacaattatctacgaaatttgatggtcatgagtttgactattttgagcagaagaatctcgtgtcccattgttggctgtcctgaacgcctgaaatctttggaccattttgaagatcactataatgcacggcacactgcctcttgttcagtgtgctcaagggtctaccctacttctcgcttactaagtattcacatatccgaagcacacgactctttctttcaagctaaagtttctcggggttatgacatggtatgctttatatactctttatctctttgtccaaatattaagtgcgttttgaggcagagctcttactgttagctagtgactgtgataccactcctgccatggatctctttaaagtcacatcatatgctaattcttccttctttctgctctcattaacatctttatgcagtatgagtgccttgtggaagggtgtggattgaagttcaagacctacaaagcccggcatcgacacttgattgacaaacacaagttcccaacgacatttgaattcttcaagaagacccaactctcaaagaagcgtagagagaaacttcaaaggcaacatgtatcaaagctgaaacatgaagaagacaaagaagctgcttcgtcagatgccatggaagtagaagacaaaggcagcttagacggtcttgtttcagcactgtcctcgctaactacctcagacacaactccttcgaatgtcagcttcggtcgacgccatggtcgtgggctgacctttgttccacggtctgttcatagagagaaacggaccgaatcttcgtctgcaccaggaccaactaattagtcatggtcttgtagttcctcctagtctgcagtaagataatgaagaaattttttatccttatctgttactaacattcttagctgctgagtcttttgacgaatgcacacgagctaaactttatgttttaagtaattaatttcaaaaaagtaaaaattcgagcaactttgttgcgtatgcctcaaatttttggtctatcaaggaaggtagcaccgattcttggaactggagatgcttgttgcgtctcagccctcttgcagaaagatttacaaaatgcaccattggcaattgacttactgcaagtttttggagagactgatggacgccatttgggcctttgatcaagtttctgggtattgatggaccaaggaacctcaggatccctattaattctaaagtggctgcagctgtcgatggcgacggctggattttgccatcgccgagatcaagcaatgcgctagagcttcatgttttccttacaacattacatctacctctgcagccccttgatgaggactcttatgtttggtgcgtcgataatggcaatgatatcaagttttcctcaaccgaaacttggaatgctataaggcataaaaaggattagaagctatgggtgtctttgatctggttcaaaggagctacgcccaaaaatgcttttaacatgtgggtttcacatctggataggctgccaactagatcaagaatggtttcttggggtatgttggtttctcctgtttgttgtctctgccaagtttcagctgaaactagagatcatatgttgttgtcttgtgagtacaatgttattctatggacctccgttcttcaaaggctcaggctgccttcgagagttttccaaagttggaatgatctgatcacctagacccaaaggagaaatagcacctctccttcaacgctcaggaaacttgtcgctcaagcggtaatctatgctatttggaagcagagaaacaacttcattcacaaccagcaatcaatccctgctgcttgggtgtttaagaccattgaccgtgagatgagatcattgacaccatcaatgcgaggcggcaccggaagaagttcagaaaccttataaggctttggcttatctgattgtgctctcccttttgaattatttctttatctccttgtttttttaaatctttttttggtaaagttttaagtagtattttggtaatcaaaatgtaaatccaaaactttcttcatttataagatatttacccttcgaaaaaaaaacaatttattttgtgccgaacaaaagtacacaacatcatacaagtcacgtgatgtgcgttaattagaactgcatcccgtttcccagtttgtagctaaacgtcgcaccattctagtgtacgttagacgacaagctttgtgctggaccaagcttcctgcctcaagcattaaggacactgacacagatactcgctctactggatctctgtgaacaagcaggttctccctaagctcaaagcccttgcagatcccatttacatcggggacttagtgtctgcttattcaaggcttcaagtgtgtatttgtatgtgtgttttctagtttctacataaatgtagaatttaaaagtgtcactgcaaaataagccatgattgtgaaagattcatgtgtaacgaatgtgttcatatataaatcatgaagctagaatgattatcacatctccttgcaaaaatatcttctttatgacctctctcccaaacagtttcaatcagagaactgcaacatacaacaaagcgaaaataagtagcagccaagtgggttttactgaggctgttccaccaagaggatgtaccatcacttcatcaatcacaggaccacaaacaacattctcttttgtcattgtaactgagtagctggtgaaacttatctgtgctgcatctttgtctgcttcaaacactaacccaaacttctcaccagagccagtcccattactctccaatgtgaagttttgagttacggagccagcttgagcacccaccacgaaatgtcctctgcacgcatcgttagcatcgcctaaggtaaatgtgaggttgtatcttgaaccttcacttgtgccttttgttgctgtctgtatgccagatggagctgtgttagacagaatttctattgcagctttgccttctgggacatggaagtgctccgagtctatgtatctgactgttcctatgacagaccactgccttaatggtgattgaatcaggcttggaaccgcgtcaatcagaactccatcggttgagttgggcaagaaaccaggtccagactcaaatccaccattgattaagaggttacctacaccaacaaaatcagaatatgagtctatgcagctagatttacaagacatcaacttatataaaccagacctgctttcatcatgttccatattgagctatgagttcagcattagcactctcgggataaaaaaaaaagcagaagggaggagaagtaacttaccactgtcttggaccaatgttacaccaacagtcttgataagcaatgtgtcaatgataggccaacatgtggagtttgtatcagaatcagaatctattgcctgactttcaagaactaagttaataggctcaccattcccccaactacccaagttatgactgtagctctgccatgaaaccttactgtagttttgtctgtaagaaaagaccgcattgctgtctggccccgagacactgagaccagcagagcttgtacagttctggcctgcgtggatcagtgcgaatgtgaggatgtagttcaattcatcacctttggcaatgaatgtttgattgatcttgccatcttcaccgagctgaaccgcgtgtccggtatcaggcagttcaacataaagcactgtcccttggaatgtccatcccgggagtgtactgttctgatccagcgatacagagctagcatttgagtttgtaggtaagtttaacggtggagattcgaagtctggattttccaaaaaatctgcatatcaaaatgtacaaactttagtttatcaatttgagttctgaagatgaaagaacaaatatataacgaagcatttgagattccaatgtacctgaagaggcgcaacaggaaacgagaagcaacaggaaaattctctgaaaccatatcgccattttgcttcaaactacaaagaaaaccttgaacgtcaacgcttcttggatccagtgaatgtgtctattaattagtaaaatatttaacgagaagaatgatgctgtaacatgttagcataaagttgatcattaataaatatattaataattctctttcaccttagtggacttgtctttgagttgtgcacaaatgagaagactaaacacacagatggtttgaagaagccagggccatcatccatatagtagaactgtgtctttttggatctggttctagtgtttgtacatttcaggaaacaaaaggttggtgaattgagagtgtgaacaatgttctatttaatttggttactccaacctaactcttaactcactcttagactcttagtggttggtgtattgaccgaattattatttttaagcagtcttgaagacatacaaaacattgcataatcgtaaaaaacaaaagtcacgaaatgaaataacctactaaatacttgtggaattaccaaaatatttttgccataaattattatgtttttttctcgaacatatatactgtatatgattactacgtatcaaaagcaaatcctgattgaatttggaatttgatttggtttagattgcctcgtcataactggctttagaaaagtaaaaagagtgcagtttgtgacgacttttagatatggctttgattcacaaacgtcaagctctcaattctaggggggtggattggtcggagcttcctgaggatgtgatcagattggttctgcgacggctgagactctcggattttcatcgagctagggcggtttgttccacttggtgtagggtttggggagactgtgtctccaaacctaatcaggttccgtggctaattcttttccctgatccagcacaaatcagacgcagttgcatgttgtacaatccacaggaagaagaaaacgtttacacaattcaagaccttggtgtggatccttgccttgcaagttgcggcacctggctcctcggttaaatctatatcttgtgaatgtgctaaatttggagaggattaacctagtagctatcgagtctcaacgtgaccagctcttttcagcgtactctacagaaaaggtcattttgcaagcaaagccgagatgatgggataccctagtactgataaggcagttgtgtggatagacgagaaaactaaagactacgtagttgcttgcagctggggtggagacaagcatgcagccttttgcaagaaaggcgattgtgaatggcgccagattcctcctttgttggggtgtagtgatattgccctcaaggaccacaaactttacatttactatgaggatggtagcatcggaatctcggatttgaagtttgtaacaaaaactgctcatgttcagctctatccctttcgcttccgcttgggatcttttagcccttatgatacaatttggacagactatcttgactggaagaccaacatagtaatcaccatctctggagattttttgatggttggctgcgttcttaaacgtcgtgacctttcctggctttttcgtggcgaccaggccgtgatcttggatctaggtatcaccgtgcaagcatcctccgatatccaaggtattaccagaaactccacctatttcagcggtcttccatctagccaaaaggatgtcttcgtcttcaatctctcctcccagaaggttcaacgcctttcgtcttcttctatctcctccagaccattctctaatgctcgctggctcttccccacttcttacttcacaatgatactctttccaaacattttcgtttttgttcaactttaagtgttttttttttttaataatgccaatgttattttccttttgctaataaaaacatgacttaaccattaacgcaaaggctacaaaacaaagctaattatataaagtagtaatgtttcaacatacacaagattacagatacactagttcacttttaaaccagactaatctcaacaatatcttctactaaaaatgctcaaacagatgaagagacttgtatcgtcaagaaactcaccaactccctggcccatcgttcccagctgctggcctccggttcaagtaacgtataactgcatcttcgaccctgcaaacattttaccccaaattatgattcagaaacattttacaactctttgaccaaaaaaaaaaaaaaacattttacaactcttaatacatatcatctgtgcgaataaaggccagagtagcagagtctagatgattagcttaccaaggttggttgaagaagtctgatcgacgttctctctcagcatttcgactggcttctcccgcaacgacctttagatccttgctctgagattcgatcagggcgtttatgaattcaactggcgattggctgaaccccaagaaaaatgcccgcctcctcctatgctcatggattttccttatggctgcacatattgcttcatcacaagcctcaatctctttgttcttctctgcgttggctagcaaattgttcagatctctttggatcgggaagggtacatccactagcacatcgtaacatgctgatacggccggattatttcctgagagcttgattttgtgttctaagtgaataggtggtggaggcgacaagtgatgagatattttctgagagaccatagtgaatttcaacttttcttctccaaaaactttctgaagtgcagcatcacagttgaagaaagaggggtcatttgggttctgcagtttcctcgccttaacgtaatgccaaattgcagcgatgattcttgggcgggtttcaacctcaatcccgagaacatccatcaatgcagtagaaagcttgaacttttcagggacgtagttcatctccaaccgtatactagcagcaaactcctgattccctttcctctttatctcaaagccttcctgaggagcaggtgatcgagcattctcccatatgatcaatgggttctcaggatacagcctctgatccagggaaactgtaacccttttgaagaaagacgagaatttgggatgcaatgggtttgctttctgaacaaaccctggctggtcgggatccaccccatcttccagtatcctaccaataattttaagagtccatgttggcgggtcagcattaggattcccagggatcgtgttgttttggttagcaaacgagttgaaaacgtagatcctaagagtcttctgtatgcagggagggtttttaagggcttcctggatgtcaactttctttctagttaacgcagcatcaacccgagactcaaactccagaagttgtgtgtataaggcagactctggcaagattgcagccacccgctcctgcaatgacttttctggaagcttttgtttctttttccgagcagcaggagttaactccattgttctcattggggagatagtgttgttactcgcaggagcaccaggaggtcgcatcggcggtttctgctggaatctcttcatgtttaaacttccaggagtcgtcaaagaaggagaagaaggacccaagccaccaatccccggagaaccttgtgcttggttcatcgtcatgccttgagcttgtaactgagcttgcagttgtgcttgaactttagactgtgcttgagcatgggctagggcctgagcttgagagaactgaaactgagcttgaaagttagctgccatatgagactgagcaaaaccttggtttccaggaacagatgcagaggccatcccaggattcccaaaaggcaaaggcgcagagccttgaggcttttgtggattgttgttgttaccagacattgctatataaacctatcagcctgaaaaattcagaaacaaaaaataacactcttgaaaaataaacttcaattacacctaacgtatcgtaagcttatcagaaatctaagacatatatgcagaaattcagatgaatgcaatagatcggttacctagagaaatcgaaacctcaaaaccctaattttctaagattgctgcagagttcaactaaataggagtaatacccaggcttaaaaacaacgtcgaagagaaaatgactgaaaatgcgaatgaagaactcgattggagaatttttgaaatatactactaagtggccatagaaagatctggaatttacaaaatcctaagagatacaaaaaacagaaaacccagagcctatacaccataaagatcgagaattccttaaaaaaacgaagattcgcagcttggtacctgcttttttgattcaccttctttccgggattcaccggtgttccgttgcttctcagttgtcgagactcgagagagaaaacaaaaacaaatgcccaccggagctatctattttactgtccgggttaagacccgacccgtatttttaaagcccacattgagttatatcaaactggcccaactttaatccatgtgtttttttttcaacgacaaatccacatacaatttgacgacaaaattaaaaagaaaagcattccacataattttgttttactatagtttttcgtttcctttttttttttttgtcaaatacgaatctgtagttttagtgttctttcttaaatatacctaaaactagggtaaattagataatggttgccccattgtttatagattaaagaaaaaaaaaatctaaattaaatattgggattattttaattagaagctagtagactggtatactttttcataaaaattttaattttatttttgcccattttgtttagagggaaacaattgaagaatatgggcacatgcaattacataaactaatgacaaggtaataatattatcaagcttgtcgtttgaaaaaggtagcaacttggttataaacaacgtctttggcagtaacacccatgatgaaatcagcatgagcatagtctttcacaaactgcacattcatcttatcgatgtcgtgatacttaaactggtcaaggagaaactcaacgtctttcacatcagccaggctatctaaaccaccgtagctgaaaaaaagcggaagctcgtgtgggatcgccgatatgttgtatgccggtggtatcgcttgaccgtaatgttttatgttgcgatcactgcttccatagttgtattttctcaactccttgtctcttaccgctacaaataaataatttgaacaatttaaggtttataaaataatttttaaaaaatgggaatttgtttcacttactttgagcaaggtggatcatgttcttggtggaagtagattgaggttcgttggcaaggaacagatcaatggttgatgcgttaaggcagcaattctttcctatgtttttgtaaaattacgttaattaatatatgtaattaattcatcaatggtagattggtggacttttttagttgtagcgttaccagtgataacagagactaaatcataacagtcgatccccgctttaaggcatatagcctttataaaatcccctactaatccactgcaaatgttgttttaactattttacgtaatcaaatcaagccaataataacaagcatattttaagaaaaaagggtgaagatttaccttttcgggttaaactctggccatccaagaatagaggtggcctatttttgaaagacgataaacaagttattttcataactgtaggcacatatttgtataagaataaaaaagggtattacaagggagaagctagggacctcggcgaggaaggtttttgcggcgatatcgccgatgacggtggtcatgtggctgagataagcaacgggactcaacatcgccgccgatctcacttgatccaccaaccctttttctgagaacgaagcaaatcctattaacgtcccctgacaatttccatttcatttttcattctattatgagaagatatattactataagaaaaagaaaaaaatcagagaaaaaatatgttgataacgttggacccaccaaagagtgtccgaggtagtgaatcttttggcctgttaggccatggatatggtcaaacatagcaggcagatcgtaactcacaagctcgtcccacgtccagttccagaaagcctaagtccacaacgtgccaacgatgttaaatatcagtttccttagtaaagatatatacgtaatctactggttaaaacagtggttcactgaaccagacccgttgagaagggttaaggtacttgtgtcttctgctgaatctagtccctcttgtgttccccatccacacatcgaatccttgatccgccaaaatcaacggcagattttgatccgctggattcaacagccatgacatcccatcctgcacatttaactcatgattatttgactatcatagtaatgtaaactataagaaattaaaggaccatgttgtcaaagagacaaattacaattctgcatacgtacgactgtcgtctctgtccacataaaacttaaaacataaggcaagtcataaagtattttctttctagcaggctgatgaaaatagtagtactgatctcatcaagttttgtacttatgcactttatcgatgatttttaagaattcgatgagtaccagagtcgagagtcgacacggttatttatataatatcacttacgtacggtacaatcattcttccataccagaaaagttgtttatcacttgagtttattttaattacctttctagtaacgctccaattatcactttatttgttggacacacatgtttaacactcatgctgtctctttatttaatgttttaattttaccaccactaagataacacatatgcacattctttatcaaaaaaagatacagacattaatctaattaatcttacttgtaagtttcaaactcgcacgcacatacgatataaggatatatgtacatatatatatatatatatatatatatatatatatatatatatgtatgtacatacttgttgatgaggcatccactggaagtatacacgtttggttttggcccacgtgtatatgtctatttatagatgtaaatcatcttgaaataatatatgcacatattctccatttgtataacttctgaaaacgggtataaaatgttctcctaataatgtttttctcactatcccttgacgtcactttccactttttcttactttcaaaaatttatgtaatggaaaacagcttcaatgtagtaatcagatattccgagtgcgatgcagtggtttaattacagctatatatgtttttaataatagactttgtagtttggatgtatttcatgcatgttggaacaaagtttgatattatcacaataattatctgcacataaaagtagcatgcgtgtgtatacacaagttaattgacggttaaggcgatgcaaaaaggtaaggaagagtaaaacttacgacaagaattccatgttgtattaggacaggttgtctctttcccccatctccggcgacggctccggctcgtccttccggtatcctttgcatattcaatatgtacccatcttgagtcaccaccttcataatttaacaattaaaatagcagctttatcagttaatatatcgatgagtaatcatcatcaatagctatatagaaaaaaaaagaatgtcgtacgtacatcatgttcttcgcacttgtaaccaaatatgtgaacagaagaagcgcatatgccgccggcagcagtcctctgcggtggctgtccggcaagcctgccgaaggttccacgagcttcaagggtcttgagggaaagagcgaagaagattaagacagataaggctaaaccgattgaaacggacggaaccataaccgaaccggccattgagatatatataggggttatcacgtacgtttataggaaagtgaaaatggttttatatagagagaaggggtgacggataagataatagaaaatggaattattagctatttataaaaatgcaaaaccacgttagcaactatggatagacaaaaacttatttagaaaaaaaaacaatttatggtgtgtaaacataaattaagaattgaatcatgcacaaaaaataagacaagcatttatgaatagtttctagaagtggtgaatcatccactgctatcgtcgatacaacatttactaaagtttctatatataagtggagggatgatcagtgtgaccatgccatgatttctaacttttttgagagagcgaggttattatgataaacatttaaaataatacgtggaactgagatgaatggaaaataatctttataaaagagaaaaaaaaaaatagaagatctcatgataataaaagtacttccatatgttttcaatgtgaagaaaagaatagtaaaggagatacatccaatagcttagtctagaaaagagctgactaattttttttaaaaacaagatctctggtttgtatatttgtatcgattacacagcctagatatataaaacacaaaacttgatggagacaatttcatatcctatatatacacattaatttaatgagtgaatagtaatagcaactagcaaggcaatctaaacaaaattaagaaaagaaaaatgttaaattcctgagatctataataactcataagcaaaaaatatatttaaaaaaatcatacaaatgttgtaataatatcattttgttttaatgtggagtgataaaaagaagataggacgaaagaagaaactgttaaaggcgattgtagatgctgtagggacggataaatggactatgacatcagtttccgttacttgtttcttctcgaactcaaagaagaaagaaaaaaaaaaaaaaaattctacatcggtacgctttcgtttcacaccctgcatgcacacagtgtccggtagtcaaaaatacaaaaaaaagaaaaaaaacctcgagacatgctaaatttggataatgattaataatttgggggtacacaatgttccaaataatttatatacaaagtcttgctttcatattatttgtgtgtccacacttcaacaatatagtattatactattatccctatcccctatgaagtatgaacacactttttatgatacgtatcatattcagaaaacatcaaaaattggtcataactctcacgtggtgtggtggatttgcctcgcctttcgtttctgttttttgcaaatatttaagaatctttggtcatttaggctttaatttagttactttaaatttatttttgttatagaagtattatgttaaaaacagttcgtgttcatccttggactaaccagacgatttgacaaaatccgaatatccgatcataaaattaaataatcagccgttattgttcctctactactacgttttaacttttaagaacttctcctggtactttgatgggctataagagcggcccaatatttcgactttaaaatgggccaatctttggtaaaggcccaattatagtggcgcttcttcttcttcttttcctaaacaagcaatggcatggtttagctggtgagccagtttataggtaaaaaggataatttaagccatttaaaaaaacaaatctttaatggcgtaattcaaaaaacgtgcacacctatctaagtaccaaactctttatgttatataactattgtgacacaatttcaaatttgctaactcccaaaaaaaatggcggcgtttttgcaaacgaacatcagtctgaatgcgatcaagatcgtcccggggaaatacagttctctcaccgatcatcagtttcgtgcgccgtatcgaattaggtgcgccgccgcttcacctgggaaaaaacggtataacatcgctctgcttcccggagacggtatcggtccagaagttatctctgttgctaagaatgtgcttcagaaagctggatctctcgaaggttctttctctttctcaatggtttttggaaacaacgagtgtgtttgcttagccagtagatgattgtgtctttgcttttgtatcacaggactggagtttgatttcaaggagatgcctgtcggaggagcagccttggatttggttggagttccattgccggaggaaactttcacggctgcaaaactatctgatgccattcttcttggagctattggagggtatgtgtgtgagtgctgtttctttagcaatctgcttccaaatttattctgatcttgaggtttggatgattattgttcaggtacaaatgggacaagaatgagaaacatctgagacctgagatggctctgttttaccttagaagagatctcaaagtctttgctaatttgagacctgctacagttttgccacaggtatcttcggttttgatttgcttagcacttgaattttgcttctagttgtaaataaactcaaatgtttctgttttgcttgttcagctagttgatgcttccacactgaagaaagaagtagcagaaggtgttgatatgatgattgttagggagctcacaggaggtatttactttggagagccaagaggcattacgatcaatgaaaatggcgaagaagtcggcgttagtacagagatctacgctgctcacgaggtaataacccttcacactgtgctctgtgacaatattggcaatgtatggatattaatgcattgatttatgttcttcagattgacagaattgctcgtgtagcattcgagactgctaggaaaaggcgtggcaaactttgttctgttgacaaagccaatgtgttggatgtacgttctgttagttcactgaattgtttttccacttttgtgtgttttacgaaatgcaaatttctttgtttcatgtaggcatcaatattgtggaggaaaagagtaacagctttagcctctgaatatccagatgttgaactatcacatatgtatgtcgataatgctgcaatgcagcttattcgtgacccgaaacaggtgcttctcgcacatatatcaaacttagtcgttgattaagctaactcagaagtggaactagtactcacggtgtttttaaaacaatgcagtttgacacaatcgttaccaataacatttttggtgatatattgtctgatgaagcttcaatgatcactggaagcattggaatgcttccatctgctagtctcggtgaatcggtaaacaaaattaactaacatctttcaaggctcctcctgtttataaactaatgcgaaatgttaaacttgtgatgaaatcagggacctggactctttgaacctatacatggttcagcaccagatatagctggacaagacaaggcaaacccattggccaccattctcagcgcggcgatgcttctgaagtatggacttggagaagaaaaggctgcaaagaggattgaagacgctgtcgtggatgctctgaacaaagggttcagaaccggagacatctactcccctggaaatgtatgtgcatgatgattcttatcatttgttttgtacaagttcgtaacaaaatacttaaaaaagtcttttgtgttttgaaaatgcagaaactggtgggatgcaaggaaatgggtgaggaggttctcaaatcagtggaatccaaagttccagctactgtttaagtttattgatgatttgaagcacttgaaaaagtttgtgtagcacttggttttacggtcacttatatgctaatccatgcaacattgtaccttttataataaataaattatttgggatcgattctgcaattcaaagacaagattctccaaaaacatttgacaggtctcctgcctttacttaccttgttcttgaagattgagaatttctcttcaactacaagactcaatatcttcttcaatcaatatttgtttaacgaaataagtttcaagagaagacaagctactatgatttttagtctcaagagtcttacatttttatactgaaaaccaaacttatagagctttacatttagaaaaccgaaaaaactatcaatcattaggttagcctttggattcacgacgacgtatcagatttgcgttcagcgtctgcggcagactgcatttgagctgcgtattgtaagttccagagaacatcttcaaaggaaggtcttgcggaaggttcaagcaaaacacatttattggcgattgagatcgcaatcgataaagactcctgcgagcttgttgttaggactgttggacttactattttctgccgaccgtcttggctcccaaatgatgtctgcaaacacaacattgcagcaacagctattaaccaaatttgtttcaatcaaataacaatgatgatgctttttttttttgctttttctctttgttaccatttcgttgagaagaaaagcctctccttttgtagtgggcactggtcctatcagagattccagaagtatgaatccgaagttgtacacatcgtcctctcttttagcctttttcctgcataatctcaaagtttggattagattctcataaatgccatggagttttgctatacaaggacaaaagatgcatactttgacttgtgggtttctgactttgtctgcaaaatgtagaagcaggagtaaagtagagtcctgagttagtgtcaaagaagatcatacaaaatgaagataaacacagtgaaagagagtaaatagagcaaacctcaagcttttcgttctcttcaatgatggcagagactccatagtcactgagctttgcaatcttgtgttcgtcaagcaaaatattgttagtcttaagctgattgttgaatgaaccaggcattacaccggtgtgaagaaaatgaactgcctttgctatctcaatcagaattgctagccgatctggccatgtcaggatcttctccgagaaagattctacaaataaacaatattctaacaacaacgattttccaagtacagagagattcagtataacatttagtttactacaaatgccaaacgactgacctgatagatgtgtgcgatagctcccgttgggcatatactcgtatacaaggtagagtatggttgcaacaggatcgtgttctccgctggtttgcgtacaatggcccaagaagccaaggagatgaggatggttgagctttgccatccagtctaagtgacctctgatactctggctggagaatttccttgataaaaccagacatctgatagctatggaacttccattttccagtgttcctctgtatagctgcaaaggatcaaaacaagcagagtaaagcaaatgacagataggcagatcacaagaattaatcttgcagaagacaaaccatacctttccaagggagccttcacctaagaaacgtgatgaatcaaaatcgtctgtggcttcctttaaatcttcaaaagaaaaggaccggcatgagggcacaccctgtgcacctagctttgctgtttgagagattaaccctgcaagacgaaatcatacaaggatattaaatccctgaaagacaattcctagcaggaatagtctacattttgagtcaaaagttactcacttgcactagcaagaacttcagaggagagactggtgtgtgagttatctgtcacaaccttaagccgagtttgcggcactgacttttctcttgaacaacagctagagcagcggtttgtgcataacaggaggaggataactaatacaaaaaacacaagaacaagaacagctccaccaatgacagcaatcaaaatcccaacctttcttccttggaactgttttccctcagtttcagcctcttcgcataagaattcttgatgctgatcatgactgccaattatggacaagcagtttccaccaagtttaacaactcgctcgccggaagctcctgccaagcaacggggaggagtcccaatcaatctgttattcgacaaatccacaaatccgagtttgcctccacaggtcagattaagaggtagcttcccactgagcttgttagatgccaaatccaagtaactaatgtttggcaaagagaacaagaaccgagatggagttccagtcagatgattgaacgacaagtcaagatgctgaagctgagacaaaccgccaaaacgtcttggaatttcgcctgagaaggagttcttgctcaggagaacagtaactaatcttataggcatgacaggtagttcagaatccaagtggttttctctcagatccagcatatgcagatgacttaacttgctgagatcaggcaatttaccagaaatctcattgtgtgatagagcaagatttgttagtcttccaattctgcaaattgaagaaggaaatggacctttgaaccgattgttctttaaactaagaacagtaagattggtcaaggaatccaacgtgtctggaacactaccgttgaagtaatttccatcaagcatcagactttgaagcataaccaatctggaaatatcaggagggacagagccaaacagaaaatttgaactcaaatccaagtactcaagagaattcaaccgatggattttccctgggaactcaccatagatacctagagacactaagctaagaaccctcaagcttgtaagccttgtcaatgtggtaacaaaagaatcaattatgaatgcttcagacagagtgtgatttggaagtgaagacccatcaaacataccaaatggtttaaaaagcttgtcccccatgactttaagctccgtgatggaattaccttgacaggtgatgctcatgtgagcagttgcagggatttgacataagtctccatagtaatttccccaagattccagagctttagggaattccagatgcttcctgagctgatacaggacctgagtctgagagttcggcagttgatgagtgctttgtaagaacataacccatgaaagaaagagcaaaggtaaaacctttaattgttccattgcaggaaaagaaaacaaagatgaattgaaacagaaccctagaactagaagcagacttggattctgagaggaaaatgaaagagacccatctaggtgttttctagtcaactcaagtcaaaccaagctcgtgatcccagacgctcctatggagcaaactccaaggaactgaattggtttataatcaaaatccctgagaaagaggtcaggaaacaaaaagcaaaagaagaataagagagagtgaggacaaatgcagaaatcgtggaggagaatgtcggtattcttgtgagtctgtttgtcggattcaacacatagacgagaaagaaactagggaagctagagaagaagatgataagagcattaatgacaaaagagttgagcagcattaatggcagcttcagtaatttatctgagaatcttttttcttcttcttcttctctttatgaaagaaacagtaaatttagaatgtgggtcacgaaaaacaatcataaagcaaaaaatgtgcactcaatttgatgaaaggttgttcctttttatgaccaattgtctggaaatctctttttctgtaagataatgagaaaacaaatgaaatttgattttaaatttggtatagataaagcatgattactgatttgatgatacttgtttattagtgtatgctttgtgactttagttgactcatagaagatgccgttaacacatgtctcttcttccccactttgtttataagatttaaacattgatttttgtgtgtgattagattccatgtcttgttaattcaccaaactgcccttctacgataccaaatgacaaccaaatgacaaaaggaagcttttgctctacgaatacgaaacattgtccggtagaagtagctttcgttgaaggacaaaatatggcaataaataattatatcattcccaaccatataatagcatttctaataagatagttttatcaaaccatctaaaacacgaatccacaatgtttagattgtagcatatagttttttgagacacatgccaatagacttgtggcataaagagggcaagtaggtcaattacttagagacaaaggtggtgattatgctttgctaaagttttaaggcccacaatacagtacatgtcccacaggtctgttctactctcaaagaccggaccatcgtattaattaacttctttttttggtctcacatgcgtcaattttttttatacagtatatgaagtatgaacattaaaatgtttcttcactgttgtttaacaaaattgttattgttggtgcacaaaaaaaaaaaaggtttaacaaacattttgttttttttaaattgacaatcgtgagtgtaatcacaattgatgctttaaaatttggctaatactttcgttagcattttcaggatgttactaaaacctagtatatttcatagccaatatgatgtttcaatactgttagtgttataacttatgatttaccattaaaattataaaactaatataaacataaaagatatgtaaccatcattattaagcataccacaaaaaggaacaaaaggactagagaacaatgcaagctctattactgattctgctttggtatcaaaaagagacttaacaagacattatgggttaagacagataacgctttataggagaatgataagacataacataagactccacgaaattggaaccgggagagcatgtgggacgaacagaaacgggcattcagatactaacatctaacattaggacaacctttttgggaccatcttatggttgtggctttggagaaaaaacaattaaaacatcaacatccccttcccaccagaaaccaaacaagtttctctccaacttgtctagagagcagaaatgatatcttcaagataagacaatatcagcaatttgttttaaagattcttcaatcctaaaatccctcaccctatcatattcttctacctagacagaccataccagtgatgcaacaagaaaacagaccaaacaatacataaatagtttattctggaattagtgagccttatgagaatctgggttttgctgagttgttggctaatcgcacggcggcttgttgcattttacaagtttacaaagtaagtgataaaaagggacgaaccttgacaatgttataagctgtcatttggtttcttgtcatttgagcaagactccaggtatgagatcacaaggtcagctgctttgcaacctgatgctattgatttcccaacagagagcccccctcgatgattacctgtttattttggtccgtgcacaatagataaataactgcaatgaatcgtctcgaggccatatactgactacattcatcatcatggatcatataagactgaaactttaaattgaagttacctgcatagaagaacccaggtagatcattctccatcttgtcaattgcttccatgactgagtcatagctgctgtcatacaacgggaatgctttcctccaatagtaatggctgcagataacatatattgtttatctataagggtggtaatcttctctttcgtacactaaaacgatcaaatcaaaaaaatctccaaagttcacatacttgacagacacgggttcaccttcaacccccaacagtcgctgaaggtcagaagtcacaacttgttttaattcgtcactacgaagattaaaccagaaagaaaaaaaagtagtcagaattgggtaaagtaggaaactagaaaaatggtataaatgcctcgattctttgtagcttttcgtaagcagtcaaatttcacttacgtggaagctttggctagttcctggttcctactcccaccaataaaagttgtatatagatgaacgtcactaggggaacgatctggaaacatcattgatgaaaaaagtgtacctgcgtatagaggagtatgaagtattgataaatatagaaggaaaagtatagggctatttgtttgagttaaggccacaccaacaagttacctagagttttgaaaccatgcttttgctccttagatggaatgagtaccccaaagccttcaagaggtctctttactttctcctttgtgaatgtggtgattaaaaccgagaggggcatgtaattaatctgagaaaagaacaagatcaacatcgatatgcaattaacttgggataaatagtacatataaaagataactaatcatgcaaggtagttctttgatgtcacattaaggttcattatcagtatttggagtaatactggaccacatctagatgtaggcctactactctcaaacataaacttctgagttgtaaaagacacaattacctcggggagaaagtttagctgaaagggttgtcctcctttcataaccttcatctccttcacattgcacagaggagcctatggtacacaaatttcttgttaattgagaggttctataattttcatctcacatctgacaaaaaaatacactaaccgtcataattacagcatcataatgggggttttgtctctgcgtttcattatgcgaaacacaagataatgaccagttctcctgtcttgatccagaattgtaagacaaagagagtaccttggagtctaaattgatctcatcatgtgagagacttttgcacaacgtatcaggaagaatctgcaatatcccaaaatggaaacataccaacgacaagtagtacagagcaagaaaaacataataagtacggcggaaaataggtttatatgattaaaaaacaaagctggctctcattgcaaatgatcacctgcattccccccttaaaagagaatgacccacgcgaacccttttttgtgccaggagaactctttgtgtctctacttttaccacctttagcagcaaactttgttctgattgcaccgactataatagagccaaaactgaaaaaggaaataatttctttaacatctaaccggagaacagttaaacagctcatcgccataaaattagcatagggaagtactgaactacgtaaaactcaggccaaccccaaaataaggaagctaacgttatttgcaatgctgtctttggcagtaaaacttttctgtctatcatattacacatcaagggaccaaaacattatttgatattaccaagcatacaacgacacgagtaaaggaatgaccaattcaaaacatgactgcataaccgtatcaacacagaaaagaatcttggaagtattcttcgagcggaactcattgaatatagtatagttacatgagaaagtaccttttctctacattccagagatctgggaaagaatgcttcatctggtcataaaacgtagggaaggatataaaattgaagaatatagaacgataaatttaaaaacaaatacaatatgttaagtgcaaagttgctcactgaaagggaatcagggtccgcagcacttgttccaccaacaaaagggtcgatgagatagtcaacaaccttaaaaatcagatacataaaaaggaacacatgaaaggaagatcacagtcgtctgaaattaaaaacgatagtccacaagtggtgtttacgtgcagagaattatatgatacaacacaacacagtgagattatgatgtttcagtcaaaccctaggataggtagcaacaaacctcttgtccaaaatggcgttgaaagaactcgcttacactacagcagagaaaatgggaaatgacgctgaagttataatattctgtgactaacattgctgatggtctggaagacaagtttataatcacctttcttcagcagatgcatctgagacttttgaggactttttcttccataaaaatggttccaacaagatttgaaactgcaagtaaaacctagtactattagggatctatgatatactggtaagataaaaagcactttggtagaagagagcttctagtttctggtggtagtgcacagaaacttatacaacgttgatataatatgtctcaaataactatcaagacaagtaatttcaatgtaataaataagtaacacacttatatctagagaaatctaccttagattgggtagagagcacactacttgtgaccagctctatgggattggtaggtagctagcatgataacaggagaacatatcagcctcgtaaactatacaacaacaactcattacataaagaagcagcaacccattagaaaaaggaaacaagtagggtatttaccatcacaggtacaccattccgcacaatataccgctttttctgtgaaattggctgaaaagatagagaatgctctaataaggggatgagaaacacaaagcaaatcaacaaaagaaaaagaacaaaatatgtctcttaatcggcaatgaatgatcatgcaagaccacagaaagtgctcacaaattgttgtttctcacgaagcccaagatcatcaagtaaactcccaacttctggctcagcctcagtctgcatatgcaaccataccgcatcaagacattatctaaaccaactaaaacaaatgtgtatgaagattctaaagcacgtttgacttgagaactaaaacaacataagtaccatggtgtttgctccttcatcccaaatcaaaccattttgcataacacttctcaacttcccacctactcttccatcagcttcaaacacagtcacattcaaacccctcgatttcaacttgtaagccgccgcaagtccacttaaaaaccatcaaaagaatcgacatatctgtgagcgaattcgtcacaattacacaaaattgacaacaacaacaaaaggatctcgacccaaaaacggaaagttgcagaagagtcataataatgcaggagatgattctctctgtgaaaatttaccttacacctgcacctacgactgcgactctttttcctgaaaccgcttcaatttctaaccaaaaagcaagcaaaaccaaattcaatgcaagatacaaatagtcccaaattctcaatgcgaaatctgaaaagtgaaattcgagataaaaccaaaattttcttacgatgatctgctactgctccagacgccattgctatctgcaacaattcagagtcaaaatctctgaccagtcgaaagcagtgacggaaataagtagaaaaaaacacagcggcaaaattccagcttatcccaaaacgacaataaagggtaccgtttttaatcaggcccattatcatcagtcttttgcctaacgggcctttgttttttcgtcaacggatccaaaccagatttatttgaatgacaaagtttcttgaggagagtgcatggttgacctttttctaccgaattgtttgaactcatgtgaaaactaaacttgttttctctctctctgcatgatgtactaatatatagtatatgttatctaattcgtttttagtttttgggcaactatatggttatctaattctcaaactcaaattagctcgtttaactagtatcttggatttgcgtttatacaattatacgtcttgtttgatagtaccattttttcagtttagtctctagtttgcagtttggcacattaaagttcgaacacaaactacacttgatgacctatttttcaattaggtcaatcaactctggtcaaatactccacagttttctaaagaaatctttaaaaaaaactattaacaatatcaggttcttatctcaatttgtattcccgaccaaaaagcattcgttattcataaggcgatttttattttattttaatgtaggtttgggaaactaaaggaatgcaaagtttgttggtagttatcgtggtagttaatctaatcgattaaatgaaaagtactttttcaagaagaacataattggttttattatgagaaaagtatgtaacattagtgtgaataattgctttttagagcataccatctttgaatattaacttaataaataaattcaaacaggaaaaaacaattataaacaaataattgtgctgagattacgagaacattacgtggcccatttgtacaataagatatttcgaatctacagtttaatagattttagcaatatcgcatggatgtgaaaaggaaaagtcattttgctttaaggtagactaaatttgaagattgaattagttatcatttatcagacatgatatttgcttgcgccatggaactttaaggatgaagcaaactaattaaatatttaatctctgccgccaaatatgaattcgaaatcatatagtatttgatttacacgtataatcatgtatgacttacttctataaagcttttcaaatttcaaaactgaaaaaagtaacaagttgttttccttttgccactttgattatattccatcggcattgtttgcttacactttcttcacgtcttaattaattaatcagaacaaagaaacgattcttaataaatattgtcgaggatttgaattttgaatattctataaactgcttgatctcgactctaggcgaatagtgaatccgactttggttttgagtgtttctagttttctcttttgttaataaaaattaatttagttttggtttgcactaatataaattcaaagaaattagtgattcatttagttgttggattggttgtgattttccaaaaatagacacaacaaaatcgtttgacaaaaacacaagtaatagaaccaaataaccgtttgaaggaaatttcaattatcttttcgatcacttcaactcaaacatccatacgcagtaagcacaagtaacaaaagaagagaataactatacgtttgcctttaagtagttagtaagatttgttgttcataaaatcattagactcataaatgttcagtaagtaagattaattagcagattaaggtagggcaattaggaggtggtccatgctttgtcctaattagtgattagaagggaaatgatcccaaacgcatagttttctaacttttttgggggggcatatatgttttttgggatggctcaagctggtgggcgttaatagctcttatttattttttgtttgttaacactactgttttattaccagaagttcataactaaaatcaataatatgcattcgaacggtttattattatgacacataaacaaaaataaccactaagctatgtactacagtagtagtcagataatttatgctttatcaacaaaaaaaaagtacataactaagtaatatatatgaccgacgacatgttttgtcaacaaaagaagttcgatatttaatcatataattaatattgtacgtattaaatggaatcaaacatgtaattttcatgtcgcaatctggatcacgagatc

SEQ ID NO: 712 - DNA, 82001 bp, Arabidopsis thaliana
gatcttccttctcctaactaaacatagaaacatcttcaaaccctatctctgaataagtcttatttaagtgaatacacatctttttggtatgttttgtttacttttttgagattttgagttattttctaaacatttctacatttgaaatattactttattattaaaacatagaaaacgtctaaccggtcggaccaggatgaaccatgattcatgacccgaactcacacccggttttgataaaagttttaaaagagactactagacgacaaaaacaaaaacaaagactagtaaataaattaaaaaatgacccgaacacacagccggttcaaagtccggttattaaatcattgattaaaaaattaaaaaacaaagactactagatgacaaaaacaaagaccagtaaaaaacgttttaaatatttttgctgtaaagtgtaaactacataaattgtctttacgcaacacacctccactcgcgcagcccaaccaaaaaaaaaggtgccctgattgtttactcacccaaagtttctctctttctctcttctccttctgctgttttccgcctcacaccattactctcccagaaatggcggcgacgacgactgctacttcattattctcatctcgtcttcacttccagaatcagaatcaaggttatgggtttccggcgaaaacccccaactccctgcaagtaaatcagatcatcgacgggaggaagatgaggaatgccactgttctctcagctgcttccactgataaagccatcaccactgctcaatctgtagctccgacggcttgtgataggtgcgtttctgttacaagtgaaaaacgaaagctttgctaatttcgtcaatgtggggtgagaaaaagaagaagaacacttttgtttcctctaattcgaactgggttcttcttctctctctcggcctcgcttccaatttctgcaattaattagcttcttattgtttatgatttgctcaacagtgttttgtttattcagtttctattggcattgcgtgactagtaatgttatagatactaaaaattcaagctgtgattttagtactactgtagatcttcccttttccagtattggaatcgaatatgtctggtcaacatcaaagaagattctgtttcctctttttctccacgaatagtgactttgttcaactgaatatacttgtatgaggatttgtttatctggtcaacaagttatttctcggattaagtgttctgcgtctctcttactaaaaatctcgccaattgatttgcagagtaaggaggcatacaatctcggtgtttgtgggcgatgagagcggtataataaatagaattgctggagtatttgctagaaggggatacaatattgagtcccttgccgtaggattgaatgaagacaaggctctgtttactatagttgttcttggaacagataaagtcttgcagcaagttgtagaacagcttaacaagctcgtcaatgtcatcaaggtttttatcttgttctctattgaatctagtcttggctataacttgctgctttgtttaagaatttttttgagcttatatatactttaatgaatcatgactattatcttatactcataatggtttgttcaggtggaagatctctccaaggagccccatgtagaacgtgagttaatgctcattaaacttaacgctgatccaagcacccgctcagaggtaaagaataattcatcttgcaaaaatattgggtggatgttcaaagttgttttttcgttatgcttgatgcagttgcattaaaaacatcaaggatatggatgaaaggaagcatttattctttatgattaattgagtcacagtacagagtcttttttatctttctatgattagtcaagtcgcattaaaatctcaaggatatagatgaatatagatgaaaagaggttttcttccttgttattaatggagtcacagcaaatgttttttacttcttacgattgatcagttcacattaaaatctcaaggatatagattagatgaagctatgttttaaaaaaactgtttttttatgaagtttccatgtactgcagatcatgtggttggtggatatctttagagcaaaaatcgtggatacctcagagcaatctctaacgattgaggtcagaccttttcttcagtttatatgtgctcagatcatatggtcaaaatggttccactaagtctcattttttattgtgtaggtaactggagaccctggaaaaatggttgcactaacgacaaacttagagaagtttggaataaaagaaattgcgagaacagggaaggtaatttttcactttcaaccactttttgctccaatccttcttaactgtcaacaacgtctggctctaaatgtcttcaaattacatcttctgtcttgaaaaagcttgtttgaacggttggactcacatgtatcattacttgtagccacttggagcctcttttttttttttttttttttttggtctattatgtcacacatacagacccgagttcctttggtgaatctcaggacactctaaatggcagagcacatgaaattcccagtttagctttaaatacatgttcacatcttacatgaaaactgattaaattacttaatctctaatgcggattttatcttcttttccatgtagttaatttctgcgtttcactgactataatgagtaattttaagaatcagcttttttaatcctaactgttgttgtatactactactctagattgctctgagacgggaaaagatgggagaaaccgctccgttttggagattttcagcggcatcatatccacatcttgtaaaggaatcatctcatgagactgttgcagagaaaacaaaactagcattgactggaaatggcaatgcatcatccggggtatagaaatattagctaatttattttctccctgtgtatatctaagcactagtagattgaacgagattaactgatactttattttagggtgacgtttatccagtggaaccctataacgatttcaaaccggtccttgacgctcattggggaatggtctacgatgaagatgtaagacacgtttctcggatactgcattcgttttataattttctttttgatccagtaaatccttcgaaattagaggtcaaagtgaactaaaactgtttacctttttgcagtcgagcggacttcggtcccacacattatctttacttgtggccaacgttcccggagttctcaatctaataactggagctatctctagaagaggttataacatccaggttattatgcacacacttttgcttttagcttcaccgatgtgatgcatactactcatttctctcaagagtatgtgaaagttgttgcttttattgctctagagtctagctgttggtcctgctgagaaagagggcttatctcggattacaacagttattcccggaactgatgaaaatatagataaattggttaggcagctccagaagttgattgatcttcaggaggtgagctaatgattcgaaaccgtagtgtactttggttttaattttaattttatatgtctaataacgtttccctttcattggcttttctagatccaaaatataacgcacatgccatttgcggagcgagaactgatgctcatcaaagtagctgctgatacttctgcaaggagagatgttttagatattgctcaagttttccgtgctaaagccattgatgtctctgatcatactatcacccttgaggtgctgatatcatatctccctgaactttacaacaaaaagctctcgtagctttctgatatttcaagcttgagatgagatctagtagctgatgaaatccgtcgatttgcaggttacaggggatctcagaaaaatgtctgcattacaaacgcagttagaggcctatggaatctgcgaggttaaaaaaaagtttcttgatttatctctaatctcttcacagacacggtcactgttgtgtctggcgattcttatggtttgtgttttatgaaaattgaaggtggctcggacaggaagagtggcattggtaagagaatctggagtggattcgacttatcttcgtggatactctcttcctttgtagttctagaggttagtaatctcttttataatcacagatgcatcatgcattgttgtcgttttacatcatcatcatctgtgttatatatcaaaggaaattcttgtgcagaggacttgccgcaagcttcagtgtcgttcctggaaactagtcaaaaggactgcacgttgtttcagcatctgtgattgattgcttcctcacgagtcatggcgcttcgagttgttgttataggaggagctattttatgaactaaaaataaataattatctttgttccgttaaattagttttgcatactaatcaaatgtagaacactgttactagtttgtcacttatttagtatcaaagacgtgtattagtatatactccaatcgatcttaacttaacaattaagctctaaccggaccggacttggttagatcttaacttaacaattaagctttaaccggaccggacttggttagaatccttccttgcgaaccaaattagggcaaacttgtaatattgaggaaacgtttaattcttttcgtgtttcttcttcgcagcaattgcagaaacttaaaaaaaaaaactcaaaaattagatcttaattcgaggattctacttctgaatctgaggaaaagctatcccagatccgatcagatctgttttgttgattctcttcttcttcagtcagtggaagctatgatggattgctaaaagagaatacaatacgcacgaagccacgcttgagaaaccatgagaatgtcatcagcttccgccggggaataccggccttccgccgtaagtctcagcagtaacggaggtggtcaacgagatgctgagtctctttttcgcacgaaaccaatgtcggagattcgaattgtggagtcggcgactaggaagaacatcgaggataagaaagaggagcttcggcaactcgttgggactaggtaccgtgatctaatcgactcagctgactcgattgttcacatgaagtcgctctgtgagtcgatctcagccaatatctcttcgatccacggtaacattcgatcgctttcttcttcttctgtagcggaaactcctaagcttgctagccttaacccagtacgagtcaatgtctatgggatcgcttgtcgtgttaagtatctggtggatacgcctgagaatatatggggatgccttgacgagtctatgtttctagaggctgcggggaggtacatgcgtgctcagcatgtgcagcagagactgatcaagttggagggatgtggtggtggtgtagcagaggtggatcagagtaagctgttggcgaattttccactattggagcaccaatggcagatagttgagagttttaaggctcagatttcgcagaggagccatgagcggcttctagatccgggtttaggactgggagcttatgtggatgccttaactgctgtcgcggtggttgatgagcttgatccagagcaagtgcttgagttgtttctagactcgaggaagacttggattctgcaaaagttgaatgcttgtactggtgaggatgcgggtgaggttgttttggtgttttgtgatgtgttaagtgtgattcaggttacagtgggacaagttggggaactcttcttgcaagccttgactgacatgcctctattttataaaacaatcttgagtacccctccagcttctcaactgtttggtggaattccgaatccagaggaagaggttgagttgtggaaatccttcagagataaactggaatccgttatgctcatccttgataaaaatgacgtttctaagtcttgtctgacttggttgagggaatgcggtggacagattgttggtaaggttagtgggaagcatttgattgaagctatagttactggcgcggagcttggatcagccgaaaagttgataagggagaccatggatagcaaagatgtcttgaggggtagtttggattggcttaaaagtgttttcgggtctgaggtagagttgccttggaatagaatccgagagcttgttctgggggatgatttgaacctatgggatgaaatatttgagaaggcctttgtggaaaggatgaaatctatcattgactccaaatttgagaatttgactaaagctgtcaatgtagcagattcggtacatgcttatagtgagattactggtgagaaaatcaacttccaagcatacttaaacagaccttctacaggtggtggtgtctggttcattgagcctaattcaaagaaagttggtcttatttccggaaataaatcatcacctgaagaaagcgacttccaaagttgtctaactgcgtactttggtcctgaagttagccaaatgagagatgcagttgataggcgctgccatagtgttttggaagacctcctaagcttcttcgagtcagaaaaggcaggtccaaggttaaaggatcttgcaccatacgtgcagaataagtgttatgacagtgtctcagcacttcttgcagatgtagataaagaacttgaatttctatgtgctgccgtgaagaaagagaacaaggacagtgaagcaattccacctgctataataattgagaaatcactttttatgggacgccttttgtttgcattgctgaaccactcaaaacatgttcccttaattctcggttctccaagattgtggtgtagagaaactatgactgcagtttctgataagttgtcatccttgttgaggcagccaagatttagctcgaatactccagccactgctgacagccctggaaagcaattgcataccgatcttagaaagcagacttcattagctgttgctgcactactgggagcggaagagaaaacaagtccaaaatttgaagagcttaatagaactatgcgagatctgtgcatcaaggctcatacattgtggataaagtggttatctgatgagctttcagctattctcttgcgtgatcttaggagtgatgatggattgtctgctacaactcctttaagggtaactaaatatgtttttatcctttgtctgtattttcttgtcttttatttcgttctgcttagttgtctctcctgcatcggtttagaaagagctgactaaatcgacagaggtagttagtttgcttatgtcctatgttgaaattctttgtttttggtgaagatgattctgaactactctgattttttgaagttattatgctatagtttatacttcctcttgcatttcaatagtcatatgcaaggttaatattgtagtgtcctgctcatcttttaagaatgatatagggatgggaagagacaatagtgaagcaagagcaggacgagagtcaatctgagttgaagatatcacttccatcgttgccttcactctatatgatttcatttctctgtcgggcatcagaagaaattcatcgaattggaggtcacgtactggataggtctattttgcaaaaatttgcttcaagcctgttggagaaggtgcgttgtctctggttacttccttcttttctttttttttccatctacgacagagatatttctggcaagaaaaagtttatttttctcttcaaaattttcagagctgtttgataatttttgtttcctattgatactttttcactttcatcagtaaacatttccaagctagtgattgcctataagaatgattttttcaaccttccattgtacaatgcagatcaccattatttatgaggatttcttatctgccagggaggccagcgaaccccaaatttcagagaaaggagttttacaaattttgctggatttgagatttgcagctgacgttctttctgggggtgatactagcaccaatgtggagacaccaaagagcacaataaatagatcggcttacaggcgaaggcaggatcaacagaaaacaaagttagtcaatagaggtcgcattgatggagtgacctcccaactaacccaaaagttggatcccatagactggcttacgtaagaaatcttatccctaatctttacctacgtcatatattatcttttactattttggctgctctatcgtcttgttgtcactctgattctagtattttgaatatcaaaaaaggtacgagccttatctttgggagaacgaaaagcagtcgtacctacgccatgctgtactctttggtttctttgtgcaactaaaccgaatgtacacagatactgcgcagaaactatcaattaatatagaatcaaatatcatgccatgttccacagttccccgcttcaaataccttcccataaggtaagattttcttcttctacatctaacattgtttgtatgtttgtagcttttaaaaaaaattgggaaactagtttctgctatcagaagtcttctttttgacctttttaaaatttgggaaactagtttctgatatcagaagtcttcgtttcgggtcaaatgcagcgctccagctctgtcatctagaagtacaaataaggtctctattccagttacatcaaatgatgcttcggcaagaaactcatggaaggcatttacaaacggcgagcaatctcaaacaagtgatttagaagaaaattccaatttcggcgtggcttttaagtctttcatgcaggtaaaggtttaggctttggttaattaatggctacaatgttgtaatcgggtttagtatattagaccatgtataaattgttttttcaggaaagcacattgaaactgggatcaatattaactgatggacaagtgggaatattcaaggacagatcagcagccgctatgtcgacatttggcgatatactaccggctcaagcagctggtttactctcttctttcacaaacaccaggtccgagtgatgatcaaccagttttgagactaaaccgtcattttcaacccgaatttcctgccgtcggtttatgattcacacacaagaaacgaagaagctgattcatgaaccaaaaactagagatatcttcattgctatacaagttttacaaaaacgagagaacaggttttgtaataggttttgatttattgtttcttatatgcttcttttataaggaacatgtaattaagtaaaaaaaaaagatttggttcaacataatcctcagaccaattacaatcaaggatcgctaaaacatctgacttccatcaagttaaagtttggctacatataaccacgccaccacagtattcagatcactaaaacatctgatttctatcaagttaacatcccggtaaagcagatttagggatggtgcttagcaatgagaggtttcagcttcttcttgtcagcaagaatcttgaggaagttgaagaggaaagggacatagttgtgtttccttctcatgttctctttcttccagttcttagatttctcctcctccattacaatcttttgtgaaacagtctctatcccgatattgacttccgaaagctctctatcaagagcctcgtaactgcttttctcagcgtatttatcagcttgcaaagcacctaactgctgcaaaaccctctctcgctttctttgatactctttcagttcagctacatacatctctttcctgttcttaactacagctaagagactaaaccgaatctcattctgcgaataccggtcaatctgctcttgtaccacaggttggaccattctgagccactcgattccttctggctcacccagacactgtccaagactaatgggtccttctttaagaccatcgagctcatataagataccatcaacaggtaagtagctgatgtaatgatacacatcatcatcttcgtctagatttttcgcagcagctaattcttcatcttccatgatggaagacgggtcaggcctggcaaatgtgttgtgagctgcacgtattgcctcattgttgttgatggctaaacctttcagttcaggaggaaattctttggcgaattgtttcagttctgatagttctgagccaatatcaatactcgaagagttcatgaggactgataatatcgcttgggtcgcacaagcattgttgattatctgcaagaaacacatagtttataaaaaaggtaatgattggaaaatccgtgagtcacaaatctaatgtgagagtaaaagacctggcttgcaaagaagaaattcgggtttggctctgtgatgacaacacgattctccttttcttctggacgccacttgtaaagcaatatcaatccatagacaggtctgcaaatatcagacaactcaaggtaaatttgactttgtttttcttctgtttcgaacaatagaagatgaaagagtaacaagtaaactaccttatttcatccagagagttgaagtccaaggaatacaattcctcaacctgcacacctttcacttgcatttgttgtataatctcagtgaaaatacctaaaaatatagaatacagaaaaccaaaaaatatgaagaaataacaaacaagaaagcgacattggtcttactcacatatatggcacaatggctatcgagagacactaatccacttagtataagacaaacaccattgttgatatataatttcaaaaagcatcaatacttttattttccaatcctcacacagtaagtatcacctcttgtagatgcagagaagactattttcaacatttgttggcttctaatttgacaaaatccaaacataaatcagattctacaggaagccaagactattttccaaacatttttagtgctccactatcaaaacctcgttactgacatcatctctttatatatccagaaaacaggaaccccaaattgttaaagagaatatataccaggatcagattctacaggaagccaagacatggttcaacgatgactcgcgccggtgaaaatgggtctgaatttagaattttcactctcaaattcgcgcttatctatctcctcccatcgatttcatcgtcttcacgctagctgcagactcgaaagagagactatagactggtgtggtctcgattttgtcttaatagaggtcgctctaaaccgagtagaaacgaaattgaattcatccaaaccatttcaatttctataaatcgaaccaaatcaagtgaaaaacaattcggttctggttttattaaacttactcgaaccgaaccgaaccgataacgttcttatatatccttgccggagagagccaaagaaatcttagagatcaaacaatgacggcgagtgagactatcgccaccgcgataaatcagattgatgagaagaaggaaaagctaaagaaagctttcgacgatcttcaagctcatcgctctctcctttcaccgtctttctcactttcctggtctgagatcgattctcacttttcctctctccaatcctcccttgctagccgtttccgcctcctccactctacatctcctttggaacatgattcgtatagaatcgacgcttctgatgcagggaaatcgtcgtcttcggaggaggtatcggagcaacccgttgttgagccggagttgagagccttgtgtgagaagattgacggaattggtttgattaagtatttgattaggatatgggatgatgaaactcctctcaatcaggaagtttctgcagcgattcgttactctccggatacggcgtccatggtgcttgacgcgattgaaggttcgaactacacaccgtcatcatcgggaagatcattcgatgtaaggagagttttcgttttgttaatggaagttttgattgagatcaatgcgaatatcactgttgatacgagaaatagagctaagaaactggcttaccattggaaatctaaggttggtgtcaagcctttcgaggcgttagtgtttctgcatttggtcgcagcttttgaattaggatcagaatttgacacagaggagctttctgattacgttttcatgatcgctaagtataagcaagcaactttggtttgtaacaagattggtgtagataggaaaagagttgggaaactcatcaagactctcttggattctggtaaaccaattttagcagtcaaattcatgtatgagtgtgggatgactgatgaatttgagccaatccctgttttgaaatcttacattaaggactgtagagaagctgctcttagagtttgcgtggaagataactactctctcaagtcgcagaacgaagcctctgataaagaagtcagtgccttgaaaccattgatcaaaatcatcaaagatcagaaccttgaatcagagtttactcaggagaaagttgaggaacgtgtagaagagctggagaaaaataaggcattgaggaaacgcaacacgactaatcctcccaagcaagagccacagcaaaaggggaaaaagcggactagagactgcaaaaatgggtcacaagttccagttccgagtcagcagctactttctagaccagaagctcttcttatgcctgagcatagtcatcatggcttacagttgaacccttatggtcttatgacctcagcattttctggtgttgttgtgaacccattaactgggctctttggttcaggtgcaactcctcaatctctttactatgctcagcaaactggatatgtgttgccgcctcaataccacccgccttattattctcagtagctagctgcatctcgacaataagatcttaatctcctcaatgtaaaatgttatctttgtagaatatttgccttgatggaaagtaaaaaaatcattctaactctatgtctgaggaatctcattctttgtttttttggtttatatagaatagtagtgaatttttctacaatattggatcatgtttcctacattatagattcttcgaagaattcgcctacccgcccgttggcgtgtcttcaaacctcatcaccttctatttctagaggtaccagtagcatatgcgcgaggaacgaggctctcgacgggcaccttaatagcatcctttctcataccaatatctgcaaatagctgaatagctttgctgccgaaaggactaagttgcgcaagccacgcagctgcactcactgagctggcttgaccgccccttcccaacacatagtcttttccgaccagcaagcttgttttacaatatattgcaaaatcttcacaattgttttccaaagcatggtaatcaccaaacccattccgcaataagaggtatttggcgcgggaaatgacttcatcgcagggatccgaaggtgctatagtgcatgtgccgcgtcgaggtttggcgataaatgcagctggagagacactgtactcgaaaagatagatgtttcctccggcgagaaagcagtcaaggcaagaagagattacaccttcgagattcaattgctcttcacaattagaacaaggattgtctcctttatgattagggatgacactaacgacgatcttgtccaagaaggtcccagttccagtttctagaccacctccacaagtgaaatgaatgactttctcatcgcctatatatattcctgaggatgagcatcaaatatttgattatctttgatgcaatccgaaacaaaaaaaaagtcacgttattgagagatagagactgaaccgtgatgagagtagatataagcgttacgccatgaatagatgtgatctcctggtttaagtttatctctggagatttggtttgagataaatcctatcttctccagaaagtgggaatccattttgatgactatctctcttcctagctttgttatggttgtgattttataaccaaaatttaaagtcagcagccatattgtttttttacgtctgtagctgaatgtttcttctttattggctttagtaaaaggagtagtggtattaaaataagagaaaatttgatttcagagtcttcccatctatctttgtcaacttatatcccccctgcacgaactttcttcccctacaaggcaggagaaacagttatgtgagtctacgaaagttcctttgtcgaatatgttacttgtgatcaatatccatacagcataacataaaatatagagttggacaattcaacaaaagcagccgcagatcctctacttcacaacaacaactaggtaagttagttactgatagctcagaaagagccaagaaagtgtcttcgtcttctacgacggcatattcgtggaagcagtttcatcgattccggctcactgaagcggcgtcactcttaaaacgaaacaacacctctgaagcagcataaaccaaagaactgctggtttatttaatccagctgatgactttggttggattctgttatattgttctttcataatctaaagagtcttgaagagttcatttcttggacaattaatgttaccaaaattgtatttccatttgataaatagttaaaacacagttttcacaatacaaaacaaagcagaaaagcaaaatctctcttactcaacaactagtgatcaaacaaacatcaataacgtcaattaactagacttgttcttttccatgagttcaataaggaaaacgagcctttccacaggaacctaattaacatcggatctcataccaatgtcggaatgcaaacgattcatacaatacttactatacccaccaaccaacaccagaccaccaacttccagaaacgggaactacatatcgaagtgtcgaagaaaacacagaagcagaaaagcaaaatctttctttactcaaactaattagtcatcaaacatacataatgcacatactcgccgaaaaaaacatacataatgcagatcggtttttcttgtttttgggcatgtgtgccgtattaggcagtttatgccttgtaagatttataattatgggcctgcgtgcttttgttggcgtcatggaccttgtaattgtttgggtttaataggaaaaaagagagaaagaaaaaatgtgctaagaccatccttattcatgggttcttaataaaattcttaacatttttatatataaaataataattaaatattaggaggctcttaataagttaagagaatgtatcaaaaatctcttatttaagagccaatttaacttttctaagaactcttttctattttttattcatattttatcttatataatattttaagaatttttctaaactttttgaaaacccattgataatgatgctctaacacttcttgttctccattatgcattgcttggctcctacaaggctacaactacaacaagctcttccacagaaacctagcaagtatatatcatttctatcaccaatgtcgtaaaacaagtgactaatacagtagttaccatattccgtcaaagccatattaccaaaaccaggaagtgcatatctaactatagaagagataacctggttagcaaccaccagctgcagtctgcagacatcggactggcttgaccactagtccactacttgtaaacttggtaacgatcgctaaaaaaataaccaaaccagttttgcaataaattgcaaaatcttcacaatatttgtctaaaagatcatacgtacccactaaactcatttctccataagggaaattaagacacttgttgtcacttcctccagaatgaagacatttttatacagagatgaggttaaggattggaagaagtaatatttactctcacagaaatatagtaacatatgttttatgtaggaaagcgaaagcttgacaattagggtttaggttttctgttttctcattaaaacattaaagaatctaataaaatgaaacacactaaaaaagattcttaaacatcttacataagctcataggcaatatatatttttaagaatattccaatttccaaacagcgtgaaaacaaataaaccccaaaccattttgttacatataaaggaaacacatcccgtatacaatagatggattacaaatatagattaagccattgtccattggtacaacatatgcattccataaaattagaatcaatgtgattcgtaattttgtggaacggtgaaagaaagacgtttaagaaattgtcttatcacccatcttctttgcaatgtccctaagcacaaacttcgtaacctttcccgtcgaactcttaggcaactcatccataaacgacaccgttttaggaaccatatacttgggcatcttctttctacaatactccatcaattcctcctccgtaggtttcccactaaacccatttttcaaactcacaaacgcacacggtgtctctccccaaaactcatcaggtctagccaccaccgccacttcattcaccgccggaatcgtgtacaacaccgtttcaacctcaacactactcacattctcacctcccgttataattatatctttcgatctatctttaatctctagataaccatcggaatgaatcacaccaacatctccggtgtaaaaccacccgttctttaaagctttctctgttccgaccggatcttttaagtaaccgagcatgaccgagcttcctctcatcacaatttctccgacagtttctccatttctctcaacgctcaaacccgattcaggatccaccacgtcgatttcagtaaacccgacggttctcactccttgccgtgccttcaatctcgctcgatcgcttgccggtaaatgattccattttggcttccacgcgcacgagacgattacaccggcggtttccgttaatccgtaaccgtgactgataacgaaaccaattgattcggctcggaggaggacggtagctggaggcggagaaccggcggttaagatgttgacgggatggttaagaggctgagattcctgagtcgcggataacatgttgagcaccaccggagctccacacatgtgtgtgacgccgtgatcacggatcagacggtagattaacggcgcgtcaaatttacgcaaacagacgttagttcctccgacggcggcgattccccatggattggtccaaccgttagagtgaaatatcggtagagtccataagtaaaccggatttttcggtacggcccaatcaattagtgaatcaactgacattacgaaaattcctctgtggcagtgtaccactcctttaggagctgaagtcgtaccggaagtgtaattaagcacaaccggatcccattcgctttcgggtcggatccatttaaaacccggatcacctctttcgataagatcatcgtaagtgtaactgaattttgaaagatcagccacgtcagcaactcctccttcctcttctttatcggcgatgacgacgagaatcggcggatcagtcgtcatcatcgagaccgcttcaacggcgagatcaacggagaagacgtcgacgaaaagaagcttagattcacagtgacggagaagaacagagacggtgcgtgcgtcgaggcgtgtgttgatgttgttgaggattgcgccggacatgggaacagcaaactggagctcgtacatagccggagtattgggagagagaacagagactacgtcagacctgccgattccgattgaagacagagaagacgccacgcggagacaacggaggtttgtttcacgccacgtgtaaacggtgttgctgccataaacgatggaggtacagtcaccgtaaacggtggcggctctctctaaaaaacctatcggcgtcaacggcggcgagtttgcggcgcatggcttcatttcctccatctcttcctcctagtggtaatcaaagactctactgtactgtactgttcttactgtttattatataatgacattttatttccaagtgaacaatccacgtgatgaaaaatttgtaaaacaatattttgggtttagaaattgagaacaaatctaaaccattagctggaaattaattatcttcagcttccaccacattataatcatagacatttgttacctaccctacacaaccactagcgtactaagtcttaaaccaatgttcgaaactactaaatataattagatgttgatttataatgtattgttattcgacaccacaactttctttgtttgctgatcgtcactcaaagtcacattaattgtaatcttactattacgccaatatagattgttaaacaaacaaacaaaaaagtttatagagaataaccttaaaatatcgcttaatctcgttgcaatattgtttggtggatctaaatgtcgtatgtggtaatttcaatgttaaaaacaaatataattggcatattatcttttatgttggtatggtatttttctacacttttataacatgaaatgatttttctttagataatattgttaaactttgtaaaagaaataatggttgtaatattgaaaatgatgttaatatttatgtactattctcttgttaaacattcattttaattaggctattcttaattaagtatagtatgtgatgttgttattaacatttttacgataccaagatatattaatttgtcattttttccgatataaatttgatcatttgtatagaatattttaaatctatatattgaacttaaattttaatggaaatatttcttggtttagtacgtacagtatatattatttagagaatttttctgatatccatcttttagtgactaactaatttacttcaaaggttttgaatgaattttaaaataatttacttagatatatatatatatatatatatatatatataatgactaaattaatctactttaaaccatcgttaactaacagttttggtcgaactattttgacgaaaaaaaactgaagtaaaaaagttccaaaattggttacaaacggataaatggaaaccataatttcaaccaaactctacagaataagaaaaaacaattatgaagtcagagataagaaaattgagagatattaaaaacaatttacattttatttttttgttaaatttcattttctttaaccaatataaatgtttcaaaactttagctccgaatagtaactgcgttttgcgctatgggagaaatgcggtgcggttcaaatagtaatgaaaatacatagatacatatgtatatgtagaaattttgatagggttacagcactgttgtgatacggttttgagtgcggttttagttacctttcacagccttaattggttcagggatcaaccgatcgtccgcgttcgcgtcgtgggtcatgtgatggtttagccatttcgaattccaaagcactcacatgttttatcccttttatttattacgggatatgctttgctacattttcctcacgacacattaatacattattaatgagattggactagtggcgggtgcaaaattatatgggaaggggaaagatttttttgttctttttttttcagccacattaaaattatgaacatacacaaccacttgagtactagctaattccaaaccaatgttcaaaaaaaacccaaaaaaaaaccattatagacaaacttaataaatagcgttggagagagagaataaacatgaacatctaaaaagggaaaggagaatgaagaatgaggaggaggagccgctcagcccgatggctcgtgtattccaatcgccggacatagacttatgtgccatcatcaacattgggttcaaaacaaaaattaatcccgacgttgttcttgatgctttgaagcaaaatgtttacaagcatcctcgtttctccagcaaactggtaccctcctataaatataccacacattctttacatagttattttccatcacttatatgtgatgcattcatacatgacatcatttagaattacatatatatgtttatgtacagatggataaattgatttttttttaaaatgaattatatgtttgatatataattaatttacctgatctctacacagttttgtcggcggccgtgtttttgtagatatatgtataaattttgcttaaatcctacttgagatttgacatgatagtgttttggtctccatctgtcttatcttaatagtctgaaaatggtgaaaaatggatcgagaccgaagtcaatgtagaagatcatgtaatcgtaccatacatagatccagaagatatatgtgaaggtggacaaagcttcgtcgatgattatatctcacgtctcacattgattcctcttgatagatcaagacctttgtgggacattcacatccttaatgtcaaaacctcatatgctgaagcagtcggtgtaataagatttaaccatgcgttggcagatggaatgtccttcatttccctagttcttgcatgtacccataaaacatcaaatcctgacatgttgtctactgctattccttcggtgaaacggcgaagcacggtgtcacatagcctaaaaaaaaccggctggttcttaacggcaatattcaccattggttctacaatgagactaatttggaatacattggtagatatgttcttgctttttgctactatgttgtttctgaaggatacaaaaacaccactaaaaggcggtgcgaatgtcaggagcaatccaaagacattttatcaccgaaatatctctctagatgacattaaacttatcaagaacgctatgaacatggtacgttaattgtgatttatgttcataactcacttgagggtcattttctcttacctttttaaaggatatgtgctttatcttcatatattgcatatggtgctagactatcaacgatgttctactcggaattacacaagctgctctttctagctatttgaaccgacgatatggtaaacattaaactcaatatatttatatatgatgtattattaagatcctaaccagaagtggatcaatatacaaagaaaagaataagcttatatgatcaatctatatctaattaatatgtttcacacgcgtatcttattattcttgaagaacacgaaaataataatgaggaggatggagtattgacttcatatacaaacaatcttccagatcgaatacgatttcgtgcaggttgtacggtaaacctaaggtcagacatcgggttcaaggttagaaacatactcctcaaattatataatttgagctctttcttatcaacaaacaatatttatgtaacatattatttctttctgtataaattaagcctttggcagaaatgatggtcaaggattcaaaatgcagatggggaaactactttagctttattattttaccattatcgattagtttagaaaccgatccattggtttatctaaacaaatccaaagctatgatggctcgaacgaagcactcttatcaagcagctctaacgtattttcttatcaaaatatccctaaaagtgttaggagctaaggtaaacaaattgagttttgtttgcatatttgtggactatatataacacttttcttcaattataggcaacgacatcattattcaatcaacacttgatgaacataacgacatgtgtttcaaacgttatgggtcctatggaagaaatcagtttcaatggccatcctgtcgcttacatttctccaagctcttatggacactcacatgtacgtctttttgtgtttgttgctcaatttactttaaatggtaagcttttctttttaattgtttcttgtttttgtgcttgataggcattgttgatacattacacaagttatgctggtgaaatgacaattactataacggttgatcctactgtaataccggatcctcacaagatttgtgatgatatggaagaatcactgaaaacaatgaaagctgttctctgggaaagagggttactcaaagaggcctataaggtctaaatccttaattaaagacgagatctatttttctttggtactaaagtgttctataagctttcaatatttgttttgtaatatcaattgaagtcggaataaattgatgggtcagttactcagttcaattttcttggaaacaagaaatttattttaactgtaatttttactttacaaatacttaaaatacagtttccacaatacaatgaaatcagaaaagcaaaatcactctctccatactcaacaattagtcatcaaacatacataatgcacaacaaagtgctaactaattagacttcttgccttccaagatgttttgcttggctcctacaaatgctacaagctcttcaacagaaaccttacaagcatcttttctaacaccaatgtcgtaaaacagacgaccaatacagtaattaccatattcagccaaagccaaaccaccaataccaggaactacatatttaactgtcgaagaaataaactggtttacaacagaaaccacagagtcatcttcatgaccactactactcttctttttcacacctaaaaccttaagcgtcaaagcaacaacaccaccagctgcagatacagaattggcttgaccactacatccaaacttggtagcaaccgacaacacaaacaaaccagttttgcaataaatcgcaaaatcttcacaattgttgtctaaaagatcgtactcaccaaatccattttgcaaaaggagaaatttagcacgagaaatgacttcatcacaaggatctgaagatgctatcgtgcatgtaccacctcgtttggctagaaagatagacggagaggcactgtattcgaagagatgtagatttcctccggcgagaaaacaatcaagacaagaagagattacaccaccgagattggattgatctccacaatcaatacactttttgtctcttcttccatgatttggtattgaaatatcgatgatcttgtccaaaactgttcctgttccgaattctagaccacctccacgagtgaaatgaatgactttctcatctcctacgtagactcctgaaaaattgcaaaacagggaaatatcgtgttatggaataacccaaattttgtgatctttgttgataaacccagaaataactaagatcaaacgttaagagatggaaccgtgatgagagtagatataagcgttacgccaagaatagatgtgatcgcctggtttcagatcatctctggagatcttgtgggagaacaatcccatcttctatagttcttagcgagagagagaagagaaggagatccgagtttgcttaatgagttgggttttcttttttcgtggaggtattttatattacaaattaatcttggtaagataacatggcttccaactatatatggaaactgcaaaacagtcatcaaattaattaattacaaaacagcatataaatgagataattatggacacgcaacttgtgagttgtgagatacgtgtcttttaagacacggtgttaacgcgttggactatgttactctttttagttagtttgatgtttgtttagttctgttttgttttgtttggtctcctggccgaggatcactaaccataaatttttaaccctatactgaaacggtctacaatggacttaagacattctcatacttgttagttatggctaaggctgattgttggggtgcaccatataaactaggcttcaaccacggaaacggtcattcagctttttctggccgagttcttgagcggaactcaacatggcaacgaaaaaaacgtaactcatgacgaaagtcattttcatacactttaatttgtttattagacatcaaaagtacactttaagcctttgttctatcaaattcgcaagttctaattttacatccgactcaacctcgtcgtacccatcttcttcgcaatctctctaagtacaaacttcataaccttccccgtcgaagttttaggcagctcatccacaaaggacaccgttttaggaaccatatatttcggcatcttcttcctacaatactctatcatttccacctccgtcggtctttgagtcaacccacttttcaaactaacaaacgcacacggcgtctctccccaaaacacatcaggtctcgccaccaccgccacttcattcaccgccggattcgtatacaaaaccgtttcaacctcaacactactcacattttcacctcccgttataattatatctttcgatctatctttaatctctagataaccatcggaatgaatcacaccaacatctccggtgtaaaaccacccgttctttaaagctttctctgttccgaccggatcttttaagtaaccgagcatgatcgagcttcctctcatcactatttctccgacggtttctccgtttctctcaacgctcctacctgattcaggatccaccacgtcgatttcagtaaatccgacggttctcactccttgccgtgctttcaacctcgctcgatcgctcgccggtaaacgattccactgtggcttccacgcgcatgacacgtttaatccggcggtttccgttaacccgtatccgtgacttatcacgaatccaattgattctgctcggaggagtacggctgctggaggcggagcaccggcggttaagatgttgacaggacgatttaacggctgaaattcgttagtcgccgacaacatgttgagcactaccggagctccacacatgtgtgtgacgccgtgatcacggatcaaacggtagattaacggcgcgtcgaatttacgcaaacagacgttagttcctccgacggcggcgattccccatggatagctccagccgttagcgtgaaatatcggtagagtccataagtaaaccggatttttcggtacggtccaatcgattaaagaatcaattgacattacgaaaattcctctgtggcagtgtacgactcctttaggagccgaagtcgtaccggaagtgtaattaagcacaaccggatcccattcgctttcgggtcggatccatttaaaatccagatcacctctatggatcagatcatcgtaagtgtaactgaatttggtacgatccgccacgtcagcatctcctccttcttcttctttatcggcgatgaagacaagaatcggcggatcagtcgtcatcatcgagatcgcttcaacggcaagatcaacggagaagacgtcgacgaagagaagcttagatccacagtgacggagaagaacagagacggtgcgtgcgtcgaggcgagtgttgatgttgttgaggattgcgccggacatgggaacagcaaactggagctcgtacatagccggagtattgggagagagaacagagactacgtcagacctgccgattccgattgaagacagagaagacgccacgcggagacaacggaggtttgtttcacgccacgtgtaaacggtgttgctgccataaacgatggaggtacagtcaccgtaaacggtggcggctctctctaagaaacctatcggcgtcaacggcggcgagtttgcggcgcatggcttcatttgctccatcttgagtggtcaaatgtattgttttctaatgtctgctccttataaattgaaaaacacttatctataagagaaaagaaaaaagagtttcgtgattatctaggacaccttggtgatgacaatggagataaggttgacaaatattacagatctcaagccaattggcatgttagatgtaaataaacaaacttgtttgactacgtagcgctatagtctttggtcatatttatgtatgacaaggcatacaataccactttgaaaacgcattgaatgatatataagattttaactttttaaggtttcaaaattctataaggataaataaaacattaccatctttaccgaattactgtatagtttattcttcagttttaagagatgacgatgatgtgaattatattatacataccgtttgcagatgattgagacaacaagtagtggacgtgccggagtggttatcgggcatgactagaaatcatgtgggctttgcccgcgcaggttcgaatcctgccgttcacgaattttttaaatgcatacttttagatttaccacaattcgcacgtgttatggtcacttatcgttttctctctaccatcactaatttaaggccccacgtaaaccacgctcaacatgacataatcgatcattaaaggccaaaggaatgataatgacactgcacttcttttagaaaagacacgcagcggtcaggcgtttggcgcgtgtataaaagttctctgtatttttcatacaacgattttgcaagattttatcgatgaaaaaactcaatgagatagagctttaagcatttaactgaaaaattatgtagcgagcttagatggattcatcattatttaactgattaatctgctctggctctctctctactacaatcaaaatctcatttctctaatcatcttccatggacatgtttaacaaccacaaaacaaaaagattcatgtatcctcaacatcctttcttttacaaagtaaaaaaaccaagaaaagagtgtgataacacaacagtttctggtgaaaaatccacaagcatatatgtatatatatatgtcttaacccctaatcgtgtaccaaagcaaaaagaaaaaaaagtattcatgcctcctaagcttatgctgttgatgatactatgatatggtgtaaaacaaaaaaaactactacaaaccaaactttttacaacacacaccataccaaaagacatcatcagtagaatttgcacttccttctaagcctcagatcaaaaacctaatgtccagcgacttcttcgtggtccaaatatcgattggatctcttcaggttgcttctgcattgtcgattgcatttcttcagattgcttctgcattgtaagagtaaaggaaacaaagtaaaaacactgatttcaaacctcagcaacaggtttcaagcaaaaacaaaacccaaacaacattcatatacaaagattcttagactcaaagaagttacgtcaagattcaattatgagctaggaacagagacaatctcgcctcttcttcataattgtgtctatggaatctaaaacccttcttcactactcaaacaaatttaggggcaattctaaactctaccaatttgaaactagcaattcccaaatacaatgaaattgcaaaaaggtacctccaaatcacggggtctagagagatcaaccgcacgaggttgagattccgcggcggtgcaatctcgaggcgactcaaagagcgaaagagaaagctgcttatcagcgacaccgacatcaaagtgaattaacccagagctctgcggatcaacatgtattcctttcacagcaaaccaaagaaacagctccttctgcgtcacaccagataaattcccgatccgtccatcggagagaacgccggagatattgtagtcgaagtggaactgattctcgaatttagcatcgcaaggaacagggagagcgacggtgaaacgccccgttttgatgtcgatcgagaaattggtaactcctttgggaactattccggcgggaagattgctttcccggagataatcgtaaaacgacggatccggtagcgaggaaagctgaggaaagagaatcgaggagaagagaacgatgatgaggaagaagagatcttgactagaacccattgaataaaaacagaaattgtcaaagcaagagaaagtgcgaaagcgttttcgattgctatgaggaagaagaagaaaggcggttgtagttgcctctgttaacaaacaatccgtttctttctcagatatttattaaattcttcattaactatcatacaaaatgggcccttattcagcccatattgacgttgggcttgtattctgaaattggataatttgcaaatagaacagaacaagaagagttcgtgtatataggaaagaaataaaaacagagcttatggaaaaaaatgtctcatctttttttttttaacgaatagagaaactaaagaaaactcaattcttcctcaccaaactaacaaacctaacagactttaacagtgacagcgaaggggaaacgtttttagaagtctcagcaaattttgtattaccaaagcacagagaatgaatttagtagagcttcttttctccatttctcatggtgccgattctacggttgaaccacaaacagaggctgtaaaatcgcaaaaacatcgaatatcagtagagatatctttctaaattatatataacctttcaattgaaatgatgaaatcgtaaaaactagttctagtaaagcacacaaaattctgacagtgtaatctgcgacaattagaaaacttacagtgtcgaggctgacaggcttgccgtcttctgcgacaatatcgactacggttccggtatggtcagactgaggagaagaagttcaagtttcagagttaaatcaatggcacacgttaagcacaagtattcatccatatataattgacaaatcatatgaagtagatgactaagtgggattgaacagagaaacaacatatttttttagtgtatgtatttagtaagagatgattcgaagtagttaaggtagataaaaggttcagatggtaccccattttcagatgattcagaaactcacctctatttcattcattaacttcatggcttcaacaatgcatagaacttgccccttctgcactttgtctccaacctgaaagaccaagaaagttatatggtacgaattcagacagtgaaatgcagcagccatgaatttgcaaaaatcgctatttataaagcacatgcattaacatcaaccgaaaagcgcatgtcttagtttcagaaaataatctaaccttaataaagggtggttcaccaggtgcaggactacggtagaatgtgccagccatggggcttttaacagtaggaagtgacgatttggctggagtaggtggggatggtggaggcagagaggctggcgtagaaggggctggtgcggcagcagcaggtgcagcaggaggagccatttgctgggcataagatggttgatttggttgctgcatcataacataagatgcaggagcttgaggttgaggtaaggcttctttttttcgaatgactagttcacagtcgagttgtttcaactgcaactcaacaatgtctcttgaatccacaagcctacatgatggaggtaaagtattaatcacggttaaaatgatttaagtaatagaacagagcaactttactcacttgacaagagttgttacttgggtaaggaactcagaaatagactcttctgtagctaattcaggagaagaagcagacgactccttcaatgagtttttctcctttccttcagctgatgatggcccatcaactttggcagcatttgatgatgcaccagtactaacctttaaaggcagaaggagagtccagaaatgaacaagtttctggataaacactttctcaaagagatcactaaaaaaggagcttaccttgttagattgtgctttcaccacagggtagctactgcgactaggctgcaatgtcatcaaatgcagagaaacagttatcccataatctcgaccttggagatcaactactacggtagtgaattacaactttggactactctagaaaattcctaaacatttccactgatttcaaccatatttaaaaagaaaaaaccccaaatcacgattgtacccataaatctggaaatcggattttatcattcttctccggaaaaacagtattctctgaattctaattgacgccaaatatatatacagagagaatcaaatcgtaaaatgcagataaaaactaatcgacgaagattagccaaacaaaacttgagtaaattgaaattatccatatttcgaaaagctaaaaactacattgcaggataaatgatcttatcttaatcgaggaaggaatcgtgtaccttggagagaaagcgaagcttgggcttagcagagagacggaaagaaactctgcgagagcggttttggattgggaagtgcgaggaggtttgagtgactgcatagacggaagcagcagcagctggagatgtgactgagaacgacgaagacgccattcgtcttcttattgttattggttcagatcgggtttaggttctctctcgatgaaaccaaagagcacaacaacaacagttcacttcagaaagagagagagaagatgtcggattcggaacgcgtttctctttgattataactctctttcagatttcgccacgtgtcatactctgatctgttgttctgtattcgcgattactcccaatccttgtggactatcgtattttttaccttgaagaatttaaatgaattattacttttaaataaatataaaaaatgttagggttaaaatcctgtttaggaaattacaatttctctaaactctttagaggaaacacattttttcagcaagaaaaaaatccgactgcatctaaagatgaaaatgctgtcggtgtctccaatttttataaaaaaatacatgaatagatccaaatacattagcctaatatacatacgccaaatgtattaaatttttaaaattaggcgagactggatttggtgaacaactaaatgaagatatgacttgttaacaatctagctggaagttggaacatccattgaaaacaaagcacaagcatcgtacatgtaagccaaaactataaacaaaatgcatctatttcaacaatcgggtcccccaaaattaaaatcaatcttaatttttaaatttcttatagtttacatgcatatttacttggttatgaacttgtgatgcatacagatacacattcagctcatcattccataactttccagcatttatacatagatagtgaacaaccgattccggttaagggaacagcaaagagttacatacatagaaccaaacgaattacatggatggagaatgatcctaatactttacataatgagtgatatagagagagactcagcctgaccttgctgcttcaatggctgcaagtaagtcttcatattttgccccggtcacttcctttactaccttgttgtctttcaagattttaaaagttggaaccactctaattcctagctctttcgccaatggctgcaagcaagagtttttgagttatgaaataagtaacataaatataaagacacattcagcggaaaaagaagaacaaaccttgttgtcttggttacaatcaagcttaagaaacaccatgtcctggtacttctccgatagctctttgtatttgggagcaatcactttgcaaggaccacacctgcaaagagccaaacgaggattgaaaaaaaagagaggcaaactgatttttctcaacaccaaaacagaacatttaatagtaaactcatctcaagcattcatgatgatggaaattggaacaccttttatgcttatttattaaatgtacatgctctaattctcctgaaagtctcactattcataacttcatatccttttgtatatatcattcctaaccaaaaaatgaattcaaaagaatgtgtacagagaagcagcagcctgatactgtgaagattatatatgatacttacaatgctgtaacttttgaatacaattgaaagtaacaaggtgatcatatactaaccctaaactatggaagctacacaatgtgaggttcatagagctaaaaataggccaagagaagcaaaggatatggttagagaccatgatatgattatgttgtagcaagaattggcaattgagaattaaagacatgaggatctgctaaagcaaagttctctggtaaacaacttagcaatgttatatcaactgagaaatccctaatcaaccctaatttccaacgacttatccaaaacctatcaaaaatctaagtacatgaattttccaattctctgaacatgcgacggaatcaagtagttccaaacaagagattgcaatcaagtaattccaaaattcgcaccaagaagaagaagaagtgatcgaaacgttaccactgagtgtacatgtcgaggacaacaatcttatcaccggcggctttaacaattggccagaacgtgtccttatcaacctccgtcacctggccaacagtgacattcactgtttctaagctacacctcaccacacaggaaccaatccttctaccggaatctaaaacaccaccaccaccagaacagaatccaattttcgtcgcgacgcccgaattcgggatccggcagtgctgcttcacgggggaaaatcctccggcgccggtagatgtaatcggagaataacggaaagacgtcggagatggagcaagtcggagagagagaggcattgttgaagaagaagctcgagtccaaaaaacagtagtgtgatctttcaaaggaacctgggagacttttgatttccaaattttaattcgagtgttgttttcgttatccgtgaaatattgtagattttcttaccgtgaggtcaataataccctcaaatggataacgaagaaagaagacatttggggatgtttacgtattttcgggttcgatggacgcgaggttcagaattatcggagtgtaaaatgacgatcatacccccacaatgtaaggccaagaattgacgattagtcgattaccattagcaatctgcacactcattttcttttggtttaaacttaaatcaaaatattgatcttaaactgaaatttacaactataaaagccaaatttatataagcctttatttgcataataatataaccaaagtttgataatgctttaaatcttgagatagtcgttgtcaacaggattaaacacatgagaagcctcttgttcaataaacctcaactgtcctttcgtaagatgcaagtaaaccgtccaatctccggagccaccgttttccaccggactcggcattgtcattacgtaaccagctctgctcccgggtgggagatggtacgatccaaaaacaggcgagccccacccgaaatcaatccgggccactggaaaactctttccagacgaaacaacgaaagcgggtccatcgttggatcctgtactgtagatccttgatataactggtatcggacggctagtctcaacccaatcgatcaagttcaagaaatggtctttggtcattgtactctccagtaacttgtgaacctcgtctgtcacccaagacaatggcttgtggatcaagtcatcgattctccgctctccaaatggaactgagaggacgttcccaaagtaattgcagttctcttgctccataagtttcttccttccatcaacaacgatgccaagtttcgaggttttagtcgggagtaccgactctgttgcagcgtgtttagccaagagtttccatagaaacgcactgaaagactcgagtttggtcctcttaccattagtagccagagtttgaaacttttctaagacatctgctttgatgtaatagatacggcttgttaggatattatcttgattagtgatttcttgtggaacggtcaaggacgttataggcatgtacagtttgtctattgaagagtcgatgatcaagggtcgtcgtggctttaagagggatcttttgagcaaaggtacatacgaaatcggtatatcggatcgagatatctcggcccacgagacgaggaacatgttcatggaataagcatctgctatacggtgatcaaatgtgcatcccactactacgctcccacatttcagttcagttacctattcagacaattcaaaacaataacaacgagcgaaaaaaaaaacagagttatgttgttgatttatatagagctgaataagtaaaagtatatggctatataggtaatctttgaaggtgtgaaatgcaacgaatagatagacacttcaattttgtattttatacagaactagaatcccaaaacttattccaatatatatatattaatcagattgagacatatcagtggagccagctttcgtcactacacactattacctgaatagcaaagactccatgctttttcatgggaacaaacttggcaatactttgataaggttcatacaagttaagctctcggagttccacgtcagcagcggcttccacaaactccacaccaccgttactgcagagaatctcgttctctccgttggtgggattgatggagacctccccggaaagaacgtagtaggagacaagagcctccgccatagccgttttgagggcatcaccaataatgccataaagtggtttcttgtagaagaagcaaacgttgatgtcgacaggagggataagcaggtcgaggttggagagagggataaccctgttttccggcaaagagagaagaggagcagccgccacaacgacctccttcctcgtggtggtcacgttgaaactacgtgcttcagatctaatcacagataggctatgatatctgaatccgtccaagaacttcgagctgtggagagaagaggagtaaaagtgaatcatcattattgtttttttttctttgttttccacgaaagggaaatgagcccaaaataaaaccttatccagaataatacgaatgcggatggggtaaccttacgaccaaagcactgttcagtgatggtaacctctaacctagcgatcatatagcgaccaaattatatttttgcaaattgttcgacaaaaagtattaaaataactatctattacaacacgtgccaatgtattgtgatttagaatctaaaaggttccaacttagcagaatcttgtgcttgatttgtataattgcattgagccacacataacaaaccactgtttaaaaagatgtgaatagttgcagcagcgggtgggcaaattagtccagaccttttttttgtttgtttacaaaaccggtttgcagtagacaaaatcaacttttcatgtacgtaactacgtatacgtatcactacaacttttaaatacaaagtaaactaaaccaaaattactaaccaaactactttttatttttggttaactatggctgtgaaagataatggatttagaagaccgggaatactcaaaccggcacgtatccggttaataaagacaccggcaaatttaaattcatcttccgtcgccttcgtaaagtcgccgcagctcaaaattcaataacaatgttcctttcccgcgtgaaccccacgcgcttccctccattcgtagcttctcgtcgtctcttctccgcctccgcctccgccgcttctcttcagcaatactgcacggagaagccaccgatcaaaccgtggccgcagaggctattcccgaagcgattagtctccatgatcacccaacagcagaacatcgatctcgctctccaaatatttctctacgccggtaaatctcatcccggtttcactcataattacgatacttaccactcaattctcttcaaactatcccgtgctcgtgctttcgatcccgtggagtctctcatggcggatcttcggaactcataccctccgatcaaatgcggcgagaatctcttcatcgacttgcttcgaaactacggtctcgcaggtcgttacgaatcttcaatgaggatctttcttcgaatccctgatttcggtgttaaacgctccgttagatcgttaaacacactcttaaacgttttaatccagaatcagagatttgatttggttcatgccatgtttaagaacagtaaggagtcttttggaattacgccgaacatcttcacttgtaatctactagtcaaagctctctgcaagaaaaatgatattgaaagtgcatataaagtgctcgacgaaattccttcgatgggattagtgccaaatttggtgacttacactacgattctaggtgggtatgttgctagaggtgatatggaatcggctaagagggttttggaagagatgttggatcgtgggtggtatccggatgcgacgacttacactgttctcatggatggttactgtaagttagggagattctctgaggcagctacggtgatggatgatatggaaaagaatgagattgagcctaatgaagtaacttatggtgttatgatcagagctttatgtaaggagaagaaatctggggaagcacgtaacatgttcgatgaaatgcttgagagaagttttatgccagattcttctctttgttgtaaagttattgatgcgttgtgtgaagaccataaggtagatgaagcatgtggtctgtggagaaaaatgttgaagaacaattgtatgcctgataatgcccttctgagcactctcatccattggctttgtaaagaagggagagttactgaagcgaggaaattgtttgatgagtttgagaaaggctcgatccctagtctcttgacgtataacacgttgattgctggaatgtgcgagaagggagagttgacagaggcgggtagattatgggacgatatgtatgagaggaaatgtaagccgaatgctttcacgtataacgttttgattgaagggttgtccaagaatgggaatgttaaagaaggagtcagggtacttgaagagatgctggagattggttgctttcctaacaaaacaacgttcctgatattgtttgaggggttgcagaagttagggaaagaagaggatgcgatgaagattgtttccatggctgttatgaatgggaaagttgataaagagtcttgggaacttttcttgaagaaatttgctggtgaactagataaaggggtcttgcctcttaaagaattgttgcatgaaatttctgtctcttgaagaaccaggactatgatcaatactcaaaaggctttatctatgtcctggaggtatgtatatcttactcttgagtttggttttatgcgttcgagacctttagatgcattgttttacatattatgaataatataaataggaccaaaggctcttgtggcagatgaacgtataagggaagagaagcagccactccaggccgcttaagattcggcatccatgttccgcttcaagctatatagataatcaagcagctgacattgatggaggaagatggaggcttgcaaagaatgaagagatctccaaattgataacttatgatatgaatgttgattgtaacatagatgctaattaaagagtgaaaatcatgatttctggtgagatagttgtggaaagagagtttgatactgttagtgttaactttaatttagagaatataggcaaaaccaagttagatcatggaagtgtagctcaatgtatgattggtttatgttttgaactcacaagatatgctactaataacaatacattgtatctctaacgggactgtggacctaagaaaatatcctaataggaagagaggaatgtggaaaagaatcaaacattaacaacaatgttatgtagagacaagcgctagtgtatataaagtgatgtttccctgcagcaatcattccttaagactagtagaaatgaagcgggccagagatattccaaatggttcagacttcagaggcaagtcaatcacataattgcgatggttgctgtgaagtctctggctacggctattactgttcaagctgtgagtttggggagcatctgaaatgcatcgactggccagaaatcatcaaccacccttgtcactcaaggaatcttctcaagatagtgtccatcaggacaattgactatactggtaaagtatgtcatctttgtaacaacccacttggttatcccatgtatcattgttccatttgaagtgttcgagaaactcgccacctcttactatttatcaacctagttcctaacgatggtatgactagaccttcttgcttggtttgtaaaaaccgttgcatgatgcatgttcccttcctttttgtatacttttgttcagtgacgtgtgttcaatacgcgtttgcaatcatgaatgaggatgattagttgaaaggttcacaagggacagaaaaaagatcaagacgggaaatgcaccaaacttctattttgagtgagaaacgaacgttttgggcttatcatttcatgtgccatgtgccatgtgcttggtacttggaatgaaatatttggtatatccaactgtgtcgagacaaacaacaaataacatatttagatatttgcatatacggataaagtaataaatctgttttttttctttaaattaacacctaacttgttttactcatcatccattttacatacaaaatttattactatattattaagttttcaaaactacatttaatttatttagaaatggcagatttttgttgtctatggaatattttccttttaattttaatggctttagattaacacataattatgtcttaatacattgttaataattaaatgacataagttagtttgaatacaatactagtataaatctcatgaattgaaatatattaaaatagtatataatattattcatagaaaatgtcaatataaaactaactattgatgtttattaaaatgtcaatatataaagtatataatctttattaaaaataccattcttgatgttttaatcatggttacatttgtcaatttgattatgccaataaaataaattgaataaagttatcaaaacaaacaaataccataaagtgaatgtcgctcggattctcatctagtactaaattagacaatccaaaatattttgatttaacgtataccgaattttacatttaaatttatttatttttatgcatgtttgcgaactacgtaacttataaaaatcacaatatgtttacaaattaacggaataaaaattcaaataatcgtgcgaaaattaacctagttcatatttattttcttttaattttctcttctgtatatttataggttggtctaattattgaaaaaatcaaaaataaagagaaacaaagacgtaatccaaaatgtctactgcttcactatttagcttcccttcatttcatctcagatccctccttccttctctctcttcttcttcttcttcttcctcttcccgatttgcccctccccgtctttctccgatccgatctccggcgccgaggactcagctgtctgttcgcgctttctcagccgtcaccatgaccgattctaacgatgctggaatggatgctgttcagagacgactcatgtttgaagacgagtgagaaattcgattccttttcttcgattttgatttgggtttggttgatttgggtttactttatccgaaaaattcatcttccacgaatctcatttgatccaaaaccctggagaaagcttaagctgagactctctctatgtttctaagatatagtgatatgatttgagaaagatgttgtgctttaagaaaatgttgatttctttatctttgattatgatcaaatgtgagtggctgcttcatgttctgaagttagtattcatggatggcttttattcaattcaatctctctttttgttccgcagatgcattctcgttgatgaaaatgatcgtgtggtgggacatgacactaagtataactgtaagtgaatttgattctcattccatatataggagaagaatgatggcaaaatcggttttgatgtgacctagttgggatttccttgcttctattagagtgtcaaaatttggttgatccaggataagactgactcctattttgtgatctgtaggtcatctgatggaaaagattgaagctgagaatttacttcacagagctttcagtgtgtttttattcaactccaagtatgagttgcttctccaggtattttcttatgatcaccttgattgtgaagacgactctaggtttagaaatccagtatctgaatagttttgttcaccattatattcagatcatctagtctctatagtaatgtctgaaacaagtcacacttgtagcttatggtggccagccaatggactcggtgtgtaaactagatttaagaaattttatagccaaggctgtgaaaatcacgtagctttatcataaaaatggttggttgggttttggcgttgcttgcttcagagtatgtgaccatcctactgaaattttcttcttctcttatggacagcaacggtcaaaaacaaaggttactttcccacttgtgtggacaaacacttgttgcagccatcctctttaccgtgaatccgagcttattgaagagaatgtgcttggtatatactcttaagctttatgaaacatcgtgaatctttcagcgttagtagctatatactgatatatactattttatctttccttatcaggtgtaagaaatgccgcacaaaggaagcttttcgatgagctcggtattgtagcagaagatgtaccagtcgatgagttcactcccttgggacgcatgctttacaaggcaccttctgatgggaaatggggagagcacgaaggtaaacaatccttccatgtttgatcatttctctttttaactcctttaacttcagattttgaatctcttgaggatttttgttgcagttgactatctactcttcatcgtgcgggatgtgaagcttcaaccaaacccagatgaagtggctgagatcaagtacgtgagcagggaagagcttaaggagctggtgaagaaagcagatgctggcgatgaagctgtgaaactatctccatggttcagattggtggtggataatttcttgatgaagtggtgggatcatgttgagaaaggaactatcactgaagctgcagacatgaaaaccattcacaagctctgaactttccataagttttggatcttccccttcccataataaaattaagagatgagacttttattgattacagacaaaactggcaacaaaatctattcctaggatttttttttgctttttatttacttttgattcatctctagtttagttttcatcttttgttacttcttcagttacaacttacaaaagcaaagacagaacataacacataaacacacgttgaaaacggaacataaaaaaggaagaagacagaacaaacaaaaaaggtgaagaaagtaaaattaaagacgacaaggttatcaagtagtaatctcatgattccttgctctaagcttcaccactacctctgatctgatttataccaaatccaacttttcttctttcaaaaagtaaaaaaatcaatcatttataatttattatggagaagtgagagcaagtgttagcttttgatctttcttatattcttctctgaaatagtaacacactgtgaagagtttttcctacatctgaattttgtctgatccaggtaacaaaacttgatctgatcccttccatagaaatattttcaaaagttttgtcctttttcttctgggtttgtttgattctccatgaaatagaaaacagattcggtgatcatactcaagctatatcgaaaatctgaaaatctgattattttcattatgtgtttgatcatatcatatcatcatgatctcagattacttttgattgattcagtcgcaagtctcatgttttgatcatagctgagaacaggaaaaagaagaaaatggcgtttgtgacaactgcggaagtttgtgacgcgaatcaagagctgattcggagtggtcagctacgagctttgcaacccattttccagatttatggccgtcgacaaatattctcaggaccagttgtcactgtcaaagtttttgaagacaatggcttaatccgtcaattcatcgaggagaaaggtatttgcaaatcaagttcaagattgcaatggctttgaacaaattttacttgcaaaaacttatagagaatatgatctgaagttatgaaaatttgacatgttttatgattagatagaaacatagttgtgttagtggcttagtgtatgtaatcatcacttttccaagtggagcattttgatgattaaagtgtattactttgagagaacagaggtgatcttggacacgttgaaacagccagggtcttttaaaaaaaactcttagctttgggctcttttacatgtatcaagatcagtcttatgtcacttagcaaatttttaatgtttaggatgcaaagggttaaattttgggagagagaacgattctaagttctttaagtaggagtgttcaagggttttccgtttgagaaacctcgcagtagtagttccagcctcttattaattattcaagatcatctaagattctctaaatgttttggttgtcattaggaaacggtagagttcttgtggtggatggtggagggagtcaacgatgtgcaatactcggaggtaaccccgttgttcaagctcagaacaacggatgggcaggaatcgttgtgaacggatgcatcagagacgtcgatgagatcaacggttgtgatatcggagtgagagctttggcctctcatccgataaaagcgagtaagaaaggacttggagaacaacgagttccggtaaatatcgcagggactcggatttgtgatggtgaatggctttatgcagatactgatgggattcttgtctcccaaattgagttatccgtttaataaaaaaggctttgatcagttaccaaaaaaaaaaaaacagaacgtggtttgtgttcatcttcttgttacttaagagattgttgaattataatggaaaataaatttttgttttgaatcaagcatcatattatatgtttctttgaagatggatacaaaaactatattttttccttatgaatcaataaagccaagaagaagagttaagcgcagtaacaagaacaaacagcaccaggggcttcagtaataggttggcagccaccacctttgttagtgggacaaccatccagacacatctgggcgcatctttcatcatcttcttttgaatcacatataccaaattctggctgattgctgcaacactttgggtctaattcgctgctaggccacacggtctttcttgcttcggtacctgcaagttacacaacacaagtaatcaactatctattcaatttcttgtgaacgcaaatgtttttttttgtttgttacaaatggattttacgagttaacagagatactaaccggaaagtagaagagacagagctaggatagcaaaaagaacgaattttgaggaggccattttttaatctttcaactctacaagattactttatgaatagaaaattatgtagtaggtaggtttgtacattgaaaatgtgatatatatacacaactattcacttgttttgctagaaacttagaaagaaagagataaccaatattttcaacatatatacaatcttaacaccagaatatatgttactcaaaatgggtattgaagatacgttttattattttgataccattttctcgaggaataaaatatgctttgatggaaatgacatctattagcaaatttgcagatcgtaactgtaatatcaatatttaggaatgattttaatattcatagatttttaaatgattttggtgatttttggtgaatttaaagaactgatttgctattaaattttaattactcaaacccatgaaacttagatctttgcatttccaactgaagaattctcctagaaatcattataaaaatcattataataattaccttaaaatcattataaaaataaaaacccaataagagtagatttggatatttttccaaaccaccattttgataaatcttatatttttggagatgttatcaaatactataactagtaataataagtctaataacacccgattttataaggcaatccaatactcatatgatcgaataacaaaagattcgtcaattttaatattcagcgagcctttaacatattggaagaacttcttaaacaacaaaagacatgtacacttgacttgtactagtgtttatgcttttttcagtttttggttctattactagaattgggattgatacaaacaaatgagatagacacaagttctggttagtacttagtatcatgacggataataagctagcctaaactgcgtgattgacaagtcagctttgggcagctaagatagcagagtacctcgccagcaaatgattttcgacgagaactcaatgaagatgttgttacattgaagaagatcgttgaaggcagtgaagaggaataataaggaattcacagtgatagtttctcgtcaaacagttgttgatcacttcttctcactatttaaaaccgtaaaaggtattcacaattctttgtagttcttgttatttactattactattgccactttcttacaatttgaccccaaaaaaacgaagaatcttgttactatgtataacttttctgtgtagtagcaaaatttcttcgacgaggctggtttcttctttccctccgtcgtctttccatgacttgttcttgttcttcttcaactacttcgatctctaagttttcgctctccgaaatggttcttgaggaagtgtaagggaacaaaaccggtctaaaacaccaaagaagtgcggtcaaaatcgcgacgtaaaggtacattgaagtccatacgcaaagagtccatttccagttataagccattcgtttaatccagggcggttttgagtttataacgatctctgcttcatataactgaggcaatgtccgagtttgtgcacgcggaatcagagtcgctctcacggcttttgtccttggcattttctcttggtgctttaatgcatcgattctcattgtttgtgcttcgtttgctatcccggctataagtggaacactcatcacaaatgttcgtgcaagtcttataggtttgcttctgaaccgtaacatacaaggttggctcgatctcgcgattgtctcgcctttcaacgataaaagctctactttcaactgtacacacaagacaatgtatcacaaaaaaatgctatcaataaaattttagtgaaataacggtatattttaaaaaattaagacctgcggaatcgcattatagtttggacataataatttcaattataagctgcaaaatgaaatcatcaaattcattggattgaataatataattcttttgattatagctggtcaatataattctgttggtcatgaaatctgatttggtgataaactaacagctagaatcatttgattggtttaaaaaattccatcctaattatggaaccatcataccatttcacgaatattagtatataactaacaaagaattacaattacctgaaatactccaattcttcgattaatttcagattcaggcatccaaagcactaaagagacatgaacactatgaccaacaggaacactaaacgatctcttcttcttatcaaaactaaaaaccgcactggggttttcttcagtgtaatcaaagaacaatctgtctctcacaaccacaggcttttctacatacaaactcacaatcccaacaccaataacaaccgccaaaatcaaagccaacaccattaccattgacacgtggcatgcacccaatataccaaaccatgtcctcctaacaacccgccccgcaccaccagctatctgcgctggagcacgtttaaccgctttttctgctgcggagacggtaacgactgcgcggcggtaagagcggtataggagaaagaaaggtgaggataataccacgagtgcgttgtagattagatcagcttggatggtgactagaaccatgaaccagtcagctcgtaatggttcagggattttgagttggttgtcttgttctttcattgttttgttttggaggattctcatacggtttctgttttatgaaatgatcgataaaatatggatagataaaagtcgctgtcatagagtcatataaaatatgtttttcatttgcatgagaaaattgatacgtgttggttcgtgttcttgagtagtgccacgttggtgcaatgagatcatagtgattataccagaatcatttcatatgaaggaaaaaaattgtatgggtaaattagcttatcctgaagtgttggatctggattttagttccggtattcagctctttgtatctacattaacatatgttaacatgttatatcatgtaacatataaacaaaaataaaacccttaacaaaaaaaaacacatattaacaaaaatagtatttttttttaacttatagagtatagtttacaaagtaaagtgatattattataatgttgttttccgtataattcatactggaaaatagagataattgatccagaaaaatcaaaacccaaatggattaaaatcttaactttttgcaataagatataataagtttctaattttctcttagaggtcatttttttttgtcaaagctctattagagatcatgtacgaaacaaaaaagtctagtcgtgcatgaatgtacaaaatgtacagtctatttattattatttaattcatacatttggtcataaaattctttactatttttatgtttgaatttgcaaagcgataaaaagaataaagcaagtggatttgaacgaatatatattaggaaaatgggcgcaaaagtcttaatatgcaccgtactacactctataaataccttttcaggaaataggaaaatattcctttttttatttattttaatacttttttttaactaaagataaataatctcgcatcgaaactccgtagcccccaaatcgttctctctcaaatcgcaaaattagggttagggttttcaattccccaaccttgcgaatttctcatttctcgtagccgccgcagcaatcaacgatgacaggcaaagcaaagccaaagaagcacacagcgaaggagctccaagctaaagccgatgcagcgttgaccaatcgcggtggaggaaaggcagggctcgccgatagaaccggtaaggagaaaggtggtcacgcaaagtacgagtgtcctcactgcaagatcactgtaccggatctaaagacgatgcagatccatcatgaatcgaagcatccaaagctgacttatgaagagccgaggaatcttcatgaggctttagctgctcctgctgaatcatctaagcctaagcctggaatcagaggaagccttaagaagtgaagtgaagatggtttgggattgtatcgaatttcgatttgaaatttgtggtctttttaatggtgttttgatgtgagaatataaacttgcgttgatgatgctctatgtcttcgtatttttatgttatgatcatataaaaaagtaactgatattttcttattaaatggtttgtttctaacttattggtttcttttgattcttgtttctggataattttggttgttctggatcatgtcaagctgctcgtaaaatcagcatctttgtttttgatcagacatgttagctcattaagacaatacaaggtagtctttttggtgattctgatgaagagttttggttttgttctttgagtcatatgattgttcgggaactttacaggcttctgttaaatctctgtctctgattaggcatgtttggtaagcgtatcttttgtttgaagccgtggggatttgaggaagagtgaaagtttctgcaactcatgttataaccacacaagagattatgtactttgatttggttgtctgaaaagcttagagaaacatgtcgtgtattcattgcataaactggcttttgtactttgaaagagtgaaagtttctgcaactcatcaaacaagagattatgtactttgatttggttgtctgaaaagcttagatgtcgtgtattcattgcataaactggcttttgctttttaatctttcaagccttcaaagcatctggacaagttatattcagttttgttccttttctcgttttaaaaagaaagattctaattctaattcccattgtccttgttcagtcagcttcatggtgcacatgtggttttttcgaatccaaatcaaaattaaaatggactcgagtgcagattattttatctatgacaacttgagtaatcagaatcaatacttcatagcttttcgtgtttggttttgttagtggttggaataaatgtagttgaacatcatgtattttgatacatataattgtgtgttgttcaagaaaatgataaatatgattgtctaaactcaattgctatactttgcgtagggattggtatacatttcctttccttagactagttacgacgaatcattctgatttgatgatgtttaattgtttatagacgtcgacctattataagtttttaacaaaggcagaggcccaaaaatcgactacgtaacattgacttggatatatggtttatggcccacgaatgaaataagcttaaacaaagcccacggaaagaagaaaagaattgaattcaattgcctttactcaatcataaataggaaaacaaaagctcacatcacacatgttagtttcttatgaacaattaagaatcaatctgtaaatttctctaaccgtaaaaaaaagatagagagagaccaaatcaaatcctctgttttctcaagctttttaaagaactatcctattctcaaaaaaatcatcatcatcatcacgacaaaatgtaaagaaacaaaaaaaaatccgatttcaaatctctttctttatcctttggtggcttgaggtttttgctgttcttgaacaacattctcttcttgatacagcaactttcttctcttgagaccatacccattgtactgatatatgatgctgtatagacattgcttcaatctgagcacatcgaaatcctcaatgaaccttaaatctctttgtctccatttcaaacccgcacacttctggtattcctcgagaaccgatgacaagcaccagttctgcactttcctcaagcatcccacaagacaacctgtcctatgctgcaatgagccagaagaaacgcaccattggactcaaatcactcttaacttaacctaaagcttgttaaaccggaagagaagggtttggtttggttacctttccgcgcttacagtggataagaattggatgatttcgaacatctgttagcaaaaacagaagaattaatgagacagctaaaagagaaaagccgacaacacatcaaagagtctcttctggttccttaccaactagtactctaagagcactcaacactgtatcctttggcataggagttggaggatcctattggcgtaaaagtaaaacaatccaaactcagaaatcaaagaagctataacaggaacagaacagggtatttatatgtttcttaaaggtcttataagattcatcaactcaaatgctacaagccaacaagacactaaaaacagggtcaaatgttcttgaagaagaactcaaaaagattcaatacaattgctgttgttgaatgaatcataaaggttagaaaatcataccgttttgccttcaatcccgaactggaaaagcttaatgttgttggatgcaagagacttgagattgtcctcagggtatggctcaggacacagataactgtttccagacaaacccaacaaacaaaactcgtttttgtaatcaaatctttctgcgtgggtcaaatttcaacaacacaaatatataattatcccacatttttttgacatttaactaataaaagccatgaaagtgaaagtggtgatttaaggaatctgtctatctataaacaacgacaacgatgcgttattaaataaaagattcttcttctttttttaatttttaacaaaagattcagaagaatgaaagaagagaatcttacatgatggatcgaagatttagggttgataagaatccgaaattctccagctcaggaaacccagatcggtaaatttcatcttctaccattgaaaaattcggcggcggaatcaaaacttctccatcgttatcatcatccacaattaagcccatcgacgtttctatctccctccttctctcaattgggagacagaaagctacgagcaccaaagagagacagagagggagagagagcaaaatccccaaaatctagagagagatagagattcgttgaacaaaaagaaaaaaaaaaacctttaaatgattaatgggataatcatcaagtggggtttaattattttttaaaaagagacaaaaagatgacgaagattaaggagtttttttgttaagagattttttcggatttggaaaaaaattgttaaacctttgaaaaaccgccattagagattgttcttgttggatcctcttcaggtttttaagggaatgttttgttttcgctgtaatctctcaccagattatgacacgttgttacatccttcaacttttcgttgaaccgattgggaaatttcctattttgacttaaagagtcaatttttagaattttctattaatagatcaaagattcgttatgatgaccccacaatatgattcaactgtttctaaaagttaatttggattaacgtatatcaatattcttttcttttcttttttttttttttttttttttttttacttcatttataaaacgatatcgaatacacagtacttctaaaacgagtaacacctacgaaacaacaaagaaaagtaaaacagagcacatgatcaaataaagagaccgaaccaagtggcgaggtacgataaaccattggggccaatacgttgagctcgtgagagaggatcaagatgagtgcgaataagattctttatctccataatcagtccagcagcaggtctcgaagaagaagtgtgcagacgagtgttccgttccctccaaagagtataaaccgtagcttggtgggctatcctaagaatcgtagtcacatttttgtcccgactaggattcttaagccatctaaccccatcctcaaacaatggaggaggagaaacatgggcccgagaagtgaagtgatttcagatttctcctgcaaacacacagtcaaagaagagatgctgtctcgtctcatcaaaagcattgcaaaggaggcagagagatggaacatgaagtccccagcttagaagtttgtcacgagtaggcagcctgtgtctgatatttacccaagagatgaaagcatgcttgggaatcctgcctttaaaccaaattgccttatgccaatcaaccttttccccaacaggatttaagtggatccacgttgcagcagaggagaaaccaacagaagcctcacttcccccaaccttccacatgaacagatcatcttcagcatccacttgaaggttcaccacactagaaagagggagacagttctttaacagctgaataattgggttcctgctcctagacccatttatccaccaaaccccatctcttaaagcatctgcaactgaagcattcctaggtaaaccagaaactctaggtcccaagtcacctgttaaatgaataagcggtcccaaattagtccaattctcactccaaaaattacaagtgatccccgaaccgactttgcaaaccacaaactcccgagccattggacgaagcttgcaaatactcttccaaatccagctccccgagttaatattcaccatatcccagaagttctactccccgagttaatattcaccagctccccgagtatatcaatattcattttgttgataatgtatggtactaatatcatatcttatgattaacatacaaaatatttacataacgattatatttaccgcataacatagtttatatcatagatcagattcaccatatatatatcaatatgtctagattcttaaacaaaacatcaaataaaataaaaatagagggagtggattataaagttggatgaagatgagggttaatttctttttttgaagcagcggctgcaagcaactccggcggtatgagatcttcccatcctttaccaggacctgtagccgcggttagaccgctttcccaaccgatgtgcgatacatgttttacgttcgttggaactcctatctccattcctgatgtttcgacttcttccttctcttcatctttgtcagctataacatttttggaagaaaagatagtaccaacttataaatgttaaagagtgaggacacatgtactaggatctatatgaaccaaaaacatgtaaaagtggttctagcaaatgttaaaatttgccaatacgtttaaatggtataatttcgtaacatacattagagtacaatattaccaaagagttgagaaatggtcttgaagctcttgaaaatccggttaataccgatagaaatctccggtttagaaaccgcaaggaacttgaatacattcttcatgttatcttcctcctcttgttcacgaatcacttttgaaaacacatcaaggtatatatcacaatagaagatacatgagatattaattcaatatatatatacatgatatttaaaaagagagagggaatgaaccttgacgagagtgatgatgatgaggcttagagagaggagacaaaacggcaacacttgagacggagatacatccgatggagaaaggaagcaccacaagtctctccattctatctctcattttctaccaagcctttccttttaaaatacttctatttatatataagagtatgtgtgtatatgtatatatacgatgaaaatgacaacccaccaaatgttttgatgtaatttgttgttgttttgtttgtaatctttgttggaatataatttggttgtggtcgtgaattatgtgtttagctgactttgttgtgaagttacaatgatgtttacgtgtgtatatgaagttgcggtagaatagaaagtgatagctttcattttatattttgggctcaactactgtttggtagactgttttctttgtgacgtataatttgcactatatatatatatatatatatttgatatcaaaaatgttataatatggataattagatattgatatttgtatattgctatcaatatactgtatagagtataggaattgagttttgtgactggcttagatttcgtttgttattacaccaaatgcatattatatgtgagttgtactaaaaaaacaaaaaaaacttttaacatgtcaattatagcagtcgaaaaagattatgtcaatcaatattttgtaaattagttacgtacttcatagttaaagtttaactctacttctgtggactgtgtattagttttagtatatggagaacagtttaatattcgatggagttcataatgaatactcaaagactctataatgtatgtataatgatggcttaaatgattaaaatgtacattagttgttacatccccttggaatcaaagcaatctatattaatttttctgaacgtcttcttttgcaaaatttaatcatcaaatggttatgatggcaaggccatcttttttccccctcttcttttctattttttagtcgttgcttgttcaaccatttgatactgttgttacttgttagtggtatttatcatgaaatcatggatgaatacatttttttatttgttaattcatgaaacatatagtttttgcaaactattaaaaaaggctttgaaaacaaaacgtaaatattaagcaaaaagtgaaccctaataaatttaactcaaacccccccccccccccccccaaaacgtaaatctctcgattagattttcaccaaacacttcgtcttttccattcgatttaacattaatgactgacttgaaacaatcatgccaatgtttttgaacaaaaaagatatatagtttacgactttatattattcggtacgtaattagtcaaaaattaaagtttaatttaaaaatacaatctttttcttcttcttttataatacgagtatttttgcaagaactagtcatatgtaaactaacttttaaatggaaaatactgtggaaacacatggttggataatatactgtaaacattttcttcctaatactgtatacggtattaaagatatatacataattttttttgtttaagtttcatattttctcaaaagaaatgtgatatgtatattagacttatatgacaaattggtttgttccaaaacgaaaagttgcaacatttttttcctcgttgcaaaagattaatcatggtcagaagaaatatgttcttcttcctttgcttcgatcctatgcaaagacgactcaccactttcgccggcatcatcatctgaataaacactttggtcttcagatttcgagctatgaatgtgctcaagccgagtttgatgattctcctcctcctcttcctcatcatcatcatgagaaagactattgattcgcatgctagtgttccttggcgaatcatcgtgatcactatagctccgtgtttcatgattctcctcctcgtcttcctccttatcatcatgagcaagactattgattcgcatgcttgtgtttcttgacgaatcatcgtgatctctaccgctgtcataccgcgaaaaagtgctttcttcgtttgatttacagctgcttttactgcttagcttctcgttatcttcttcctcagagctataattactgtaacttatcttcaagctctgagcagttgcgtttgtttcatcaattgatcttctctcacttccagagtcagaggatgagctactagactccctggctttctctaactgagactgttcctcttcttgatccttttcggagtttgaatcagactcatcatctgaatctgtcgcggtttcttcctgctcttgtcttttcttacttgttgattcttcttctttttctgctttttgttccttttcttcttcttcatcctccgagtctgatgaagaactggatttgttgcctacatctttccgagaaatacaaaatggagttacagaacaagaaccgtgtctgcttaaagcaatggacatacttttgtccctgaacgattccattggaaccgtggctggaataccatcttctgtagacattgaaaggaagctaagagcaaccattacatcacttatcaaaggacgagcagttggttcctcttgtagacacattgatgttattgccactgcttgatttaaccctctctctgagaaattcttcctcaaaagaggatctgccatatccggatatcttttcgggtctttaaatatcggttgtgcctgcgcaaaacccaaaacatatatcattcaaaagatcccaacttgatgattcatagagaagaggtttaatggagtgttacccaagcaactagattttgctcatcattaggcttagtggtgtcaatagctcttctaccggtgatgagttcgagcaacacaactccgaagctataaacatctgacttgacagtgagatcgtcccctcgagtgtactcaggtgctgaataaccataagtatccataacccgggaagaaagaaacaagctatcacctgttcctggctctagattatgcagaccaaaatcacaaagcttagggtaaaactcagcatctaacaagatgttagaagctttcaaatctcggtatatcaccgctggagtaactttatcgtgcaagtaatccaatccttgcgctgcaccaaacgcaatcttcatcctcgttatccaatccatcggcttctggcctggcttttgttctgcatatcaaatacattgtcagcctctaaaccaagcctaaaggtatctccataaaacattgtgaaaggagttcaattataccgtaaagatggtcttgaagggaacctccagagacatactcaaagactaaaagccgttgatctccatcagcacagtatcctataagcttaacaagattcgggtgttcaagtttagccaatgacaagacttcagctagaaactctttgttaccatgtaatccatgcttgtctagctgctttacagctaccaactacactcacaaagcaatagaaaacaacttcaaagaaaatctccgaaaattgtatccagaggtttgaactttggtatggtaacaaacctggccagtagattgaagagttcctttgtaaaccctaccgaatccaccttctcctaaaagacattcttgccggaaattcttggtcgccgtcgctaactcccggaaattgaatgttttcaccggtggttgttgctctgcaggttctctttcttcagtccgtttcgtcgtcgcaacaactgaaaccaaacaaaccccccaaacaacatttttagaaaataggttttctaattcacagttccgtgataagaaagctaacatatttttttttctaaatttgaaaaacgtaccaggtggtctgaattcgtcgtgttcaacgttatcatcgttagtctcgttcgtcgtgcatggagcgtttctgctcttttgtgaagtgaaacacggaaaacaattcatcatgattatcattcaaaatcaattcaataatctaaatagcctaaaaccaaaaagaataaagatccctttgaaaggtgattgacaatggcggggtccttcaaaaagattgaaggacccacgttaaagggaagagtattttgggagatggttaaaggaaaacaaaacagaggaaggaagcaaaaggagagagaaagaaaagagatcaaattgaagccaatcagaatacatgaagatcaatgaaacttctccggtgatctttttttgtggattttttttgcttcgttttttacgaattctattttttgttgttttgctactttgttcaatatccctaaagcatggagagccattcttattacccattttcttagatctaattttaaatctagttttagtttgttatatatttattatcgtccaaatgactttacatttttgttgttcttatattttaaaaaattttgtttatatttttaaaatttttgtttatagttgtaatgatttatccgctttggatacatgtgaaagataatcagaaatagcgataacaaacatgaataagtgtaaattgctctatcaaaaatatccatcacactagaacagtaagggtgaattacttttaattacatgacccaaaatctctgatcagggattggttggacacttaacatctttgaggccatttaatcatttatcaacaagtgttcttcataccggatgacaattttattaccacaatacatacatatttatttcttaattgaaaacaaaaattataacaaaacatttgtttttcctctaataaaacatacatatgactttttttagatataataccgaatcaagagagctgaatcctttgaaacattaatgtattcttatcctaagtttccaaaacattaatgtattatcccttactatacaacaaaataaaattaaccatttcatatttgacacgtgtcatcatctttagttaagcttttccactttcccatctctctctctctcttcctcctttcatttctttttgtgtcgccgtctgcaatttctctccccgacgctgataaccctagcggcttcaaattacagtcgcttaacgccgagttaggccaccgagtccgatacgaacctgattcggtcgctgtcgcgaagatccccgtagttttccaatttctggaaaggttttgttgctgtctgttaatttccctttgaattgttgtctgaaatctttgggaaatgttattgattttggaaatgggtctcttttaatttccttaaagtttgtcttttttgtttgttaattgagcttgtgatccaagcatggaaattagttatttttttttgtgttgcgatctgagattttgcctctttatgtctctcctagtatgtaccaagtgtgtgttcttgtgagatgctgataagtattttgcattgaaatcacagagacgaagaaacccttttccagatgcaatgcctaatggctgatggagctctaattactttagattccgacgatattttagctacagaacatgttttagcagttggtaaagagtttcccgatgtggaaacttgcagaagaactttgaaagatttggctatagctctgcattttgatcttcggattgtgaaatcagatcgtagtcgattcatagccaaatgctctaaagaaggttgtccttggcgtatccatgctgctaaatgtccaggtgttcagacatttacggttaggacgcttaatagtgagcatacttgtgaaggtgtccgtgatctccatcatcagcaagcatccgttggttgggttgctagatcagtagaggcacgcattagagataatccgcagtataaaccaaaggagatattgcaggatatacgtgacgagcatggggttgcggtttcttatatgcaggcttggcgtgggaaagagcggagtatggctgcgcttcatgggacttatgaggaagggtaccggtttcttcctgcgtattgtgagcagattaaattagtcaatcctgggagttttgcttctgtttctgctttgggacctgagaattgtttccaacggttgtttattgcgtatcgagcatgtatctccgggtttttcagttcttgtcggcctcttcttgaattggatagagcacaccttaaagggaagtacttgggtgcaatcctctgcgctgcagctgttgatgcggatgatggtttgtttcccttggctatcgctattgtcgataatgaaagcgatgaaaactggtcgtggtttctttcggagctgaggaagcttcttgggatgaataccgatagcatgccgaagctcacgatactctctgagagacagagcgcagttgtggaagccgttgaaactcatttcccaactgctttccatgggttttgtctccgttatgttagcgaaaacttccgggatacattcaagaacacgaagcttgttaatatcttctggagtgctgtttacgcgctgacaccagcggaattcgaaacgaagtctaacgaaatgattgagatatcgcaagatgttgttcagtggttcgaactctacctgccgcatctctgggctgtagcatatttccaaggtgtgcggtatggacatttcggtttagggataacagaggtattatacaattgggctctcgaatgccatgaactcccaatcatacagatgatggaacatatccggcatcaaatatcgtcttggttcgataaccgccgtgagttgagcatgggatggaactcaatactcgtgccatctgcagagagacgtataacagaagcggttgcagacgcacggtgttaccaagttttacgagcgaacgaggtcgagtttgagattgtgtcgacagagagaaccaacattgtggatatacggacacgggattgctcatgccgtcgttggcagatttacggattgccgtgtgctcacgcggctgcagcactgatctcgtgtggtcggaatgtgcatctgtttgcagaaccgtgtttcacagtgtccagctatcagcagacgtattcgcagatgattggagagattcctgatagaagcttgtggaaggatgaaggagaagaggctggaggaggagttgagagcttgaggatacgaccaccaaaaacgaggagaccaccaggtagaccgaagaagaaagtggttcgggttgagaatttgaagagaccaaagaggattgtgcaatgtggaaggtgtcatttgcttggacattctcagaagaaatgcacacagcccatttgatgatagacggttcttacagtacttttgtgttttcttttacctttcttgttttgatgtaacttgtaatgtttaagtttcactgtttttgtagagacttgtcttcaatggaaaaaaataggtgatggcttaacttaaccgggctttgaataaatttatctggttcttataaaattgtcatattgcgaaaaccaagacttatagttcggtttgatgatgcattcgtagaattataacttcactttcggttatcaaaacctggaaatttgcaaacttatcagaccggatcggttagcttcggtttgggttggttctgattgattagaatcgaagtcttttttggatacacttaaacgcacgatcaaagagaaaattgcgggacgcagcagcaaatgcgcgaaacgtttttggaccaattctaatttctaaagtaacgcgataaatctaatgcattcccacgatttgtgtttgtccctctgacgaaaaatcctcggatctgttgcattctctccaaagcttgaatcaggtcaatctctcgcaaacttatccattgatgagtatataattttgtttgtgggtattgcttggtttgatctgctaatgcgtttactctttctgggtattgttcgattgcttctctctctctctcttttgtttgaataaaatgttatttttattgttaacagaatcatagtagatcgaatcgctttacaattatgttccgcttgttgatctcaatctgtagcagttttttgaccgtactgttcatgcgatccttagttgactgagaaagtagatctcttgattaggtttgaggctatggggatcgtgtgtttggattagattatgattctctaataatcactgattagtgatttcatctaaaaaggctgatgcttttgcccttaatttgtttcgtttagactgattctgtttggaggtttttctgacaaagtttaagtttttatgtatctgcagaagaaagcttttgaagatcagcctaaaagtgatctctcataactgcttaaaagattgttgaaactcgaagatgtctttggccgagataaacaagaatgaagtcgacattgttattggggctcttaatgctgaccttacacagtttttgaccagctggaggcctttcttctccggattccatctgattgttgtcaaagatcctgagctcaaggaggaactcaacataccagaaggctttgacgtagatgtctactctaagactgacatggaaaaggttgtgggcgcatccaattccaccatgttctctggctattcttgcagatatttcggttatctcgtatctaaaaagaagtacattgtctctattgatgatgattgtgtccctgctaaagatccgaaggggttcctagtggatgctgttactcagcacgtgatcaaccttgaaaacccagccacgcctctcttcttcaacaccctttatgatccttactgcgagggagcggattttgtccgtggataccctttcagcctcagaagtggtgtcccttgtgctgcatcttgtgggctttggcttaatctagctgatcttgatgctccaacacaagctctcaagacagagaaaaggaacactgcatatgttgatgcggttatgactgtcccggccaaggctatgctacccataagcggaatcaacattgcttttaaccgcgagttggtgggtccagctttggtgcctgcactcagattggctggagaagggaaagtgagatgggaaacacttgaagatgtttggtgtgggatgtgtctgaaacatatctctgatcatttgggttatggtgtgaaaaccggactgccttatgtgtggagaaacgagagaggagatgcagtggagagtttgaggaagaaatgggaaggaatgaagctgatggagaaaagtgttccatttttcgattcattgaaattgcccgagactgcgcttaaagttgaagattgtgtgattgagcttgctaaagcggtgaaagagcagttaggttcagatgatcctgcctttacgcaagctgctgatgctatggttaagtgggtccagctctggaattctgttaattctagcgcttgaagttgaacaatctcttgaggttaggttcctttatcacttctaagcatattatcatgtctcagagatttacccaagtcgttttctttcttttagtatcatcatgtttattttctctttttatctaaattataagcatgtgtttttgagacactcaataatgtaacctgatgaaacccatctgctttgactcgatgatattaatatctattgcttagcttttttacttctggttattactcgcttttaccatagtaaaatcatcaaaagcgaaaatttgttactattagcaactaggtatattcacaaagatacaacaagcattagtcattcctttgttcaataaatgtggaagttacagggagtatacaaacaatacatgtcaaacaacctcgttgttctaggcactgcgttccacggttgaagatgatgatgctattggtttgggtgccaaagtattaagcaaagactgagtctctaaaagtttttccctaagcaatacattgtagtcgtaaagaagttgaaatttattcttgatatccattgcgtccacttctgaaccagaagatccatcaatgaactctgcaatagtgacagtagtggttggaggtttcaggtttgagatcatattactattataaaccaattaagctcaattgagatacatctattcttcacttctacttctaaaacctaaaccatatgacatagctactgctaccgaatcataaatcactaggtacaatgtggatgttaagttataagccatacccattggaggaggtggagggattgaaacgtcttcactatgagaaattggatgagttatactctttttatttgagaaattatctccatgagccagagaagaagccgaatcaaaagagctcagttctaaacttgcaggttgtgaaatcacattctggataaaaagagaaaattaacaactcaaaagggtcaaaaaaaaggaaaggggaacccaaaaacagatagttagctcaccttctcaatacctaagttaggcttcttgttcgccatgatcgattccccgtgttccgagctattagaagatgttggaggtctcgttaaaccacacattcctgatacctttgtcgttttgatggcatcatcgaccaatatgctgcaatcccatgtgtatgcaacatatcttctcagctaaatgaggattattgaaagagcaacttgtaataagaaaagaagccattgcaagaagaaaaaccaaaaaagagaaaggggaaaacaattactttatcccagtgatctagagctttacgacgattccttatcttcctgaaaacagtatcttcatttcgcagcttcttgatcctgtactcacactattcaaagagccaatttaccgccatcaggatatgcttaggaaggactagaaaactttcaaacactatagtacacacccgctaataatgcttaatgctctttcttatattcatagatcatgaataccaataaacattaagtaaaggagatgaaaaggtttcaaacctgcactagtaggtagaaaaatatgccaatactgatgcaatacaaaccaccaagatcggcaaggaagctaactgttaaacagcaaccagaaaaggaaaaagaaacttaagttagaactgaagctactctagtattctctacttgcacatactggaatgattcacaagaagtgattggacaaagtaaatttacttaccaggaccgagtatattttcatggtctatctcaacaatataagcagagagatagttgatgaacaatgtcgtattgagtatgccatctgttgaccttcccatagatgcctgaagctgagtagtgtctcggtaaacagagccagggataaactcgtgaaagagaggttggattagctttagatcatgcaaatgatggtaaatccgaggaaacagattaaacttcaatatattcccttcggttccacggaaagtaaccggactttcatcgagaatgcttccgtttctcagagtgccactaacaaaactcatatgcttctcgttaggtccattcttagacgtaaagttaaactgaaatccaacagcagcagcaggcgaatcaggaagatcaacgaaatgccacgagatatatatgtaatcgttggtgagacgacatttggtacatttgaaattcactgttggtcctgaagttgtattcttacaagtatagcttcctaaactagaaagagcagcaactttgaactcgctaaacccgggattacccatgaccacgttcccaataccgcgtaaattagagcaactcatatccgaaacagcggtgatgttaaactccaaatcgttctcgaatgagatcaaatctggagaaccagtagctctcacattgtgaacttcaattgttctcttggttatgatttgataaagcagcctgtgaagaaactgactaagttaacaaaaaccaaaggaagcactaaattctgaagttatcaaactcacgcagcgaataaaccaatgaaaacaatccagctcgcaacagaaaatgttccaccaagttctgttttacgtttcttgacaatttgttgatcatcctacaagattcaggaacctaattggtttactcaaaagaaaccaattcatggagacaaaagcaatgagagtagagaaagcactaacgagccaatgtctagtggagaagaagacgtcaagtcgagtaatccaccaacggagattaaaccagacattacgaccatcgccgagtttggtgaatctcaggaagaaacaaaagactaaccaggagagaagcatcacgagcgtagcttctaagaaaatagcttgagattgcgtgaacttacggatcctatcgaaagcgaataaagtctcggcgaatgatattacgctgtagtttacatctttgtctgtggagattgttgacggccaaccgaagatctcgcagctcccggagctccggtttagtagctgaccgataccgcacgcgcagcgcgtggcgttgtatgttatggagtttctagggcacgccatcacacacagagagagcttcgaaatgaagaaacgaagacgaagaagtcgaagagagagagagagagagagagagagagagagagagagagagagagagagagacggagaaaggagaagaacaaaaggggcaagaaaggaatttcatcttttaattattttattattatttggaccagctttaaagaaccagaccacgaagcagaaccagcctgttaagcaagtgacttcgtcgtggtcaagaaccagcaaaatttaaaaaccgggtggttcatgttatccggttcggtttatatatcaaattttcccgccggaccaaacaaacctgcagagagattttcctgattcaaaagtcgtttctagctttgcctttgtactttttttttttttgtaatcattagttcattacataatctatgaagtgttcacatattcttggaaatttgataactataatcaccgatcttgatctctttagctattattatggtgtacccttcaagttctaaagtataagaactatactagaattaatgaataagtaacactttgcatgtaacttaagacttgtgttcacatcaaagagtgttgttgatgcggctaatacgtttgaggactttatgctaaaagtaaatcattctccattctccatggttgaaaacttgttcttgcgtcttctcttctctggaaaaacgaatgtttccagaataaaaacacgagatgtgaagcagaagagtacaacaagtaggtgctgtagcatatattgagtgacgaagcaatgaaggaacagattattgtgagccacaaaataaattaagaaataatacagtagtgaagtcgtttcaaacagaggatttattccacctgcacttggaggagtttcctcttttcataagtctaaagaacaaatttgcctttaagaataattcttctgtgtttttttttaatatggaatttgaatgaaagattagtgtgtggatatggataattaattatatttaaaaaattatgtaatattgatatgtttgtagtttggtttccctttctattggctgctatttacttcattctttcaatgattgacgttgaacttcttttcgaccaaaatcaaaacatcctctcctttatgtataactttgtttcttctgatttgatttgtaacattaacatgattacatttatatatagtatataatacgtaaccatgcatttaacttggtacttggattcgtttatgaaagattgaaaggaaaacgaaagttatatgatcactactcttgaattcgaactctaatttaggaagaacagtataaaccccaacatatagtgttttctggtctgaaaaactttgattgttttgtttttgtggtttgggaaaaaacatcaacataatattcatgacgtcaaaagtacaaaacaaataagatggattttgaataaactttccaatcgtgctagctagctatttctgacataattcaagaagaataatgaaaatatgtcacacaaaaacaaaagtattaacgatgaatgaatgaatgagagaagacaaaaacctttttgatattaaaaagactgtaatatatatcaacacatcaggagagaaatttgaaagcatattatagatttgtaatcatcaagtgataaatagaacttattctactagcattattattcatatttatatatgatccctcaatttcaccagtgaataagcatcctccacgttttcacagatttctaatccaccgattttaacttttgttccatcagtcaaatccccctttttgtttttgttttagtccgactatatatatttgtttgcttatgtttttctatttgttccaaatctttggtaaagataggtgtttccataaaatgttattatcaaatcaaatgataaataaatgctttccagatcattttatgcctctgcatgattctctagtaattagatcaaatcaattttctcatcatgaatatgtgtaatagaaaagactttgtgaatggacaatatatatggttacaaaacaaaaatataccatagaattaaaaagtgctaatatgatgatattgcacctagcaatatgtgttgttgtgattatattagagtccagaaggcaaataataaatttgttgtctagcaagaaaggacaagagcacgaggtacaaatttttctgtaaacttttgtagttcttgaatggcttcctcaatcctcacgatgatagatttttcgctagctcgtagtataatatggttctttgatattttaacaaagaagaaagacatggccatatgattttttatcgaacgaaacataaaaaacaacgtaaaacatggtttaagataaaagtaagtaagttatttgtagacttctctatctatctatatattaacatattctaaaacccatgacatgttatttcttaaaccatgaatatattgaaacattcaaatcatcactaggtataagtaagtgaaattcattttcttataagaaatctctctttgtcggttatgaaattggttgctatcgccaggtcgtagggcacaaatacccatttcggcatatatacaaactattccatgcactttacttatattacatgcactagcatagttctgctcccattttatgaaagtggttaataaatataaatattaagattaagaaaaaaacgattaagcaaatatttcgaataaattattgaaaatatattatttggttagtctcatgtgttgtggcgacgagttacgacagccaaaaacatatattggtcgagacgatcttctagttatggtgctaaagctgcaacctcattctttattctgcgacattaccattaattaatatagtcaaatattgaaagaaatgtttacgtcatacacaaacactacactcactatttacaggaaacaattggaatagaatcatatgccacggcacggtctggtcaattatattgataacgataactctcttgtttctcaattaaactaatggctaaaaatatgaggttgattttaatttttttatctaaatatttagactcaaatttcaattgtatctattctataggaatttagccaaattatttataaatattcgtaatcatattccgaagaaaaaaatattattgtttaatttatatctaaactttacttttgtttgaatattactcatggatatctcattacctatcttttttctacaacaaataaaacaattaaaaatttatctataaatatgaacatgttggtttctctatcgtaacacatttactatctacgaacgaatttagaagctttgttttctttcctttcgtttgctactactgcaacatttctatttttctgataaaaccatgataaattgtggagatgtttacaaggtaatcgaagcaatggttccactctatgtagccttaatcttaggctatggctctgtgaaatggtggcacatcttcacgcgtgatcaatgtgatgctataaaccgtctcgtttgctatttcaccctgccgctcttcaccattgagttcacggcccatgtcgacccgttcaacatgaattaccggttcatcgcggccgatgtcctctctaaggtcatcatagtcacggtcttagcgttgtgggccaaatatagcaacaaaggaagctattgttggtccattactagtttctctctatgcactcttactaactctcttgtcgttggtgtgccattggctaaggcaatgtacggacaacaggctgttgatctggtggttcaatcctcggtatttcaagccatcgtgtggctcacactcttgttgtttgtcttagagtttagaaaagccggatttagtagtaataatatcagcgacgtacaagtagacaacatcaatatcgaaagtggaaaaagagaaactgtggttgtgggagagaagtcgttccttgaggtcatgtccctcgtttggttgaagcttgcaacgaatccaaattgctattcttgcatccttgggatcgcatgggcttttatttctaacaggtaaaaatgaatctttaattaaactttatattggtacctataagatgtttaacaaagtgttaattagtatgtgtgatcagggactcaggagactacattaattccaccccttactccgaggcaaccgttaaaattgcctaaaaatatctatagtttgacgtttaaaccatctaaattattacttttctgtgtagcgcctgatgatctatagttaaaattttgacagaaatataggtcacgattgtttctttgcatttgcgtttatatttccatgtgacaaatgactaggacatttttaacatggtaacataatttgcaaacgtgacatgtacatgcaaataaactaatcatgattttaatctgaatattagagtctttgaccaaatttctattttatttgttttagtgtgaattttgggtttagggttttgattagtgttttgtatactcttggctaacaaataaagacttaagtctaataattgatggaaattaattggaaatatagatggcatctggagctgccgggcatattagagggttcgattcttataatgtcaaaagcaggaacaggaacggccatgttcaatatgggtacgtttatttatgtccatgcaagtatctttctatacgtaaagattacgtatcagtattgagataacagtgaatacatgcatatatacgcaggaatattcatggcacttcaagaaaagttgatagtatgtggaacaagcttgactgtgatgggaatggtattgaagtttattgccggaccggcggccatggccatcggctctattgtccttggcctccacggtgatgtcctccgcgtagccatcattcaggtcataaattctactttatccttttgtaccctaattctactgaagtttgtatataaaaaaaaaagtagatcattttccattcattcatccactaagatactaactttatatttttcagtttaatatatcattaatatttatatgaaatttacaggctgctttgccacaatcgattacttcgttcatttttgctaaggaatatggattacatgcagatgttctaagcacagcgtaagtccaaattttaaaaattcagtctatttaagaagaaaatggtaatatgaaattaaattaaaattttgataaatgtagggtgatatttgggatgttggtctctctacctgtgctcgtcgcctactacgcagctctggagtttattcattgattaaactaataaattcgattatatcatcaatattaccctttgttcatctttcacaagtttttttttttgttatctcttttacactttcctcctaaaggagattttgaagtatattcgagatatgaaaaccattaactgaatgaattaacctagtttatgcttaattttatactttcttaagctctctttattttcgtagtatgcataatttagtattttgttcacatatacgtatcaagaaaagataaaaactctataaatgaaaatacatcatgttcggatctaaaattgttttaatacgtacactaaatattataagccctttttttgttaacaaaaaaaaaaaaagaataaatgaaacgaaattcaggttagagatcaaataaaatcttgttattatttgattcatgatcatacatactaaccaaatcaggatttatgaaataaattattctttctcctcaaccgaatcaatatgaagataaaaggggtaatttagtcttttcgaattcgtttttcttaccgaatctctttagttttttttctttcttttgtgtggaggagagaagagaacgcaacactttcttcccaatctctctctgctttctctctctagacgtgatctctaattctctaatgtcttcctgcattgccatttcctctaacccctccacaatcggaggaagacgattcctgggagcaagagaaacgatgggacttcccatcggaaaatctcttagagtgagagaattatggtgtgttcttaatgcttaataatcaccgacacagccattgttcttcatcatctccatggattttgattccatttctcgggaaagcacttttctttccccattgcttaaccaaagtaccatcctttattccctctctgatgttctgattcaatcttaaaaacctcagcttgaatttttgttgtggggttttggttgggtttgtgaattttagatgcaatgtggcaaatgaacttgggatcagatgatacaatgggtgttgatgggtcttatccggaacgtcacggagagccagattgtgcttattatataaggactggactttgtaggtttggttcaacttgccgattcaatcatcctcacgaccggaaactggtactgactctgtttctgtgtttgttctttcctctgtatcttgttgactcaaagtttgtagctttgagggtctgtgtgtgtgtgtgattacaagctgatgaatagtctcgtatccaatttctaggttatagcaactgcaaggattaaaggagaataccctgaaagaattggtcagcctgaatgtgaggtagctctgtttcgaattactatcatagtaatgtcttctagttatcacattgtctcaaagcttctatttttgttgttgtgtctgtgcagttttatctgaagacagggacctgcaaattcggagtgacttgcaagtttcatcatcctaggaacaaagctggtattgatggaagtgtatcagttaatgtcttaagctatcctctacgtccggtatgtatacatttcaactttctaatctcaccactgctttgtaaaattttgcctctctcatgagttctgtttgcagaacgaagatgattgctcttactttttgagaattggacaatgtaaatttgggggaacttgtaaattcaatcaccctcagactcaatcaaccaacttgatggtttctgttcgtggctctccggtttactctgctcttcaatctctaactggtcaaccgtcttattcttggtcgagaacatcttttgttgcaaaccctcctcgtttgcaagatccttctggtttcgcttcaggatctcaaggaggtctcttctcatccgggtttcattcgggaaattctgttccgctcgggttctatgcattacctagagagaatgtattcccggaaagaccaggccaacctgaatgccaattctacatgaagacaggagattgcaaatttggaacagtctgcaaatttcatcatcctagagacaggcaaacccctcctcctgattgtgtcttaagctcggttggccttcctttacgcccggtaagctaataaaagacttcagattctttcctttatagtctcattatgtggtttggtaaattcttgttgctggtttgaaacagggagaaccactgtgcgtgttctattctcggtatgggatctgcaagtttggtccaagctgtaaatttgatcacccgatgcgagtcttcacttacaacaacaatactgcatctccttctccttcatcatctctgcatcaagagactgcaatcaccacagagctcaggaatctcctagtctcttcttctgtggaagcaaaacccacatcactccctgaaacaacctctgctaaagacaccattgttgatgcacagcactgaaaaccctgtgttttgtctatcttgaaacaatatgtaacatttgttttgctttatcttgtaagcatttatgtacagagatgatatctgatctaatctgattcgccttttgttgtaattttctattggcaacagtttgtgcattaaaaaaaaaaacagtttggtcttaaacgggccttcaaaaaacgtctaacaagcccaataataaaaccataatgaaaagaagaagaaaaaagaattaaccactcgcatgtgtaacgcgttgaatacacacgctcgttgtatctatctatctactcctccggttaacgggggtttaaagccacgtcggtgctacacatgtccctgatttctcctttaacataaaactaaacagctgttttgtccgcaatcattatctattactaataaaaaatctcaacttttgttccttactcttattacttcctaaatccgatcgaaacaactgttgggttagtttctaatttccaagaatggcgcaagatcacgacgagacggagaataaaacctttgccgacgttgtcggtggcgatgatgtcggcgaaattgtcaacggaggaacaaagaatggctatcgtaaaccggactctgtggagaaggaagatgatgaggatttgaagagtctctattccttgatttgtctcacgatcggttcgattctgtttccagattcgaaaaccggtgatgcgtcttcgtttcttgaacgtgtaagaaactccgtcgctgaaaatgggcctaagcttcgagaagcttctgaaagaacaggacgcgagattcttctctggactcgtagaggcagctcgcttcgtgctctgcttgtcatcactgtaagtagaatgattgaacctaattagagactgaatttcattttcaatctagccttccattatcttcaattcgatttcctcaagtaaattaacgtattgtgccctaaatcgtcttggttctgtaactctttaccattgatgaaaagtttggtactttattgaaaagtttagtgctttattgaacccatttgagccaaatttcgtgggtgtctgagactatatgttgattagttattatcttgttattgttgttgcagatgggaacaatagttcttttgacaacaatggctttggttgtattcacactcttctttgtagctgcaacagccaatgctatcataatctctcttctgatttcacttgctgttgctggtggcttcttggcactcttctttctctgcttgactggtgtttacattggagccttatccgttgctgcattcgtcatctctaccgctacagtttctgctgtcgtttctgtcttaatagcttcaggttggttatatactctgctctgattctgttttggaatcttgtaatgagtgacactccaagttacttcctatatgtattgaagaatgaaatgaatttggtattggatcaggttggattgggtttttctatgcggtgtggttgggaacaagaggaagcctacgcttggctaagcaatcggtttcagtggtgggatcagccatttcaggtaacactatcagtcgtcatcaacaccaagaccgggaggtaaacatcgaatcaaccaactgagaatccgtccttaccgcgtttgtaaataaaccccgacttttggttgttaatggaagcttgatataaatatgatctatggagtttgttgtgaagaagcagagaaagaatgataagaatatttcaaaatgcaacttgaaacattttgtgatcaatgtctacggatttttggatctatgtatgcatacattgtgtgttttatgtacttaagaaagaataatgatcagtatccatatgaaatctcaactcagatctctccctctctctacatttcggctgcaaaaaaaaaaaaaaaaacttgaaaccctctagccaaccaagaggctttcaaaaaaatatccaaactttcaccacattttgatgatcttccaattatataacttatgatcacaccaccagatcaacctcaaaaaactaaaaacccgaaaacccaaaaacaaaaactcatacattgatcatccactttataatcaaatcatcaatggaacttgagaagaggaacctccaaatttcttcattttggtagtgatattctctctctctgtgcaaaaatcaacactcttgagcagcttggctctctacgtgttctccttcttttacgctgagaatttcatcgtcacaaagatatatactgcatacatgtttctgagtatatatagagagagaaagatgaaacaaaaaaataaaaaatccaatatatataaaaatccaaattgatcaagaaagtcatttctcgtgccaatctggtctgcctaatgtaaactccaaacttggattttcacaactaagatttccacacctctttgcttgatcattcgacctttgctcctgccaattttaactttatattagattaaaggacaaaaaaaacactaagaaaggcaatatctatctatacaaatatgattagatgggaattatcagaacctgattttgaatgctggatctttgataatgagagatcattgatgttgatgaagttctgatcattgtatctatgtcgcttgagcagttattacttaatggccatgtctctctattttatgatttaagaaaagaaagaaaacaaattaaggacaaattgtatttattgatgtatagatgccctaaaaataaaataaaaatcactacacacaaattgcgtttttttgcaacttgctatatgaccacaatctacatgtcatacttatgaagcaaaattcgtttatcctagtcttcctagatgaatcttaagaacccaaaccaaattataattaaaaaaaaaaacttggtacatataattaaagttcatcagccataaaccctaaccaatttcatctcattgtaaccaaaaccatcactcaaattttttccccttaaactgaacgaaaacaaacttaaaatatcatctaaaaactatttttgttagaagaaaatggatagatgtgggataaaccaaacaattgtcgtatgaattacttggtaggaagtaggaacaattaggtgagagaaccctaaaccctatctcaaatttcgtcaatcttattcttacctaatgtttatatatacttatcgtgtgtataatacatgtacgtatatacgtaaacgtaccgtgaagagttactccaacgaggttgtgtggaagaaatgtcagtttcttgatgaagagaagtatcatcagattgtgccctttgatccgtcgatgattgatgatgaacttcgtttccatttatgcccatttcttcttctcctgacccatctgaaattttattttaactttttatcaagtttcgttgtctcaaatcaatcacttataccctataaggaatctcatttaaaactgaacgattcttgtaagcttttttgtaaaagacaatgcagtgaagaaattgtttttcttaaaaaataatttcagcatttcgtgttgaccaacctaatatgtgtctcaaaaaatagttttacagactcgaaaattgtgccaaataaacttttaattggttaaagaaaatccatatgaaacaagtggtttttctttattcttaattcatgaactttgcttggatatgagtttacacttcacacgttttaaatttaatcttttactcgatttttttttcttagagaacatcaatattggggatatatgtttgtttggtttgctttgaactttgaccactcaactttagggttcaatcaaaggaaggataaaagccttgagcttgaccaatatcttagggctcgttttttattattttggggaaagggaatagtagaaatagtagaatcaaatagtaaaaataacagaaataatttcacgtcattatatctctacatacatacaaatatcgaatcacagcttcaaattctgattgagaactaatttcttataaatattgtagtcaaaaaaagctataatagtgattatattggacctccatttctataaaattctggtggagaatcctaagctttattgtatatctgtcttatgttattttttggtgaattgtatatctttcttattaaaagccagtaccatttctttagcatatataaagctgaaaaaagctatactaaagaaatgtgaatatgcataacattatatgtgtgtgtgtgtgtaaaggaatcacacgtacctgatgaagcagcaggcttgttagtggtcttaacagttcgatacatctgcaaaaaaaaaaaaattaaaggcatgatgagagctctaaaactagaataaaccataaatccaattaaagacacaggaaaaaaccaaaataaatatcggacaaaagatactgataaactaaatagatttatttttgtataatgtgatacagaattacagatgacaaactggagagatatatgcagacacatatgaactttatattattaaataaataatatatgtagtacatatgtgtggttttctgggtttgtcttggaactgatgatgtatatataattaattatttatgattttaagaccacgaggttgatgtctgaaagaaggttgagtaatagaaagattgtattattatcattgagtaatgatgactacttttgtcccctcttcctaatttaaaaaagaaaaaatgaattataatccaaaataacttctatctatcatctcaattctccattgtttaataattctctgaaaggtttcagtcacttaaagctataactactctctctttttctctctttaaattcattcaactgcttcaattttcttggcaattgtgccatctcttccaaaatatgactaaacttaaagcaaagacaaaacaagaaaataaaagtaacacatcagaattggagctctattcattgctctgatgatatatacgtacacaaaaaccttgtttcttgattcagctgtttttgtgcaaaacgcaaaggagaagagagtgacatgatggtgatgaaaactatgaaatatccctaattatagaaaatcttgattggtaacgaactaactcgactagattaaacctaaattaacaaataaaaattgattctttgttgtgtctaatttaatttcaaatagagtatagattatacctgcaaatggctcttcacatgtgctaaagttaagtcttttacatccatgagctcaagaaccgactttggagttgctcctagaatcacaacaacaacaagaataaaagatttaagactttgagaataaagtgaagaaaaatgggaatgatcattagaatgtgattatgatataaatgtgtactttcatggccgcctagaagctcaacagcgtgaacaaaccgcgcgtggaggctactagtccaacgcatccttggagctctcatgcttcgctttgtcggcatcttaggcaagaatcttgatctgatcatcccatgatgatgatggttatggtgatgaggagaagacgaatctgaagatccaacgactccatactgattatgatgatgatgatgatgcaaaggaacacctttaagcctcggggaagattgtaatgatcggtaagcgttgttgtagccggaagatgagtttaagattgagatttgatccatgtctcctcctccaagagaaggtaatgaagagttttgttggtggaaagggaatgaacggttgtgatagaccgggatgcctctaattggacggtggagattactaatctcggattcatcgaccctttgatgaacaccattgatgatagggttgttgtaatgctgctgatgaggaagattaagggttcttcgatcaggacaatggaagattcttgctgttggatggttatgatgagataaagagagttcaaagttggacgatcggttgttgttttcgagttgggaggatcttcttgaagattctttagaagattcattgtgatggtattgatgaatatctgggagactgatgtggagagatagatcagggagagtagttgttgtgtttgttttggttttctctagaaaaacaccttccatagacataattaaagaaacctttctcttgctattgctgccactgaagttgttgatgatgataaggatgatgatggtgatgatgatgatgactattcttttgttttttttttctcctgagggttttgcttaggaatttaaaatgattttctctaaggagaagagaaagcagagagattctttaggcaaagaagtcaaaagggtgtctgaaagatttgatattttttttgttctctttctctctctatatctcagaaagaaaggagaaagtgagagagatgaagttaaagagaagcttagaagaagagagagaagttgagtgatgatcttcttgaagaaacaaacatgctcaaagtaagacgcagagagagagaaaaagaaggaagagagagatagagagaggtatgtgtgttgtgaagcaaaggcagaagagaaaaaaggaataaaactaaatccaggaaaattaaaaacaggtaagagagagagatatatgtgtgttcgttcatgtacatgtatgtgtatgtgtatgtgtgagatgttgttcctcgagagtatatcttggaaaacgatagttgagaaagggtaatattgtcattcgctatattccaaatattggaagctttttattttattttgggatggtatttcaatttgtctttttcacctttcaacaagtaaacccatctatcaatataatataaattattttacggctagattaattgatttcatgttttagtttattcgtttaaactactgaaattttgatttccatagataaagttgaagaataatagcaaaataaatcttgttttctatcaatttagtagatgaaattttcaaatgtaaagtgtatttaataatcgaccaatttcatagatgaaaagcatacaacttttaacaataaaaattaatacgattatcatccattaaaaccttaacaatttgagtaataaatcaaaaactcaattgatctttaaaataataatgttcacagattatcatgaagaataataattaaaaatgttggagaagagtacaagaggagagagaataaagggtcgctctcttctgtcctatctaatctatagtcaaagcaaaagccaaaattaaattaaataaataaataacaagaagaaaaaaacaaacacaagacctattctaaaataaataaaaagtttcattataaccaaaaaaaaataaaataaaaaaagagagagtgctttgattttggtaccccggagacgacgggatacatatgttgagacttgagagagagaaagagactgtgtcctctctgactccttttttattttctcccccactctcttcgcttctcacttcactctctattcacatcttattataataattccttatacgattttggaatcaaacaaattcaagtttctgaccgtagattgttcaactatacctaaagagataaatatacattaaatatcagtacgttcttgagtttatgaatagctcgtatagacatttagttcctagagatgtgactacaatatcaaccggctacttgtttgaccgttttgtgttgtctatcaattagagccaaatcgaagtcatatacatgtcgctttaaaatacgtacttgaaaagaaataaaattaggcagatttatatatatttttgacttgtttgtgtcgaatgtaataatgtatgcattctagtgtttctgttttctttgtactcgacatttttacattcacattgttcgtttataattctacaaaaaaaattatggagttgactttatctactgtgaaacagaaatatgtcatactgaaaaataatgaaaaatatacaaaattgaatagtatttaactattcgtatgtttttgtcaaagaattattatatttttttatcccacttttaatttggaatatataaactctgtgttttgccttccaaaggtacggaaattattgtcttagaaagtatctttctcttcaaatacatacatatatgcatacgtgtgtacaatacaaggtgccctcgtacgtatataaaccaagtgtcatataaagaattcgatcaattattgtaacgtaacatgcatgcttttagattatacgtgaagttaaatatatattagacctaagaaaatactcagccagaaagtggattttgtttgtttcccttaataaacaaaaacaagtgaaccctaaagaacctaaatatttgcttctaattcccttttcattctcccaaatattccttctcaatttaataactcttttctaattttctttaaattgtcttctaagaaaaaaaataaactattcactcctcacatgaccatatcaatacaacatctcgacaaatcattaatgccttgaaataaaaatatgataaattgtaagactatgtttatatatcaggaaatttaaataagtgagattttattcgttgattatacagtaatatatatttttcttattagatataaattttaattattggaaagtaaagaagtacagtatgcttgcagtttttagacgttttgctgcatgtgagttaaacaagatactattatgatctatttaaaaagcattttcaatcaaaaacagtataacaaccctagctatacttctaacgtttttgaatgaggtccattcctaattttgagttaggtttctaaaactcctaggatacacttaatttcttttatctttagttaatggtacaaggaattgagttcattaactcctatattccaaacctagcaatgtactcatattttcgttttctgaatgagtccctcaacgagctacatttatacttttgaaaaatgtttttttttttttaaaacccctaggcttacccaaaggattgtcattaattaacagtagtacagaagtagtagtattaaactattagctgatccatgaattcctatattgggaactaaacctttttctgtttagttaattaaaggaacattgaaactagagagcaacgaagcttgatttttggcttagttattgacgtttgatcggattctgtgccccattaatttctcgaaggacataagctttactttggctctaatgttttattctttccgttatcaaattctctatctccagaaaaaatccaaaaaatattaaatttacgcagcggataaaatataaagtcgtagttatgaaaaaaatgaatgttttgttctacggaaacaattgttttgaatggttatgatagtcaaaattatgttgtcactatggttgggcgttgcagtaaagtataattgtcaagaaagtcatgtttttagtgttttgaagtttgtttgtcaagaaaaaaaagaagagtattttaggagttttggtttaaacagattatcagaatatttgtttaaacgatttcaaagtcgatgaatgaaaatactttccaagattaggacgaatttgaatattacgactttgattatgttataacttaatttttataatgatatttgtagataattagatctaaaaaagttttaaataaattttacatatatatatatgtgtgtgtgtgtggtggggtgggggtggggggtaatttgtttgtgttggtcttttttgtttatgatgaaatatgtgaaagtaattaaaaagaaaaaagtcacttttttgtaattatttgtaaacttaacatttgatataattagtttactaagaaaattgtaatatcattatgtgaattattttctatgcaaattattaatattttataattgtagtataattcagtttcagttaaatagagtttgaagtgaaatatatcataattttatgatttagattttggacggaaactttagtctcttctcttttccatttgtgttttcatcatataaaaactaaacttttattatgaagattagtgtaataaactttataaagttataagcaaattaaataaaacattttaaaattatatcaaaagaaacgttcgaagaaaatataaagcagattagtctcctacgactacgaacaagaaaacaaaaaaaaatagagtagaccacttgtctaataagaagttaaattgatattccttgtacaaaaggcagatatatgccaaatatatatgcattatatatggaactaggccataatgaatggtcatacagaaaattgataaaaatggcttagtttaactttctttagaaaaacatatataattttaatagcaggatc

SEQ ID NO: 713 - DNA, 50641 bp, Arabidopsis thaliana
tctattattttcctaccaaattaatacccacgtgtcttccactgattagttgctaactttagagagatagttaatgtaggtccatcatatgcatgtatgtcttatgagtttatatatttttccctatgctttttgctacgtgtatttcgtattaatttaatggttttgactattgtcaattagattggaatttaacgcaaaatatatatggttccattatattatttataacaagtcttgcgaaactttaagaaaaaaaaacttcttgcaaaaattatattataaaatgcgagtttttcttatggttgcttaattaaaacttgaattactttgaacacatatagaaaatcatatcattgatctttgctaatacagtgatttatattagtagcattgtgaaattgtgtaactgaaattattattattattattatatgtggaatggaacggtgaggtcacattaagatgggaaagaatgccatttaattagttttcatagtttgagatgttgatttagagaaatatcatttggtttcttcatctaaattgttatttgtgtaattgtattagaaatcgaatgcatgatcctaggtgttgtggtaacacacaaacatgtttaaatgcatgaaagaatctacatgcgcaatttgctaatgaaaaattgatgttattcttaattctgaactaatgaactaatgggaaaaaaaaaaactttgaatttatagcttacttaatgtcatacatccaaacaacggtttaggattcataaatttaagcatcgagattaatgctttttttatgttttgaaaaatttatagcgaaattcgagctatcaaagtttaaaagaaaatttagaataaaaaatactggagaataaaaatgaaatgttggtatacaataattctcgtttattaaggaaaagcgtaattactaaatctgaataaattgcagagtagatggatctcttaaacgtgtgataatataatgcatggacacgaacgtacgtcggtgagtgagatccaatatgacaagtaattaaacaattaatgctgttttgttttaacttttctgattttatataaaattatataaaaaaaattaaaataaattatcactgcacgcattaaatggatccaacagaacgtgaggttccatattgtctaaattaataatttacacctttttggaatatatcggagaatgaaagtctccgttgattctaccaatccgttgacgttcatatctctttgtcacacattctatttcttttttaaaaaaattatttatttattttctttcgttgtaatatatataaatctgtatcttatcttaaagcacactgtcttctgtttcctgaatgatgaattgatttgtaaaatttatgttaaatacatgtagctgtaggtttttttctcttaaactaaaaaaaggtttggttgtagaagatgaagaatttcttgcaaaaccaaataacattcgcagcaaatccatacttgttttctctaaaaatgaaacaaactatgatggctatatttaaaaacaatcaaccatatatattctcattattattgatcaacaatacattcaaatcagaattggaaactgaattaaacaaaaactccattaagtttttagatgctttaaaaaactgattcctctatttaaatgcagtactgaataacaaatatacttatatttctatacaatttctagatgtggttctattttgaaaatttagttgggatatatatatcaaataagcttgctagatgttcttttatgcacactaatttaggatagggtttagaagcttggttttggtagggtttgttgaatttgaaaactgggagattttttctttttttttttcatccactgggagattttataaacgtctaagtatttggatacatgatacaattatacttaagtagtgtattatttattttggtagttgtagatcggaaattcattacgaatttcgatttcaaaataaattcttgttataaagatcgacaaaataaataaagagtgtgtttagtgaaaattattcaagtagggcaaaaggcaagactcatatagctgcctaataaaccagctgtcgtcctctgtctatatgtatgttgaatattaatttatcttttcgtaatggacccatatgtttcttgcattctgttaccattatggaaaaattgtcctacacattagagagaaaaaaaaaaaaaaaaactttcgactgaaataaacatttgctcatttttcttattgagagagagaaagagagaatgattaaggagaatataagaaataatcgaccctatcggagggttttgaaaaagtgttttcttgtgtggtatcttaatgaacataaaaattctagcactgatttttttcttagctattataaatatttaatttttaatgatatttctttagaaaggaaaaaaatctaaattttgcttaattatatataaaaatcatatgtgctcactttttgtgtattaattatgattgagtctactatttgattgtagtgtaatttctaacaaacagcgaagtataaacaatattaataaaagaaatgcaaagaatgttggtttcaccttctagatattttatttcaaagtagtattaaatagactaatttgatgaaaaacatggtgatacaaactattgtcttatgcgtcaagcttttcgaaaacaaaaaaaaaatatcaaaatgggcattgattagttttttggtatttacatgagaatagcccaacattatttattcatcattgtttcattaacaatgatatataatatgctttctcacttttattttcagtttttcctttcctttcactttcaccgtgcacaaatatccctctcaactctcaagtggccattctaattggagaataaagtgaatactaaaatcttccatattatgtttaaagaaacacccaaaaaatacttttaagctttacgtattttgaaatataattttagggttattttggacccaccactttatgatatgcaaatagcaaaatttctagagttgtgaattaaattatttcattcccttccaatctcaaaaagaaggaaacaagaaaaaggttgacattattatcccctttttagattttgtaaagttatcttattatgtagcttcttagctacatatatttcctatcacacaatgaaattgcactgttgcacggctaagccgggtgagaattaaaaattgaatacaaagatacactcaaattaagaagatgtttctggtgacactatcccggaactacataagatatatgaaaggtatcatgttgaataaaagtgataacgtcaatattttaatattgaatatttattttggtgaaattagttgaaaatatataatgtcactaaacagttatctgttttttttttggatatatttttcatcaaattataagatagattactatgttttttgatacttttcatcaaatttaacgtcaatatttaaaagaataaaaatccttgctatatttttatttcaccacaaattggtcactgtatgccaattggtttcccttctataggaataaatctatagaaagaaaaagtgatggggcctaaggaattggcaaattgtaccatgggttggttcaaatgcaatggacaagaccgaagattggggaagaatgagatgtggcatgaaggtgttgtagttgtctcattaaccaacaacagtcatagagagagagatgtgatgtacattgttcataagggggtccatattgttatatttaaaatttgttgaatatatatgtaacgtcaagttctctatctctatatattttatcatgattaataaataaagttagaatattatgagggtgaaagagcacacaacaccaaagaatgtactgtgacacccaccaacatttcgtaactataatacatatattgtacttaccataccgactaggttccaaaccataccggttttttaattattcttccaacctcatgtctcggttctatatttattaactttaaatttaagtttgaaaaatatttggttactacatatggaccgatatacatatgtataggtcgactcgttatggtcaggtggcgaattgatttgggtaaggagtttaaacccttatgcattgagtttaattctcgcctagaacaaagtcatggcacgttttgaaagtcgggattgatagcgtgtcatttgattcttgtgttgcaaattgaaccttggtccctcaactaaatatccgatggacagatggatagaataagttgtgactggagcatgttttagtcatgtatacccaatctgatgttgacttgtattatccaaaaatataaagaactttgtaactatgtaaaaaaattacacataatttgtatatagaatattttaaaattacataatttttatttgttaaatcatgttttgcaaatgaaagattaagaaaggcgataatatacatcaacaaacacaagctataagcacgtcacatttatgagagtttttataacaactctatctataaacccatcacatttatgggtacgttgatatggacttttctaagtaggtatgaaatctaaatgagcttttccgcaagatgttaaaaagtgggcactatataaaaaattgacataaatgttggaatatcttaaaattccaatacgcaaagtcagcataaatggatcaaaatcttaattaattgatgtaagtttaaggttgagagagagaaagcaagaagagagaggaagaaaaggaggaattcaatgtaaaaagagtgataaatgtgaagagacagaagggcacaggacttttctgcccattgcagaaaagatagcttgatgtgagaggtgatgaaatcattttgtaatcgattgctttatgattgctcctttattttattttcattttcttttattttgtagagagagagcaattaataataagtgaaaaagttattattgggttggaatttgttgttctttctctaaagctgttaaaaagtagaagaagaaaaagtaaatattcaataaacaaagtgcttttcccaaagctttttttcccctctgtgttctcacttgtattatttttttctgacaaaaaaaaaaagataaagtcaagggaagaaaaaatgaaagcaaaagtaaaaaaaaaagctgcaagatgatgaaggtataatgactaaatgataatcgaatgcatgcatgcattgcattgtcctatttagacacaacacataccacagtaactttatactaacttttgctgactcgtttgtttcaattcaaccctcaaccatttacttcttcgacttccactattgttttcttctctatagatatgtatttttaatctcccaaagtattcataaagcttcttccaaactatatgtgtattagtgtatacatgtaaacatacatgcatgtcaatcttttacatgcagattgtttttttacctttttaaccttctcgcaaaagaaaattattttcttaaaccagtcaattatccaattttgtggaaccaaaatggacaagacttaatcttaacatggaccaacaggacgagtgttcaaccagtgaattactaaaataaaagttttagtccgatatggccatatcccaaagtagtttagagcttttaaattttagtcttaagttttaatttgagctggtttacgacttgtgtttgagttaggtctatataaaaattcataaacacttctgaaaaaaaaaatgatgaccaaaaagtagctagaaaactgacccaaaaaaagctataaatcgaaatcgttgacggtaaaaaagagagacaatcctagcctttttgttgaaccagaatagaattgggcccatagaaccccaaggttggattgatgaataaaaacctaattggttttgatgaataccatagacaaaaaaattgacgaacacaatgtaaagtccctggagagaaggattcgtggaaaaatcaagccaggaccaactgattaagttcttaagaggctagaggttcaagaattttgttttgtgcctcttatcctaccactgatttgctttatgataggaaaggctttctatattgtacggttataaatctgagtccataaaactgaattgggcccaaaacatttactgtgttaaaacttaaataattatggtttgattttttgggccggctagtaacttaaatatttgcaaattctgtgtttaggaatattcatagcagagtttcttaatgaatttaaaatcggataaaactttttttgacaaaattttggtaaaggactcagttcggttaaactccgttgattgatttggactgtacattctcgtattggtgtctgacaaaactattagttcatacgtcccggcctatctaaaagcaaaatctgaattatgtagggatttagaaatagaagaaagtaaaagttgaggaactatcgttctcagaaacaaattgaagacttcaaatcaaacataataaacaaagaacacatgagaactgtttcagaatgagaaagagaccatagaagaatgaacatgaactgatattatagagattccttgaggctcaaggtttcttctttcatggtttccaaaggattgtggattcagcaatcatggaggtcacagtgtaaggatccatgttcgaagctggcctacgatcttcaaagtatccttttccagcctgctcagtgtcacgcccaaccctaatcgatgccccacggtttgccacaccctgaataaacgagtttagttagattgtggtttaggctcaagtgatacgaatgatcaatgaaaaaatatacaatggtaataattttgaatagatgaaacaaaaaccaattcatgtcactgtttttataaaaggcataagagtttagttacccataagaaagtgttgatatcggcggtttcatgttttccggtgagacgacgctcgttgccttcaccataagcagcaatgtgttccttgtgacgcaatccaagcttctctattgctttctttatcacctcgtaccctccatcttctctcatcgacttcgtactgcacaaaaacaaaatcccaattcagaaaaacaaaagcacagaacaagaaccagagaagaatcttcaacaacacaaaaacctgtaatttgtgtgtgcccctgcaccattccaatctccctgaagtagtgagagattgagtgaattttacagaaccaaacatttttgtttaactgtaatggtgaaaaagaaaacaaaccggaattggtttagggtctagagacagaacaactccagccaattctgtgatcctctattttcacatacccaagaaacagagtcataaaacagagtatatcaagatttgtataaatcgccatgagtgttgtttatatattacctcaagaatgtaacgagcaacccagacctgatcggcggcagcgattccaacggtgggaccgacttggaactcccactgaaacccacacaagctcagtttcaaggatttggtttcttgttctgatattgaatcagaagaaatataggaaaggggtaaaagtaaacctggccaggcataacttcgccgttagtcccactgacattgattccggcgtaaagacaagctttgtaatgagaatcaacgatgtctcttccaaaggctttgtctgctccaactccacagtagtacggtccctgttttcattgacaaagatttgttctttttttataaaaagaaatttagtgttgaggtcaatatggattttagtttgatcgctgggagaagttttacctgaggacctgggaaaccgccgaccggccaacctaccggccacttaatatccttttgcaacaaggtatactcttgttcaattccgtacctgaatttcaatatttaaaattttgaaaacccttaattaatactattgtaaataaactgtggattaaaccaaacatgaaaaattatcgcaaatgattaatcataaaacggtttctcctagcacgaaaaaactttatctagccatctaggtagattgttcccatcataatcatgaaacgtgcaagtaggggaaacattttctatcccaaaaaaagaaagaaaaacacttaacaactttgaaaatatatttaatacgaaccaaccaatacgatggcagttttattcttaaatatggtcatttaaagaaatttaccatgtttcttcggcgacaacactagggtcttcaaagatcttagccgccgcatgccttttgttcgtcggaatcggctctcctgccggtgtatatgcgtcacacatcacctaatatacacagattaatcccaagagtaaaataataatttaaacaaaatttacaagaattgagtttaaagaaactgttttattgtgttttcatttacaaggatgttgttgcctcttctgaaggggtctttgaagatagcttgagggctaaaacaacaaatacaaaaacgaaagtaatattactccatgatttacaaaattaaataactattaattgataattatattttgaaacatactagatgatgacttcactgtcatcgcccggagcttggccggtgcttgaaccgtcgtagttccatttcggtaactgcgatggatccgtcactggtccaggcaaagtctgcaacaataatattgttaatcatatttttcttaacttcttaaacaagatttactcatcctttatgctctatacgaaaccaaagattttttttttaatatataattaatagttacccttgctttgcttctcatatccaagcccgatccaccaatcctattcatcatcaaacaaacgaaaataaatcaaaattcttttaatcaacccaaaatctttcaacgtagtagatgagttgagaccaagtttaagacttttgactcataaacaatctaaacccaaaatctttcaacgtagtatatgagatgagaccaagtttaagacttttgattcataaacaatctaaggaaacctcaagaaagatatttttttaagacacaaacgcaaactcaagttaactttttatctcttataaatgaaaataacaaagaatatacgttaaaacttatattagacgcaaactcaacttcaaacgctgagaatgacagagagatcaatgaagaaatttacgaaccatatgtactcggcgatgatctggtcagtggaatcggagagatcgagattgattaaatctgcaagtgaagacatatcttaggaatctcaaagaataataaacctttttttttttggtaacactaaagagattcctgcaggtatttatatatagggagagaggtgggggtaggtgtgtgtgcttgactttgctatgctttgaaattttttttggtaacgaaacggagaatgcgaaaatatcgggctattattggaaatgcgaattatcaggagattctagcttaataagattctatattagctgaatcttttttattttcaacatcatctacagaatctttttttttgttttcccgttttaaaatttaaaaagacaagtttattatcacattagtttccatataaatagtcatgattttgttattaaaagaaaatgttgacctgatatgttcgagtaccatataaagtttctcacctaaccctagttctctttcaatacagaattaccaaattttgcttggaatatgtaaattccaacggaaataataaatggtactcgaacataggaaacgaacgagacaatcgacgaatctttcccatttatatatcaaaaataggaaagctaacgaacgagacaatcgacgaatcttttgagagagagatttattataggggaactaaataaattaggttcgtgcactcatttttttcctaagtgggaaattgggatatttttagaacattttggaagagtgcgttcttatatactcagtttatgtaaatcccaagaaaacaaaataagtcaaagatttatgttatttttatcaaaagataatccggatattttggaaccctacttgtttgtttatgaaattttctcttcaagttttcttttttaatctgaatttttgttttgtttctgatttaacttttggaccaatattttcccaaagtcgtggtgctcaaactttttgagtggtgagcaataagcatccactaatttcgagatccaaactttatcttctaaagattctttgtgttttaaggaatctctcacaatcactcacgctcttcgtttgctcgggtatgttacgcgcctctaagtttatgaataaacaacattatagactaataaaatgattggtcttatagttaaacataatatttcttaataatctttttattcagtaaccggactttatcaaactgagccggatttattagaaatgcaattcactacaaggaggaataagagaagttgctatgcaattgtttgatgccttgggaaccaaaaaaggtgattttccccttgagaaaatcagagtaccagtgagcagagagtttgggagatctcttgcgataaggatcgctgaagttgacagggtacaatccataactaagctcgtatccacttagtaactcgaacaaatccataaatgatcatacgaagtagcctctcgtgtctgatccattcctacacgtagtaatgtcttttgtttatttattacacagacaagagtagagaagagaagatgcagtaagaaacactttacttacctaacggctttgagtacagcaccaatgtaagcttgtaagtactcaatcctacgtgtgtccttctgttgcagctccaaatctggcttcatcggtgtacctattcgtttgcaatggcaaaagaaatgagaagacttatacaaaaaacaagagacatagatcagaatatatagagaaagacagtgatcataccattctcaagaatgtagacaggaggattgccataggtctgctttatatattccaggacactttccatagcccatggaaaaacatcatacttgtccaaacaaaaacaaaaaaaaagaactcagaaagaatattgattggggaaatttatgtatttaaagacttaactctaaaagagttttagcatctgaatttggtagccttgaaactcttaccccgaaacctgaaaaattgccaaggtctgtcccccacaagcagaaaagaaaagagatgattagcaaaaaccaaaacaacaacaatagagtttgttttgttatacaaaagatttaagtgttgattcctacaagtcaaagatacacccatgtctgagtagaaatccgtgtttcttgaaagagacggtttaagtttaatgttttccaccaaagccggaaaatagtgcatgattcctatgaagtcagaggagcctttaacttgttctgattcttcctttgagaaaattggcagtcttgatcccacagctcttttcatttcatcaggatagtctccaaatgtaagaggcccaagtatcctaagtaataaagagcagataacttatttttaacttaaagccttagatatgtttcccaatttgaaaattatcttttttatgtgtctgcactcaccagccgtagaagaagtctttggctctttggattgcaatttcatcatccttagaagagcttgtctgaggaataaactcaaatgcatataagctaaaccctacagaacctccttgcttatcctacacattatatataacatgttgctcctttgtcatgatcaattcaaacatccattataaggttatgtaaactatatactaatataaaccttgtacttttgctgatatagtctggaaacagaggcgtgtgcaagaagcaagttatggcctacaatgtatgtttcagtggaagagttccctgacgagcagttagaacaacgaccaggcggtgaagtcccatcgttgtaacctccgatagtgaatacattagcctcgttgatagtggtccagaatttgacatggttcccaaactctctaaagcaaacatctgcataagcagtaaagtctttgctgcaatgccaaacaatagtaagttttattatcttttctcaatagctaattatttagtaaatgctgctttttttttttgttatcgctagcctacatgattctgcgattggtccatcctccatagtcatcctcgagatactgaggaagatcgtagtgatgcaatgtaacatgtggtacggttcaattccatggctgacaagttgttgaataaagttcttgtaaaattgttctttatgaaattttatttatctttagtctcattgagaaagccaagaagttgactcatattggtgtctgtgttttcttcttcttaccatctaaatattttcattgtactataaagtggatatgatctagataaactacttgatgcagtcgtcgtcgtgcatttggtgacagaaagcaacttattgccttttcatttttttcttgttaaagtcttttacacagtcacagagactaatcacacttaaaaagaatctaattattttcaatatttggatctagtattactattttcttgtcaagtgttccaagaatttttgtagtgtcaaaatcagttcatcctgtcccatggagaaaaaactaaaccaaataaataaactattgaacattaagttatttgaacatgcttcacttatatatatatatttactagattttaacccgcggtataccgcgggacgatttattttttaaaagtaatatatattaaaatttgtaaattttatttttataaaatatttatatatatagtttataattgttattaagtaacgctataccacgaatctatgagacaattgttaaaaaactgaaattgtaacccctattaaaacaacatattaataattttttaaaatttaataaatattgattcaaatacatccaccatataacccaattccaaaataaaacatgttctataatttatttacccgtcctgtgatttttttttaaagtagtaatttttaaaatttaagaattattttttatatataaaagttttgcaaattgtatcattctctaatacatttatattttataatttaattttatatataataacattatacataccacataacatttttgattttatataatcttttctaaattaggatgatttgatatgtttaatattagtggtcttaaaaaataataaattaaagatttaatccgtattgaaacggtggattaattatattttacctttttattaatgttgattcaaaaacccgtcactccaaatccgtcttgccaaaaagctatttattttattaatattaattttactaatgatatgactctgaattataatttaaatattttacctaataacataggagtacaccatatttatttaataggggaatgtaccatatgaccgaatgcacttttacccaaatccaccaaaaaagtcttgcaaaaatactatagagataagaaacgatagtcggttttgataggtataagattagcaaatatattagttagcttaaattagttaaaaaatacaaatcgaaaaggtatattacactttattcgaatatagtatcaaaacttatataacacagagatttgataattttttaattgttgaatactttttttttgtgctaatttttatatgattaagatttaattgattttgtatattaaatattaaattgttttacgaacttatttgtttataatttggtaacagatagatatttgagtattcagtatattttgcttcagtttaggaaatctttgatgacccgtctttagatccaataagccctataatctagatattaacctgtagtataacgcaggtaggctaatattttagttaaactaaaaacttttattgtaaagatgatttaaaaatatatgatattattttatttgattttaaatgtatagtaaactgtgagttgtatatgttttgttgatattatctatattgtttagtgtttaagattatacacttgtagtttgattgttaatttaagagtttcacctgtagtataccatcttgtattaatatcgatctaaacccgtcaattctaggattttccagcttgtattaaaaaatgaatcacatcatacacataaaaaatctaatatgttattaattattatagtatataagattataaattttcaatataatatgtatgaaattaaatataaatatttcaaattatgacccgttactcagtagaaagttttcttaaatctatttttcacccgttataatattttttcatgtattgaacaatttatattcgtttttaaaaattctaattatggcatatgcgaaaaaattctaattatttttttataatgatgatattattttttcgcaaaaatagaatcatataaagatgagaagtgaattataataattaataaaaaattaataaaaaattaatacaataatttagatatcaaatctaatttgttgattttaattggttacttttttggaaattaataatgtatttcatttttctaattaaatcaaattaattaaaatttagatatcaaatcttatatgttgattttgattggttattatttttgaaaattaataatatatttcgtttttaaattaaatttaattaattaaattagtatttgactttttaatccttaaagagatacattaatttactctttaaaattttatttctaatggcatacctatgtaattacttacaaaaattaagattatatttaaaatgtatttcccaaataatatagtaggactaaaaagctttgaatcttataatactttaacgaaaaaaaatttgaactaaaccaaatatcataactgtctgtgagctattattgtattcgcaccacccaattagaattttgataggtactacaatattaagtttgtgataacagccaattattacaattgtttggtgggtcattatgttcccgtgactctgggctattttgtatatatgtcactatttttgcctttcttgttgtaaaatttcgaaagctctttattttcattggtgggagagtcctaatcttcttaatttcttatcatatagtcccaacttgtatgttttgtaattgtaataacaagttggaccgacgggatattgtgtaatatgattggtaatacgcaaacgcaaagtaacatcacagaacaatgctcacacggaaaatatgaattcataaaattttatcattatatgaatggaaagtgggaaaaaagcatacattacgaaattgttttttgcatgacataagaagaaccatttaaaaacttggtaacgtcaatttatgctagttaagtactatactctttcgtcaaataaagaaaaatgctagtagtagtagagtagactgatattgttgtcccatgaaataaaaggggcttcaaatatatagtttgatttaagaacccattcttgtataagcctattttatgggccgtaatcaataataataatgggcttactttctacaatgtactcttaactgaatatcaattatagtttgggccgaaataaaaacgttggtctcatcaaaatcctaattgttttactttaatatcatgtcttcagtactaaaatactaatgaggtaatctaatttgtatattttcttcccaaaaattttcgatatgagttattccattttaatacagaatatattcttacttttagaggaagtaaaattttgaaactactcaaatcctattctatatatgtacaaacacattttttttctgccgatgacttagatagacacaaagctaagaatttcatattgtaaaaaaagttaacacgtaaatatgttccacatatccgaaaggaatttaaattagtagtggttcagtattattaagtcagacatttttaggagacgttcaataatataacatactttcccaagagttgcatgtttccatcgtacataataaaaccataactaaacaatttaaattattcattaaaaataaaaaaacggatagtatttgtttaattttcacattaaagtatcttttaattaagtatttattattatcttttatctacttatgtaatgtttataacacttcttacaaatctctccagattccttcataaatggaaacaaaagcatttaaatatgtaaatcatatgatttgttactgaaaatgctaaattacacaataataaaaagatgtaagaatatacagcaaactcatttcttcttgctgtaaaaataatcgcacggaatatttaaataaattaataaaagattctgtatctcactgtaaaaactaaaaaggtaaaaaattgaacaattaactttttctttccattcactgcagtctgcaattaatagcctctctctctctcctccttcatcatctccccatagccgtcgagacagatagagagagctgaaatttctgtgagaagattttcttccgacattttctctttccaaacactgttctacacgtagtcggaaatctcggaaaaaccaatctccgagtcagagagagagagagaggcgttcactgttgtaaaggattaagctttgggtaagaagaagatgaagaacaagaccaatttaggtctctcagtcttcttcttctttatatgtctcgtttccgtgacatcagatctagaagctgatcgacgagctctaatcgcacttcgtgacggtgttcatgggcgtccattgctgtggaatctaacagcaccaccgtgtacttggggaggagtccaatgtgagtcgggtcgtgtcacagcactccgattacccggtgtgggtttatcgggtccattaccaatcgccatcggaaaccttacaaagctcgaaactttatcattccgattcaatgctcttaacggtcctctcccgccggatttcgcaaacctaactcttctccgttacttgtatcttcaaggaaacgcattttccggcgagattccttcgtttctcttcactctaccaaacattattcggatcaatctcgcccagaataatttcttgggtcggatcccggataatgtcaattctgcaacccggttagctactctttacttgcaggataatcaactcaccggtccaatcccggagattaagattaagcttcaacagtttaatgtctcatccaatcagttaaacgggtcgattccggatccgttgtcgggtatgcccaaaaccgcctttttaggcaatttgctctgtgggaagccgttagatgcttgccctgtcaatggcactggaaacggtactgtgacgcctggaggaaaagggaaaagcgacaagttatctgccggagctattgtcggaatagtgatcggctgtttcgtcttgcttctcgtgcttttcttgatcgtgttctgtctctgtagaaagaagaagaaagagcaagtcgtccaatcgagaagcatcgaagcagctcctgttccgacctcatcagcagccgtggctaaggaatcgaatggtcctcctgcggtggtggctaatggtgcatctgaaaatggtgtatcaaagaaccctgctgcagtgagtaaagatctgacatttttcgtgaaatctttcggcgagtttgatcttgatggattgctgaaagcttctgcggaagtacttggtaaaggaacgttcggatcttcgtacaaggccagtttcgatcacggattagtggtggctgtgaaacgattgagagatgtcgtggttcctgagaaagagttcagagagaaattgcaggttcttggatccataagccatgccaatcttgtgacattgattgcatattacttcagccgcgacgaaaagctcgttgttttcgaatacatgtctagaggaagcttgtctgcgctgttacacggtaacaaaataaataactctgtttattgtttgattctttagtagtgattacagattttttaaaaccaattttttggaatgaattcgtagggaacaaaggaagtggcagaagtccattgaattgggaaacgagagccaatatagcattaggagccgcaagagcaattagctacctccattcgcgtgacgcgacaacatctcatggcaacattaaatcatctaacattctattgtcagaatcctttgaagctaaggtctctgactactgtcttgcacctatgatcagccctacttctacacctaaccgcattgatggttaccgagctcctgaagtaaccgatgctcgtaaaatctcccaaaaggctgatgtttacagcttcggtgttctcattcttgaattactcacaggtacaacaacacacacaaaaacagagagatcttgaaaaccgtatttttggtcaaaatgttgattcatatattggtttttgtattgatttgcagggaaatctccaacgcatcagcagttacacgaagaaggagtagatttaccgagatgggtttcatcgatcactgaacaacaatcaccatcagatgtgtttgatccagagctcacaaggtatcaatcggacagcaatgagaacatgatcaggcttttaaacatcggtataagttgtacgactcagtatccagatagtcgtcctacaatgcctgaagtcacaagactcatcgaggaggtttctcgttcacctgcttcaccaggtcctttgtccgattgattgtatttttctttttcaatatatggggtctaaattgatcatttcaaaattgtttggtctaaatttgaatttctttatatagtttggtctttaagtcagttgagagatctacgttgaagtttttttttttttttttgtgtttcttaatttttttagtgaaattttttatatacaaattgattgagtgtgaaacaaattatatctctccttttctattggtcggcccatcaatttgaatatagtaactttaactttatttcatgaaacttatccactattgactctttctttctaacgaactagcaaataaaacggcagaaacaaaaaagaaggagcctgattattatatgttggtaaattataaaaagttgtcaaacaaattttgttgatatattgtgtctgattcttctctccgaccaatcataaaatgcatgtcaacgacacatattttctgtctttcctcaatttcaagttttatttgtattagtgactaagactaagtatctaaatacttattacaaactccatggagtaaatataattttaggtaacgggtctatttaaagtttctaagttgaatctgtcaagttagtccccacctttcaaattcaaattcagataatttggtgaagccatcaaaacaaaagtttcttcatttttcctttaatcgttaaagtaaatttcaagcgactctctttaagaataaaaaaagaaagaaagatatactatctttataaattgtattgatcaagacatatgcagagggtttcggaaaatcatttacggacttaatgtgtgaaagaattagttgagtgcatcattcatgtataacttagaacatatctattttggttcggttgagatgtaaataaaaaatgttagttaagaattagttgatgattttgggttagtttgtaagtttaagcgatatcaatgggaattgtaatggtgtcccacatctacacttaaaatgtttggtgtttcttgttaaaatttgtaatcattaattgagagttacacaaatttatcataatcaactaacgtaactacatttgttaaatgattactcttaacagtctgacttgtgttagttgttacttgttagctacaattatgtgtgctgcgactcttacaagggaagaaataataacgtcgcatatcatatgctgatttgcatgagatggatctatagtataactacattaaatgaatataaactaaacattttgtttatgtcattaaaacagatttaggtatatgtcaagaaaagttaattactaacagtcgtttcattagccatatcattcgaatatgtagtaggttttctttttcttttcaatttgaaaattatttagttagagtaataaatttaaaaacgtgcttaaactagtaagccttgtgatggtgaataatccgttgaatattgaacttttgccatcaaaaatataatgaagaattaagtcatggtatattgttgacaagtcttctgaaactttgtagattagctaagtgatagtgatgaccttgtacgagaatgactgaatgagattcatatgcctataattagacctagagagataaccgacaaaatcagtcaaagcatcatattttcatattgaattaattaacatccaaaacattttataactttaggcttcacataactctatgtttctcgttgttgtagcatttattttggaatttaatgaagcaccatattataattgtagctatttgtatttttgtcagcagaaaacttagtatttgaaattacaattgctactaaatgctaaaaaagaaagaaaaacaactctgtattttttgtgtgtaaatttcgaattttttgtttctaaagctgtgagttcttttttaaatgcataaaatatcatatatttattaaaaatgacgttatttaatattaaatatgaatgtgttacgttttgatcagttgttaatcaggtggcataaatcattttacaccgagtcatggacacagcattttttctcttgttctatctagctcatatccatgtgggttcacatgcacttgtatatgttaagagtatttattttattttattgttatcaaatgtgcccaagacaatgccacatagcttatctaccctgtcaaatccatataaaactattgaagcctttacaacttgtgattcattttcctaaagtcttaaattttaacctttgccagctcataatttattccttatattgtttagtgcaaagtttgtttgaagatggttgccgaatatcataataatcttttaattttatcgtatgtgacaatcataactataatttattaaaaaataaaagcttatataaataacatattctaaaaattatgcatgctaattagacatgagctggaaaatgaattaattgaggtaccatcaaatgttcggtcacgaaaaaaagataaacacataatccaaatagaaatttagttctatcagaatatgataaaactaattatattagtttattgcatcaacatataaataagatgcatacttatgtggacataaatagttatacatactcgtgatgtttgagattcataaattatactccagaagtttgtttgggaccgatagggatatagaacatggccaccgcatcaaggcagtattggacgcggtttctcctccagtgccaatgattatgccaacaatacaaagtgaataaatatttttgacaaccacaaaaaggagtagaagaaacaatatggcaaagtaaattgcctaattggtatttttttcatatgtctaagaaattactgatcaaaacacatacatcttttcgggccacgaatcaaattagagtccatttgcaacgttttaacttttaactcaaaatctggcctgactcttacgaaatctgcttatgttcgatcgattgagctaccaactcatgaatttatatttaacgatctctactaatttagttccttaatttaccttaaatttccatgttacattaattggtttacgttgtacaagttgaaattttcttgacattgttgttgttgttgttgtcagaattatttatctctttccatatcgtttttgtcttaccttgagttggacctttgttgtattcgtttataccgatccatttaaaagaaaaacaaagcaacataatcatcttggagtttacccaagaaaacaaaattcttggagtttgaaataggttaagattcaggcgtgtccaactacatattaaatttatttatgggccattttgtaatgttggccttttgttcttaaactgggccattttactgataatagaccaaagttggtgcaatggctcgagcttacccatttgtttttcgtatgaggacatcctattggattagattttttcccactgaccaaataataaatttatagtattttgttgtatataaatccaaattaatagagaatatttagtctcccagcgaatatcgaagtgataaaaatacacaaaatatcaaattattaaataaactttaccatatcgaaataatgacaaaggtgggattatatattgggaacacgtaccactatggtgacgtcatgggtaccgtaggtttgtgttggcaccaccaacaataacaacaaacaaacaatacaaaacccaccacttagtgctaactaaaacccgccaatcacattatacttaattacaaaagtaaaatacgatttgtttcttctggtttgataaaaactaaacagaactctctttttttttttaaattatgagattcgagttttgagacataagcgaagaagacaacattggctgatgaggtgtttttgtctaaggaaaaagaactttaggcgtgatcacactcgcttacacgtatttgtttttaactccaataatttgactaaaatgttgcaagattttttttgttttacatcaaattaaatgtgatatagaaattggacgatttattaaaagaattatatatatacacatttcatacacagtttcatcatctgctttttttcttcagtttaatggtttttttaattagtatgttatgtagaattgtagatattccgatggtccgtaaaacgacatacatgatctaaatgtcgataaatatcacttatgaccatatgtaaaaatatggattaaaaggttggatagatttataattaatagaaggaagatacgagaagaaatgtaggtccaaccacaaacatggttttgacatctctctcactctctatatataggttgttgtgtagcctctttagtcttggaaatacaacatattataagtatattaggtaacatatatgatcatatctctatatataaagtaggtatatatatatttagcgagagagggagagagatggggaggcaaccatgttgtgacaaagtagggttaaagaaagggccatggactattgaagaagacaagaagctcatcaacttcatcctcaccaatggccattgctgttggagagctcttcccaagctttctggtttattatctctctttctcttaacttaacaagacaccgtttgtgatggctcatgtttagaaatttcagttttgcttcacactttttctttaccttaaatcttaccgacgaaaacgatactactttctttgtttttttgaaaaaagtacatttgttgttttcattcaagtttccgatttttcagttatagacccatctcactcctactgattcctattttatttaccttttttttattcattacctagtagttttcatgagttctttagacacatatactaataggttatgcgccaataattaagaaaatataatttgattttaaatatattttcaacgcaagaaaatcacaataattctcaccttactttttgcaatggaatatatatccctttttctgatttcaaaacatattattagtttgttaatcatagtgtttggctgatacaatcagtgtttgattttcgtggtcctcacacgctattatttggtttttaatcaattttagttttatagtttttaagtttaaattaaattgatcgttgatttaattactttgtttacaaattaaatgcaggactattgcggtgtggtaaaagctgcagattaagatggataaattatttaagacctgatttaaaaagaggtcttttatcagaatatgaagaacaaaaggtcattaatctccatgcgcaacttggcaataggttcattctctttctcctgaaaacaattattctacaaacaataatttacttactttaactatgacgttctaactaactcataataaaagtatataaagtttatatatatgaccattatattacaatattctcaagttatcggagaaacacaaaagtcgtatttagtcgtatttagactcgaactttatctcatctttcgcacgaaaaagattacctatcacatctcttatttagtcatattttttaagccgagtagtttaatttagttggtctgatgaaaatgactgaacagtcgaaatatttactaaattttaagcttatatgattttgaatctttaacttttattttgtgtgtgtgtgcagatggtcaaagattgcctctcatctaccaggaagaactgataatgaaataaagaaccattggaacacacacataaagaaaaagctaaggaaaatgggtattgaccctttgacccataagcctctctctgaacaagaagcttcacaacaagctcaagggagaaagaaaagtttagtgcctcatgatgacaagaacccaaaacaagatcaacaaaccaaagacgaacaagaacaacatcaattagagcaagctttggagaagaacaacacatcagtgtctggtgatgggttttgcattgatgaagtcccattgctcaatccacatgagatcttgatcgacatctcttcttctcatcatcatcattctaatgatgataatgtcaatatcaacactagtaaatttacttctccttcttcctcttcctcttctacgtcgtcgtgtatatcatcagtagtaccgggtgatgagttctccaagttttttgatgaaatggagattcttgacctcaagtggctttcatccgatgattctttaggggacgatattagcaaagacggcaagttcaacaacagtactgttgatacgatgaacttgtgggacatcaatgatttgagcagcttggatatgtttatgaatgaacatgatgatggttttattggaaatggaaatggatgttcaagaatggttttagatcaagattcatggacatttgatctcctctagcttttagttttttcttgatgtttttttaattagattttttttttttgttcttgaagtagtggggggatttggggttggcttggtgttgcagtttagtggattatggtgtacaatacatgtaataaagattgcagttgtggacagatcgttttttctgttttttttccttcacttacgaaatatttctttggaaaaatatatataaaacaccattaaagtttaacctaatataccaattgatattaattaaatttcattccaaaacgttactccattgagtcatcatcgattatataatgaatattcttaaaccttaacattttacgacttatccaaaaagactttttattttccttggctacttatatactaccttagtcccattttcttcttttaacaacctcggttccatttataccaaacaaaaaagttggaatttgcttatagatacgtaaaattttcgggtaaaagtggaaatactaaatgatgatacaatgttggcgtcatggtgatgaatccattgctatatatatatatatatgataagacttcggagaacaacgtcacaacacaatcatgattgaaatctcttaggatttattaataaactccacctaccaaatattcttaatctcacgtcaaattcaaaagcacttgtggtggaccatcgactgcttcactcacttcatatatatattttcctttccaacaaacttaaatgaactttcatattctagcggttagcattactgctgtgtcactaacaaggtttacgttgatgtaaaaacctaaaatgtgatataaagaatgtaaaagataaaagagtggcaaatacattttggattatcttatgacacctacttttgtctataatcgttttcttacatttcatatgtttcgtgttttttttcacaccgcaaatatgcaatcagaataataatcatgttttagacgatgctgccagtctataccgaactcaaaaggaaccaaaagttacatggttcacgttaatcaacgttttataaagaatatttttcgttctgacaatttaattttccgaaccaggttcatgttttaatttgactggtccaatagcagtccgatattataaacttaaataatgaacacgttaaagagtatgaaataatttcacgtatgttcaaattttcataatagtgatttatccatatatcggatctgtaaaactcaaaaatagacgatctggttaattttcataagtgatcatatgattaatcaaaagtatttagtaaagtacgaaaatacaccgacccacgcatgtatcagtccgcactacacttatgcatactcacgtacatattacatacagtggtgatgacacatgtgtttcttcaacacttctgtctcgatggtgacctatgcaggccgctacacgaaataaaaagaatagggtttcctttaaccatattcaaaaaaataaaaatatgtttgttaaaaatatgtttacatatatggtattggtagcttaattgtatgtttattagctgataattcaaaagatgaaagtttttaagataactaatttgcatgtcagatttaatatgtttatagataacaaatgcacaattttttttttttttttttttttttttttttctgtgatgcatatagctagcctagaatcatatttcatatgtcatagttttgaatatatacgtttgtaccaataagtgatttccaaaaaaggtttaaccagaacaattaaagtactaaagttgtctgttgttgatagtagaatgatattttgtaatatgttaaattttgtaattacatatgatgattgaccatgtcgtaaccgatgacaattatttttgtcataatacgatatcttaagcaaatcgatttttttttgaaaatagtttatattttaagtacgtctagtaaatttcactatcttgttttcttaaagtaaaatttcagtatattttagatatgttgtttttattagtagcgtttgttgttcctaaccagtatgttttcatatatttaagtggaaccatccttaaaaccaaaaagacacgtggccgtaacctataatcttatttttatggaaaatatcaatggatatgttcagaatgtaaaagttagatttttgctagataaatatgaaagagaaaaaaattaaagtcatcactatcttccttactttgtttaatttattaaatatgtcaggtatcaactattgttataaatttcactatatatcaattattttatcatatttataaaatattattcagatatataatatgttaatacgttatgtccagtataacatgttattataatttgaagataactgtcatttttactttgtttaaattaccaaatatattatgtatcaattattggtataatttcactatatatcaactattttaccatattatgtaaatattattcagatatttaatatgttagcacgttatattcaatataacatgttattataattttaatttgattatttcatattaatttgtatgatatggtaatagtttaatacgatatatataaatttatcgtaatactatactagttaacatgttaatcaaatagttatatgtatttagcgcgatactatactaattaacatgttaatcaaatagttattcacataaattataaatgttttatgcaatatagtgataaatagtgttctaaattttagatgaataatgtcgtcagatagttgatgaacagtatcatgactacaatatctgataataatagtgttttgagataataacatatttggtaaataaaataaaatataaagatatttgtgattttaatttttttctcttccatacttacataatattaaactatttataaaaaatatctgattttcaaattttccagacatatatattaatatagccctacttttattagtaaagaaacaaatatgtagagtatatttataaggctgcggtggcttcttcataaggctgtgcccatatgaccggtcctgttgtcaattatgtatttgtatgtgtatgaagtttaagacaatggaccacgcgtgaatgggattgatagacatgtggtaactaccttcaccaaaccatcttttcataaagaaagatcgacattttgtactttcggttaccacagtataagtgtataacatcagttttttttttgccgatcatattcatggcgcctatgttagaaaacccttttccaaaaaatattcatggtgatgatgatgctatagtttaattaaaatgttcaccatgtaagctgacgaatcatgatttgattaattttggcccaacacttctccattaaaaccaaataacagaaaaacctaggaatagattgaataactggtcttcatcttctaaaaaagtgaaatgaatattcggtatctaagattcttagaaatctattttttcaacggttattactccacataattttatgtcagaagatcaactttttaacgagtagagctcatcaaacatcaaaaccatgccagttcggcctggtttggtcgtaatatacagtaatatatatatgctgctgacgctagttaaagatcgattacaattataaatctattaaaagttacgtaaattaaggccacaactgttacattaccctaattataaaaaatcatgtgtatgaaccatgacttaattctatattgaaaaaaaatgtagaagtaaagtgctttttcgatgttttggttgaattaaaaaccacaaatgccttttataccataaagtgtatataatatattttcttaaggaaataagatttataaaatacaaagaaagtggagaaaagagtgcatgtatatgaagctttcttataacaaatatgatcattgcttaggcatgacttgtcacaaagaagagcaaaagggatgatagtggaactgtgaatgatggactaaagagaagagaaaggaagaagataagggaatttattaatttcatagaattttaaatactaaactgttaggttggtggatacatttttttttaaatgaatgataggaaacgaaaaattgataacgacgacaatgattgtaatacatttgaagttggtgaatgagtatattttcgttctactacttattgttgtgacacattggctaaacaattcacacctttaaaaacaaaagaacaatcccttttgcaaagttaccaaacgataatatataaatattcctatatattattcactctttcttcgtgcaactgatacaaaaaatatgtatagtaattaagtggtttattgtgtttatacatataatgtcaatacattctatgacttttatcaatatgaataaacaaaatacctcttttgcgatacattatgtttatgtgcttaaaatattatttaaaattacataaaaaaatatgaatgtaactctagtttataagaaatattaatctttcaacgtggttgaagaaaataatctttagatatagatatgtcgtattacggtattcgtaacatgcaaaatgtaaatgcagtaaagtctcaaaatgtgatcaagtcttcttcattcatattttgggctacacaaaagctccgtagaggtaaaacatcttattgtctcacgcgtcagagtaagatcctctatattgcctagctacactgcgagcatctttatacgttaactacgactagacacaactatagtgacaattgtaggaaaatatggaacctgttggtaataaaagaaagtatgggaaattttttcgcttattgtagtttgtgatccgattaaatttagctgaccaagtaaataaacaatcaacagttgaagaagactctataacagattcacagcttcaataaggctcaagcttaacatcttccatgtcaagtccggcgtcatcaatatcatcatcatgaggtgcaattagagtagagacgatggttccactgttatagccatcaataagaagctcagaaatcttagatctccattctgatgtcggtttttgggtcttcctgtcgtggtagactctatcgcggtagtttagcatcgtccctagtcccgtgtttgcaacccagccgtacttaatcagaacttctgcttcgcctgcagtcatatcttctcctaccttattatcccaccccgagttacagagagagttcagaataatagaccttagaaaagatattggatcatattaaccggtgagagaaatgaatttaccagtaacggcttgttttcaatcagctgatatcggccacaacttgctagtttcatggccaagactaaccgtttgacctgccatctgattgatgcagtattgctgagctcgaagaagtatgttgcgtagccatattcaggccgttccattactatactgtgtaacacaaaaagatccatgaaaagttcagtttagccgcaatgacaaggaaaagagagttaatttaccggttatgtctctcgaaaacgaatatgaaagactggagatcgcggcaccagccccactcaacaggccatttgcggaactgcaaataccgcgccttgaaaacaagaggaagcaagttaagaataaagagaaatatataacaattcgagaagacggggatgaggattttaacctgttcgatgagggagaatagacaggtcaagcaatagctagttcttgaagcttttgagaaacttgaattaagtagtttcgtgcccgtctcgcgtttgtagaaaagctgataagacgattcaatcttttgacacagtggggaaaaaactacctttgaaacaaaaaaggattattttacctgcgagatcacatcttcgagctccgagaaactctcattgagaagtgaatcatctgagggaacatcgccaccttcattcccataaagcctaagttcatcaactgttaccccttgttgaatcagtacctgaaaacacatgtgctttaagaaatctaatttgcagaagttccattagattctatttcttttagaagaaaaccatgatacctgcaaaagaccaggagcatcttcctccaaagctgtctcaattgagtccctgaaatggttatttcatattataagatcacaaaagaaacagagataatcaaaagagagagacacatgaggcgatggatacagcagagagactcacgtggcggttttcttccgcttccaaggacgaaataccctcgaaggtttaacgtactcatcagatgtacagaagctaaaccctgaggacggtgaattaagatcttcatgatgacctgagccatgaaaagatcgaagctttaatcgatcaattaatttcatgtggtctataatatcttcatccatttcactagcggtctccgcttcgtttttcatacacctaaaaggtgtaggagcagatgtacaacgattcaagcgaaagctcagtttcacagaatctagctcattttcatcaagagcttcaccatgggtttctacctctcttttgaccggtatctgctttgaggtaacaggatttttctcgtcattgtcctccatgacgcaatcagccaaaggatcaacctttacttgagtagactgtatttcattctcattcaaaggtagaggattcctttggactcttttcactctttttcttggatttttgttgctgctggatacctcaggtagactggcttcaggtgacaaatcaaaggaccgttcaggagatattggaatatcactctcttgaattccaccaagctgacttccagattctgaacatatactaaaatttctacagaggacagaatcaattttctctagaaagccgctgaattggactccagaagacgaagctatcccattttcgcatgaaatctccgcttttattttataaagttcagtttcatcgcaatcttcagtattatcctgtacttgtaagcaaacacctagttagcccaaatagattccaaacaaaaaaaattcaaaacccaagggaacttgtcactttgattacctctacgttagattcaggcaaccttatagcaaccctgcaacaacaacaagaatggtgtataagagccgtgaaacactaaatgaacgcaggcgacaaaaaaaagtggaaaaccatccaccgagcttgtgacattataagttaaaaaataaaacacctttcaagaagcattttgcgccgctccttcagtgtgagatgttcaagatcatcactcctttcagtttctccgactctattaaaattctctacagcattactacaacatcctagaatgttgttctgtggtcttatgtttccagaatctttaagaccttgactacaaccaatgttcatagattccaatatttccgtgcttacagattcagtagcatcacaatttgacactacaccctggacactagatactcagttctctaaacttacataagtgaaattgaatttaacaaaaacaaagacttcgttaccagctcattgaagcaatcttcttcttctcttttcaagacactatcaacattcgatctaagaaacaaatgaaaacatatgtgaaaacaaaaacgaaaagtgaaattgaagaaaacgtaaaccaatgacagtactcacgcaggaacataagcagcgatacgttgagagactctttcactcgatagcaataaactccgccgtgacgtcaaggggagatggtcttcctcaaggaatgtaaaatcagactccgatgaagagatgttggtaggttcatggcacatcttatacatttgaattagagtaatacagaggaaaagtacatggagactgaagaaaattgctataatcgagatttctccaaatttgctaattgcgtatagagctacaaaagcgaattagataataagagagaagggtttgttaagaaggtaaggagaatgaagaaaggaatctcctttggacatgaacacaaggagaagaatctcagattgtcgaaaccctggtaataaacatgaagaagcttttgtgtcactcacttttatgaacaataaaaaagttgtttttagccaaattgaaacataaccagtgaaacggagaccttacctcagcatattcgatgaaacactgaaattgagacgctcttactgattaacaagttaagaaagaaatcgttttttttttttgtgtgtgtttatcatcgaaacagaggggaaacaggagggagcgaagagaaaggttattttatttgggctaatgggccaataaaaatagaacctaaaggcccatagatgtaaaccctaagctataaataaaagacttcgtctttgatttcgccgcaagatattatcttcacgaaaagatccgatttttttgttctgattttctgttaaaatctgaatttttcgctacgaaatcttaggttaagaatagcatataaggaacagatttgtgataggagtctttaagcttagcactcatgtatagcttaaaagaaatcttatgttccgatgctaaatcaaacatcttcattgatggtttggagtctctggacatgtagcattctgggaattttttttcccgtggattctagcattttctcgagattcgacatcttcctatgtttttaattctgatcttatgtttggatattttagatcttcgaatttctatgataaagtgttaaccttttctcaaataaaggttttgtgaaaatttgctttttgatgctgctctatgatgattctttttgctttaaccacactgaaaagatggggttgagaatgtgattttgctcttcttgattcaaaccagagaaagattagatttgatctcggagtttcttgatgacactttgatctaagttgcttgaaggggattctttttctcctttgtggtttagattaaggtagagagtaatgtcgagctcttatcaacatttttcatggtttgaggcttgaagaacattcacgtttttcaagctcactcatgtggacaaccttggcccttgtctgagaagcagctttttctcatattcagtttttctaaatttgttgttttaaaaaaaaaaattggtttgtttttttggctgttctatgatgattatattgctttaaccacactgaaaagatgggcttgagaatgtgatgtggttcttcttgatttaatccaaagaaagagttcttgagctatatgtattgcttgatgacactttgatctaaaatacttgaaggggatttgtttccctttgtgttttagatcaaggaagagatcagtgtagagctcttgttcgatatttttcttagtttaaatcttgaagaacattatcattttctcaagcactcatatgtggaatcattgtgccctttgtctgagaagcagctatgaattctgtttttgtcttcgatattgttaaacgtagctgatttgtaagattactttgtgatcttttttggatgcttgatatgtatccaaccaagagtgggtttcttcttacaaagatattgagttaggaattttaatgtcattttatgttcgaattggggaaaattcacaaaaaattgggaaaatagaagagagcattattcgatgtttaccacatggtggaataatttgacagaacaatgtactttgggaatgacatatggaacaaactgtgtaaaccaatttgatgatgaaggtgaacgagttacatataggagacttacacttccataataatattcagaaactatatgaaagtgtatctttctttattactaaaactcttttctaataagaaatgtgtaaactatgtaactcggcaacggttccagactctctaatcctaaatcaatgttaaaggcgtaaggctcttgaacctgttcattgtgagctttgaactaagtattcaattttttggacaatccgaaaaacacaacagtataactacaaatggattagtcccatttgggcgtagtctcattcgtttggacgagaaacacaacgaaaaacctagccaattttgttgttctcatgtatgggcttaattggggactaatccatctgtggttccccttgtttccatagttcgtaattttattcgtttttcgtcttaagttttcccttctttaggtttagtttccggagatatttttgttttccgccggctttgtgtttcaaatttgtattccaccctttgtatttcacaacctataatacaatggaaaaattctggatgaaaaaaagaaaaagaacacagtatatagaaaaatctgaatcacagtactaacatcattgattttctgctacaaaaatgagtgtacactgattcttaaaatagatacgggctataacataacaaaaagaaaaagtgggggatggcttttgcaataatctcgaaagagtttctcactcacatcacacccttggtttataaataaaactcattgatcttgacggtgaaaatatcgccacctgttaatttgtaaaaaggtttcagtacacttagctacactggatccaagtctagtgctaaactcaaacctcgtggttttagaccaaaatctcttcttcttcgtttccttcttcctcatcatatctttcatcttctccaccagaatttgttttaggctctccttcttctgtttctttttctcccaaagaaacaattagatatggagaaccttaccctagtttcttgctcagcttcttctccaaagctgttaattggatgcaatttcacttcctcgctgaaaaaccctactgggttttctcgtcggactcctaatattgtcctccggtgttccaaaatatctgcctctgctcaatctcaatctccctcttcgcgtccggagaacactggagaaatcggttagtttgcaaattccactcgacactctattatagcaaatgccaaaattttccggaaaaatttccagtttattacttttatctatcttattgaaactcaaattgcgaacccttttcgactggtttaatatgagcttatgaattgctatatctcttaaaaaaatccacactttgtgaatttgcaatttgaattcttgtagaaaccattcattgttagaattgtttactttaagtttatgttcgatttgcagtggttgtgaaacagagaagcaaagcttttgcaagtatattttcttcgagtcgtgatcaacagacaacttctgttgcttcccctagtgtgcctgtgccaccaccatcttcatcaaccatgtaattttcctggttttggacaatgtgcttagtttgtatgtcgtttgattcttggttattaaattgtgttttttcttttttcttgtagaggatcaccacttttctggattggtgttggtgttggtctatcagctttgttctcatatgtgagtatcaagattccttcctaatttttttttcctctataaatattctttcttgcttcaatattgattaataagtgcttgaccttttttcttttctgatggcattgcaggtaacttcaaatttaaaggtacagatacttggccctctggttttacgggacttttgttctctagtctgttgcagaaccacgattttatgcttcatgtcaactctagtgtattgtgctcatgtatctgagatagttttattcactaaactggttatcttaacaaggtgaactgtttgctcacacttgttgaaccgtttatataagcatcgaacttttgcctctctttttttgggtagtcacttgattcgtagatggtaacctacataccattatggttttagtgatgcaactcaggtattcagacttatagtcattttcgcaactccagtatttgattgaaatatattatacaagttgtcattgctttctctcattattctctaaccggctgttactctctttggatttttttttttgctttggtttagaaatatgcaatgcaaacagctatgaagacgatgatgaaccaaatgaatacgcaaaatagccagtttaataattctggattcccatcaggatcaccttttccgtttccatttcctcctcaaacaagtcctgcttcctcgccattccaatctcaatcccagtcttcaggtgctaccgttgatgtgacagcgacaaaagtagagacacctccttcaactaaaccgaaacctacacctgcaaaggatatagaggtggataagccaagtgttgtcttagaggcaagcaaagagaagaaagaagaaaagaactatggtagattctttttctgtttcagaaatcaacgtcttttcatttgtattctcaattttgactttcttcctttctcattttccaagcttctaacttggaagctgatttacttttggatgcagcctttgaagacatttcacccgaggaaaccacaaaagaaagcccatttagcaactatgcagaagtctctgaaactaattcccccaaagaaactcgcttgtttgaggatgtaagtttcgttttcttttgtatttccacagcacaccaagtggtgatttaaaaacgtgacatagttttgctaaccttctatgctctcttattgatctctgggtgaaggtcttgcaaaatggagctggtccggcaaatggtgccactgcttcagaggtttttcaatctttgggtgagttattgaatttcagttttcatcactatcagcgcactgtgcatgattcatgattaaggctacggatttcaattttattttatagcatatgccaacaattataaacaaaggaagatatgaaattggtgataaagaggaatgagttggcttcaaaaggatctactccgttacttttgtccttctgctagtcgttgatctgtattggtataaccatataagacttgcaggatattaccttggcaatctgtttcatatctcatgtgttatgattcttttttcttatatgctcacgttattgtctctcttttccttattctaaatttaaaactgaatcctgagtctgtctattgtttacacaggtggtgggaaaggagggccgggtttatctgtagaagctttagagaaaatgatggaagatccaacagtccagaagatggtttacccgtaactcatcttccctagcacattgtctttaaatgcatccattaagtttatctttaaaactggttgcttagtggacatttggtaacattgcatgtataaatgcagatacttgcctgaggagatgaggaacccagaaactttcaaatgtaagtcttttaatatttaatcctgctatcattcttttattagtcctcatttttacatatttctaaagactaaaggttacatgactagcttttgaatgatgtaattcgtttataggttgatccaatggttatctaaatttaaaatacagtttggtacttattgtctccgcttggaattttgtagggatgcttaaaaatcctcagtaccgtcaacaactacaggacatgttgtaagagctccattttacgaacaatttagttgtttccattgcttttaagaatgtctaaactatgtaattaagaaatactcttgtttgtttcttttcatgaatttaggaataatatgagtgggagtggtgaatgggacaagcgaatgacagatacattgaagaattttgacctgaatagtcctgaagtgaagcaacaattcagtaagacaaatctcagtttgtaccaagttaatagtacgttaaataggtctgatactcaatgattgaatctgtatttgtcagatcaaataggactaactccagaagaagtcatatctaagatcatggagaaccctgatgttgccatggcattccagaatcctagagtccaagcagcgttaatggaagtacgttttcttttaacctgaataagagaattgcttaattttaccccacttctttcttcatacaaaacagaaaccaattacattcttgttgttgttgcagtgctcagagaacccaatgaacatcatgaagtaccaaaacgacaaagaggtaataatactgccacttctccattgcccaaaaaggcgattacttttttaagaaatttgaggttattatacattgattgcaggtaatggatgtgttcaacaagatatcgcagctcttcccaggaatgacgggttgaaaaagctcacgtctttggttctatcaaaaatgtcacattgtctttagctttttgtagggagaaaaaaatgtttttttttttgcaaagagtcttcagttttggtcagatcagagaattgtgtaccatgttaatcttaaacgcggtcgggaattggagtcgtgtgaaaacgccgctgctgttgtttggtatgaatattatacaatagaatttgttgtcttaccaaaaaaagtctatgaagacactgaagagcaaattattatttttaagggaaaatttccaaaataaacttcatgtattcaaaatttgcttgaaaaaacctcaattttttttgtttgagattgtgtgaataaatctgccaatattttgttttagcaatttaaaaaattgaagtttttttctcgcaaattttaaatagttgtgatttattttggaattttaccttatttttaatatccaaaaggagaagtgacgtggcgatatcgaagcggtttaatgaagtgatggccccatcttaaagaaatcaatgacccttatcgttccacttctatcggagtcggagtttttttttgttgttgttgtattccgtacgtcggtcgttgtcgggagaattggcgcgtgaaatccttggctccgtcgaatacgtctgcctccgacggctgtgagtcgcatgattgagtcgtgggtaagtatccttgtgacttcaaatttgtatttccgttctttataatcccctgactcttgagaaaatcgaggagaaaaaaccatccttgcttggtattcatttgaagagtgttttagttataaaatcgtaatgtttgacggtatgtgatattctgtgagcatgattattcagaaagcttttgtctttttagtaaatattgtctctttcttagtcttaggtaatgtaacctcaagaactctatgcgagaacattacacattatctttggaattggatattatattgttaaagtttaatcattgatgaaagttgcaaagagttatgatgactccgttttgggattgtcttaccgttgtctttctggttttaatgcttaggtttctcttgatgaagtctagaagtgaaagtaagaattgtaggcttgcacaagcctctagagtagcagtcaacaaagttctagacaaaagcagcgcccgtggctctcgaggcaagaagaagcaagatgataactgtgattccgctaaggtttgttcttctattcatgcaaacaacattattgttataatgatttcactatgtttaccagggtacttaagatgttagaagcaacgaattctattgattgttttcaaggtttccttgaagattgtgaagtccgtggtactactaaccaattatcaatggctgttaaaaatagtttccttgtcctatgcctaaagattttcttgggacagtggagatttttgtcttatctagtcctatgttgtccgggagtgtaaaattatttaatactcttctatcattgcagcgggataaaggcgtaaacggtaagggaaagcaagcgctcgacgcaagattgattgataacgttctagaggacaggggatgtggtaatgttgatgatgatgaaatgaatgattcagactgggaagactgtccaatccctagtcttgatagtacggttgatgataataatgttgatgacaccagagagctaaccatagaatttgatgatgatgttcctgatgctaagaagcagaagaatgcataccgtgcaacagcagaagacaaggtatactgtgcttaggaaacacaatatgcttacttttgtttattctttaaaatgtggttgctttagagatttgtgctttgtctcaaaggtacgggcggaacttgtccataaggtgcacttgctctgtctgcttgcaagagggaggatagttgacagtgcttgtaatgatcccttgattcaggtgaataaattgaatacaacagtgttagcagttgcttcaaagttaaatttttcatattgcaacctgcgatataaagtttagtttttacatttaacgtgcaggctgccttgctttcacttctaccatcatacttgacaaaagtatcaaatctcgagaaagttactgtcaaggatatagcccctcttcttcgttgggtatggatttactggcatgtagcttttgttttgttctaatggaaaggttaaacaaatgttccctggtttaaattgtaggttcgtgaaaacttttctgttagttgttctcccagttctgagaaatcttttcgtacatccctagcatttgctcttgaatctcgtaaaggcacagcggaagaggtaagcttgggatcagatttatgccattgaaccttttcattatatggttacttgtattgttgaaacctctgtttacgaaacttatggaaacatttttgcagcttgcagcactggctgttgctttgcttagagcattaaagctcacaacccggtatgtgatacttgttatgttgccacaatatagtatttctatttggtttctgagcttggttgtgaatctgttttttactgtgtatcaatgacaccttgtctaaagtggcatatgagaactccattcttgcatgttaatgagtttcctcagtcctatttggctaattatttagatccataacgttcattgacattatgcttttcaagattaatcttggtcagataactatttacggtaccatcgtttctggagtgttacttatttataatacttacagcttagtatgccaagcgtgtttcgagttttttgtaataagttgagttttacaggtttgtgtctattcttgatgttgcatccttaaaacctggggccgataggaatgaatcatcaggtcaaaacagagctaaaatgaagcatgggatattcaggacgtcaacacttatggtaccaaaacagcaggccatctcgtcatacccgaagaaatcttcctcccatgttaagaataaaagtccctttgaaaagcctcagcttgggaatcccctgggctctgatcaggtacaagacaatgcagtcaattcatcttgtgaagcaggaatgtccataaaatctgacggaacaaggaggaaaggagatgttgagttcgagaggcaaatagccatggctttgtctgcaactgcagacaaccaacagagctctcaagtgaacaatacgaagaaagttcgtgaaataacaaaaataagtaatagctcgtcagtttctgaccaagtaatatccacggctttcggttctaagaaagtagattctcccctttgttggcttgaggtgtattgcaatggggaaaacatggatgggaaatgggtccatgtcgatgctgttaatggaatgatagatgcagagcaaaacattgaagcagcagctgccgcatgcaaaaccgttctcagatatgttgttgcatttgctgctggtggagctaaagatgtcactcgcaggttttctattgactgtattacagttactttgttgttggacaattaacatcttctatttttacatatcctttgcttgcaaagtgcaaacagtttccatttctagatacttctttacatctaattccctctgacacttttcttattcaggtactgtacaaagtggcacactatttcatccaaacgggtgtcttcagtgtggtgggatatggtattagcaccgttagtacatctcgagtcaggtgcaactcacgatgaagacattgctctgagaaatttcaatggcctaaatcctgtttctagtagagcttcctcgagtagctcgtcgtttggtataaggagtgctcttgaagatatggagttggctacacgggcgctgactgagtctcttcctactaaccagcaggtaaagtgggtgtaacctgacaaataaatttaaagctcatacttcatttaaacccttcagctaaaaaaatccctttatttaaacttgcaggcttataaaagtcatgaaatatatgctattgagaaatggcttcacaagaaccagatacttcacccaaaaggtccagttctgggattttgctctggtcatccagtatatcctcgaacctgtgtgcagactcttaaaacaaaagaaagatggcttcgtgatgggctacaacttaaggcgaatgaagttccctcaaaggtttccgtgttttattctctccctgatgattatcttagtcgttccccttttttttcggtttgatgatcaactcttgaagtccattattaccttagattcttaagcgaaactcgaagttcaagaaagtaaaagattttgaagatggcgacaacaacattaaaggtggttcttcttgcatggaactatatgggaagtggcaaatggaaccattgtgtctccctcccgctgttaatggaattgtgcccaaggtaaaacaaatgttgttgtatttgtccttgtttatatcgcttctgcagttgcaacttcatcaatactttaaaacaaaacatactttgtagacgggaatagtgtataaatgtataatccttatgtttttttcagaacgagcgcggtcaagttgatgtctggtctgagaaatgtctcccacctggaacagtccacttaaggtttcctcgaatatttgcggttgctaagagattcggtatagattatgcacctgccatggttggtttcgagtacagaagtggaggtgctactcctatttttgaaggtattgtggtctgtaccgagttcaaagacacaatcctcgaggtataatctctttaattttcaatctgaaacagagtaccatgttttgaatatggatccgttggttatatcttgtttttcttgttgttttggttaggcatatgcagaagaacaagaaaagaaagaagaagaggagagaagaagaaatgaggcacaagcagcttcgagatggtatcagcttctttcgtctatcttaacccgtgaaagattgaaaaaccgttacgctaataactctaacgatgtcgaagccaagagtttggaagtgaattcagaaacagtcgttaaggcaaagaatgtgaaagcacctgaaaagcagagagtggctaagagaggagaaaagtcacgagtaagaaagtctcgtaatgaagatgaaagtcatgaacatgtgtttcttgatgaggaagaaacctttgatgaggaaacctctgtgaaaacgaaacgctgcaaatgtggcttctctgtcgaagttgaacaaatgtagttttgacttcgtttactggccctaggagtctagctaggagtttcatttgtttagaaaatgattttacataaaattagggtgatctatctattattccaccgaaaattttgattttaagtcttaaccacagagtttgaccttgtttaaggaactacttaaaacaaagcttgccaagtttgaaggaaaccaaaattgaaaacgaaatcagaatccgacaaaacaaatgaaccctgatccgacagataaatctcaaaccaaaaccttttttatctgaaataatggctttcaaatataaaatcaaagttatattacaaatatttgtcacatgcagattttgaaggtcatggtggcccatttgaacaccacacaacttgaaagaagtataaatatgtacgtatagttacaacacgatttcatcaatgtctcttatcttacttatttaaaatagttattacttgtatatcactggatctctaataaccgcgataagttttgctacccaaggttctccgaatctgcccacaacttaaaaaacaaatatcttacccaattctaaatttgctgttgttaagagaacccaaggaaaagcaaaatatatatatatatatatatatatatatatatatatatatatatggaaattgcttacttagataaggcaccaccatgtcgtgatcgccactattctccaaaaagaaatctcaacaagttttatatcaactcttgaaactgatttgtataagatctcttaattactccatcattgataattggaggccatggatgataaacaatcaagttgctggatacgctcagacatatgccaataatatgacattagctactgtcaaagcaagtcttttatttttccattgtaattatacaaatcttttccctaacttgcatataaaatggtaaaaaaattgattttaatctacagggaggtgggcacacagcagaatatacaccagtggaaattaaagctctatcctgtttcagagatggctagctggccaacttctaaaaaaatgcctctttgcaattcattgataatatatttgcattcttatttgtagaaattctgttgaatctatatagtgtaaacattgttaatggatctaaagataaaataaagagttgggttatggatgtctaaattttttgacctaaatatggatcgaatttggtgtacaagttttaaaccactagctataatggtcaaaacaagataaaatgcttaacgttctaagaagtaattagcgtcacctgaaatttccgacaaaacatccatagtttcccaatgttttgtcattaatgctcatatttgtccctaagatcacattgaactacttgacataatgaatgttgtttggtaaaatcagaaccgggttaaccgattagttctgatccggtttgatttaaaacccttaaaataaccgaaaccccaattaaaaaattcaggtgaattctaaactggttaagaagaattggggaggttttaccacttctctcctcctccttcaagctctcttccacagagattgagaacgaaaactcaagctttgaagcatgaggagatcgatttcttcaaaagcgaagtcgtttcttcatcggaatcttctctattcaggtaattccggaacttctccgtcgtcgtcgtttagcatttgcggtttctgtttctcgagacgagcttattctaatggcagtgattatcgagaaatgttgagaaatgggattcggtttatgaaactagacgattctcttgatctcttctttcacatggttcaatgtcgtcctcttccttcaattgctgatttcagtagattactaagtgctatttccaagatgaagaagtatgatgttgtgatctatctctgggaacagatgcaaatgttagggattccacataatctctgtacttgcaatatcttattgaattgtttctgtagatgttctcagctttctcttgcgttatcgtttcttgggaagatgattaaacttggtcatgagcctagcattgtcacgtttggctcgttgcttaacggtttctgtcgcggtgatagggtttacgatgctttgtatatgtttgatcaaatggtgggaatgggatataagcctaatgttgtgatctacaatacaatcattgatggtctttgcaaaagcaagcaggttgataacgcgttggatcttttaaaccggatggagaaagacgggattggaccggatgtggttacctacaattctcttatatctggactttgtagttcggggaggtggagtgatgctactcgaatggtaagctgtatgaccaagagggagatctaccctgatgtatttactttcaatgcgttgattgatgcttgtgtgaaagaaggaagggtttcagaggctgaagaattttatgaggagatgatccgaagatctttggatcctgatattgttacttatagtttactgatttacgggctttgtatgtacagtcgcctagatgaagcagaggaaatgtttggttttatggttagcaaaggttgctttccagatgttgtaacttatagtattctcattaatggatattgcaagtctaagaaggtagagcatgggatgaaactcttctgcgagatgtctcagagaggagtggttagaaatacagtcacttacacaattcttattcagggttattgtcgagcgggtaagcttaatgttgctgaagaaattttcagacggatggttttttgtggtgtgcatcctaatattatcacttacaacgttttgttacatggtttatgtgataatgggaagatagagaaagcattggtgatattggcagatatgcagaagaatggaatggatgctgatatcgttacgtataatatcatcattcgcgggatgtgtaaggctggtgaggttgcagatgcttgggatatatattgtagtctcaactgccaaggattgatgcctgatatttggacatacactacaatgatgttaggattgtacaagaaaggactacggcgtgaagcagatgcgctgtttagaaaaatgaaagaagatgggattttgccaaatgaatgttacgtatagtgaggcttactaggactaagcacattagcttaagtatctcagggaagcttgcaagatatttatatccgggtcaggctcctacctgtgagatgtttacccctggaagccaattttggaatgagctaattttagtaccatagatattgttaatattagcgcgtaagctgcatagtgtcatagtggattattgacagacattacagtatcgaagcttgaattgtatgtatagccgatttgtctccgagaggatgtttgcccttgaaatgaataactcaggtcctttgaaaccaagttggaattctatgaggagagctgactctatcataagaagccatcttctcaagtgtcatgaataatctcagtattcagtttataattgtccattctttcatacactgtataccaatgtttgtttatgtgttcttcaacaaagtttctgtaacaattttttgtatgttacaaagtttatgtatccttttctcaggtttctttacatgtcactttgaatcaagcttccagaatccagagtgggttgtaaaagaatattaacacttacagcagaagttactgtaaaagcagaagttagaacagctacagagccaacaaatacatgtccacgattgaagcttcatttcatagattgtattattcactttgtctcaagtctggaaaaccatgaatgatgagaatagtagagtggtaaaagatttgaaccatcaccaatgtgtgaatgtattaatagaagccagagacaatacaagcttctctaattctacattgataaagaaacaatacaacagacctaatcaaagcatttcactatatcatcaatgcgcgataaaagcgctatagctccagttttgtacagttttacagccctcttctaacttctgcttcagtttatacagtatcctgtgaagataatgagtacagaaatggatccaagagtttaggtcgtaaatgggttttgaaaaagttacatagtaaattcgaaatgccaagaagagagaacagaaaaagaaagccaaccttgctcgtctgttgtttggtggtctcagccaattgatgtgtcctgcatgcaaagtttaaccgatgaagacaagctactatatgcatacagtttcatgatatgatatataagaatttgacactgtggaataagtgaataagctgaagaggttgttaccacttaccatggtgatgaggattggctgataccgagcccattgcaagtgagtatcattcccttaaatctggcgagatattcctgcgttgaagaatgagttgggatatctcaaatagtcagtcacaacctagatcccatgttgttgttcaaatgtaaagcaacttggtttgtaaatctcaaaagaagtgttacatacccgtaaagtgtatttgtggatctcatatataccagtgaaatcatactcaaaacgtttagcagggtccatcagcactgccaaaaagaaagaagaagctaaatcacataacgaaaacaattgattcgagacattgcttgagggagaaagagagacagagagcattgatctaaaatatttgcaagtgtcgatggaaaacataagagatcctcataatcaaacagaacttcgtattaaaagtcattcagtaaaggatctagagatgagaaataagtaaacagagaggcaaagatgaaaaggatctagagatgagaaataagtaaacagagaggcaaagatgaagagggaacctaaaattatcagaggcttgaaaccatatagaggtgtatcaatacttaagcagagctaatgaactataaggctgaaggaactaaatggaaaagtagaaggctttaagtgactcattgttaaacttagtttcttttcttcatgaattattctttctcgaccaatgaagaaaatcaaatatcatgtcagtaacatggtattgatgttccgatagaaaccgacaatgcaaaagaaagacttaccattataagcttcattaatctcttgaaatttttctgtagctgcactatcgcctttgtgcttatcaggatgccacttctgtagatggaaaccacaaattaaattctcagtaacaagatttaatccaaagcaacaccagatttttaatggagaagggtcttttgagttcacataccaatgcaagcttccgataattgagtctgatcaattcctcagttgcgtcgtaatcaacttctagaatcttatagtaatccttcaaacaaacaaacaaacaaaaacttacaaatcaaaaatcaaatgggcatttgtgaaaatgtaaagagaacatgcaaacataatcattttccagaatttttcaaagtaaccctttcttctactagagaatccataagagtaatactatacgaaactgtatcaaatcaccatattccagtcaaacaaaaaccagacattatctaataaaccaaatttcaatggagctcacgcatttttccaggcaaaattgaaacgaaagaccggtgatttttagttaccttagggggagacttatcattgtcttccatctgaaacagacacaaacagaggaagaatctcctcacacatcatctgatagagaccaaacagaaacccaaaaccctaaactgaaaggagctgattctttttccgttcagcaacgaaatcaaaatccaaacttttagagaaaaaatgaaaactttgaatcgaatcgtgtggattgcttttcctcagcagtatttttgtgtttgggaataatcggaagaaaagaagaagaagaaaggctttggctttatgagttttcgttttcggttccttttgggatattgtgacgaggccaccggccattgtttatctctcttgtcttttttttttttacggattatttcaaaccttatccactttgtaataaatataaaatttccactgaaaacaaataatttacgttacaatatattactaagagaacaaagattttttcgaattaaattgaaccaaattcacactaaaaccaaaagacgtatacatttcactttgcaagagttctttctactaaggactgagcacaaaggcaaaccagaaagaaaagaaccaaatcaaacatataagtaatggttttttaactctagtttacaaatgaaacacagaagaagaaagctgtttgtttcttccttcaagtcgtagcttcaacctctgggtcagtttcgaccggtacatttagggaagaagtgttcttttctcgacctcgtaaacgcgaagagacattgtctatcgctgaattaagttgtcctattttctcattcagtgtctctcttgttttctctaaaccttcatcgtagtacgttggctgtttcggcttctcaaaaccgtactcgtcttcttcatttagaaccgatcttcggatc

SEQ ID NO: 714 - DNA, 75188 bp, Arabidopsis thaliana
gatctccagctatcttgtcactgtcattcttcaagttctcccatacttgttccatggaaacacttaaatctctacctgggataacttcaccctctgaacctgcatattacaacaaaattcattacagaccaaccaatttatttgattgaagcaataaaagaaaaggtaaggcattgtgtctaaccagttagattcttctcctgtgcagatactttctgttctgtatcttcattcttggcaggtttattatccacagtttctttagtcttcaaactcagatcggccatacatttctctaacagcctggttgatctcctagtgctgtagaccgactggaccaattcatccttcttagtgcaagaagttgctgctgaagttttccttgtgcttcctgctgctggagttttgagcacattggcttcaaacttgacattgctagtcttcatttcttgagcaacattcttgtttatgttttcctggtccatatctccagcaagagacttgctcgtcgaacgacaagaacgggacaccaactgagatgatggctgaggctcagcttttgttgtggtcttccgtcgagttgttctagttgcagtgcttggtggcagctttgctacactggttggagaatgcggagcactggattcagattgattcatgtattcatcaagaccatcaacctatacaatttgacagaaacaaaacattgcgattaattattgatgcaagttaaccaagtaattcagaatctaggagccaccaattatggagtctcggtgcgtttaacgaaaccacgagcaatgactcaagatcaaacacagataactcaagatcaaacacagataactcaagagcaaaaaccacgactccaacttgagaaaaatgatctaaacaagttcaatttctaaaccaccatgctaagactaatcatcaacagaggtggagttaatcgacgaataaggcagtgatgacctaacaagaaaacattgagatccagaaatatccaaaagtaccaaaacgatatctcgctcttgattgatttgacaaatttccgtagattatataacaaatcaagcagcgatcgaccagaacaacaaatctgagatcgaaaattttcaaagcaaaaacgattctcaatcttgctcaattccacagatcttcgtcactaaacgagcaagcacgattactatccgattcatataaatgtatccataaacaactacagatccaggatgcgagtgtgagcgatttccaaaattgttcagattcagaatgaaatcgagcgaacagatgaagaaaacttacaatctcaagagatttgagagcatcagccatggcgatattggtcatattagctgggattttgttcctcttgcagagaaattgaagatcccttctcaaaaggctgtggaaatccatttccgcgaaatcgagagagagtgagagaattttctggttgggagagaaattgagattggcagagaaaacaagatgttttttgctatgagtgtaaagatgagagcaaatagggtatttatatctcgtttccaagggaagccattgaatccctaagattgcaagtgtgaccgttgttggagcggagcttttaaattttgaattttttgggaaattaatattttaattagtttctcttacactctccaccttgtcatgtatctgccaaaaaaaggaagaaatattccgaaaaaggacaccggaataagaaaattacagtatttcaagagcattttaggaatttttaattcaaatcataggattttaatagtgtttttataaagttatgggccatatttgagtaaacataaaagtatagttatgggccatataaacaatacagcccagataaggtgttatgggccatacgttgtgtagggagtaatcacattgcaatataacttgtttagtattatgatcgaaagttcaatttattatttatcctacctttctctttattagtttagttaatatatgaaccagaagtaatttttcaaactgcaacaagtgatacattcacacatcataacaccaaaagttagttcgtttcgaaacattgcataacagttttacttcaaattttatttggaaaacacaaataaaaggaagagtttgtttgctacgaatggtgagtcttgtccaaatcttcgagacttgttggacggaaccaggctttctcctccatcactgagtcctcctgaccgccgcgaaattcgtcctttgcgttggtcgaggaggaggaaggtccaaagacaccggtttggggatgaggagaccaatatttgtcagagtcaggctttatcatttcatcaggcacttgactcggttgcaattcttcctcgacgttcttatcatacgcagacgtgtgatcattcctgttcaagaagagaacaaatttgtttctagcaataatattggtgaatgagtgaatctaagtgtttgagattaaaatttggaactcgttaggtgagatattgatcgactgtactaaccgtatgaataaaacaagaaaaatggttagaagataagataaccccacaagaacaactacatcttttatcacttaccaaccctagcaggtttatcttcaattccgatagtcaaaacatcccatatctttaaaaagagaatggtatcagaaatctatggctattgagatctctatccactaacatattcttacatgttgtcggtccatttatttatatttgattttataaataatttctacatgaacacaaaactctagattttagttttactaattaaatagacatctgtattcgtctagattcagaatgtgaagtgaagaaggtacatcttgtttacaaggtcaagatgattacttttgaaacaaaaatatacatggaccatgccaccatggcctcttcaaccaagaagattaaatcatatatataatagcagagttttctctcctctaaaagtgtccacgtcactacatctttttaatgtggagcccacatgtttttactcgccttcacatttttttctatacgtgaaatagatttagtgatgtttatggggccacgatttggtcaaaaagcccatgagccaaagaaccaaatagacttagtgatgtgtatcgggccaagatttagtaaaaaacctatgaaccgaaaggacctaagaaaacccagttaaaactgcaaacccttgatttcattttctcctattcgatcgacgcaattcagaggacgacgaaagagaaaaagagtgtttcagtcactgccctgttgatgaacgaatttcaacaaagtatatttgtaagttctttgataagggaaaaacattctcatcgcgttgaaggtcgggagttaggtcgttcttgcgataaacataagagtttattagttttatagctgcaccttgtaaaaggttgtctacgtacccttagaaaagggatcaagccatacgtagttcatattataataagtgagctaggtcatcgttggaggtaggtcgtatattgagataggcagtttagagatgaggtggcaggttggtgacgagctggcagctaggcgacgagctagcagatgtgtgacgagctggcaggtaggcgaagagctggacgaacttagttacgaggcgaactggttgatagacaacgagttagacgaactgagtatttgagtgacgagctggtagccaggggccaagctagacgaaatgtagtagagagacgagtcggacaaatcgagttctggtgaaagtctagacgagctggcagacgagataggcggactgtgtagtcaatggacgaactggcagctaggcgaggagatagatgagttgtgcacttgagggacgagctgacgactaggtgagaattggacgagctgacagctaggcgaggagatggtcgttgagtgatgtagagcttgaagacgagctgaagaacttaaagacgagctggatagcttaaagacgagctgaggagcttgaggagctcgaggacgagctgaggagctttaggacaagctgaaaagcttgaggacgagcagaggagcttgagaacgagctgagcttaaggacgagctgaggagcttgaggacgagctgataagcttgaggacgagcagaggagctagagaacgagctgaggagcttgaagacgttttaatatggatttcttcctccttttttccttgagatgcctctctatttatagaaaaactaagctggtgataggataatggaccaacttttatgggctttttgggcttgatgttgattagtttattcttgatttgggccgagctaaaatgaggggtgcaatccatcccccaacatgccccatggagctttctgtatttttcttccccagaagctcaaacatcaacagttattcactaaaaggtacttaaatacatggcttaattcctacaaaattctactacttgcaattaaattcatactttaaatatctcaaatcgaaactgtaactggagaaaagcaaaaacctcctatagatcttcctttaaactactataaaatcatcatctcctatactaggtacatcaggaaacgatgaacgcgtgttcaaaacccttaatcttgctccgttggtgaagaaaccgttatcatgccgcaaacaccttcttattatgaagaaacgtcttgccaacaacaacccggatgctcactacataaaaggtataatatggtactttaaccttgatcattgtgacgttggtctccaccatattggcatagcagctaacggaggccaaaaagaagcaatctacatgtatgtcatgctattattatgtagaggaaggactgaagagggaaaaacctatatgagccaatttgaatgggctaaagacaccaccatggctgaaacgtgttggaaacaaatcaaaacttcactaaatgggattagagtggcgagaaaaagatgctacatgatatcacttcgcaacatgaaaccccccgacgtgtgccatccaagagatttggacaacacatgtgagaaatgttttttctacaaacaaatgtttaagtttatttttatggtataacttaaacaaaacatctagagagttggaaactgtttttaaaaaatttcctataatgtttgaggcagtgaactatcacaaaaactcaaaacaaagttattactcttatttcttttgctttaatgtgtgtctttccttgctgttgtaaggaaatttatttttacaataaaatcaaacttttaattaattatctaagcatatcgtactttcaatgttaatattgttataatccaactctttttggctaattcgcgaagagacgttgaaaagtaaaatcttcccaaaaccaaagagtagtttctaagattttaacagagacacaaagagaaaaaacaaatgggcgggttcatattgggccaaaattaacaatggcaacgatgtgtaaaataacttcgtcgttagtctctgtttttcgctatcctctgcagcaaccgcttaatgcgaaacagagagagatttccattgtatttttaatttaaaataaaatatataaaaacaagaccaatgtaacaaatgcattgcttagatatatataactctaaaaaatattcttacaagatagtaagtttggtctattgtcctataaattctagcatataactggtaacaacatgaaaaaaaaatgtaaaactatacatagattacaaaaatgtaaaaattaaaagataagattagcaaataacaaagatattccccttttaatcaaagatcagtaaaaaaaatcgaagttataattacatactaacaaaaccaaaaacaaaccacctcgcgcaacgcgcgggtctcctccctagtgactttaattagtgccatgaaatatgtttttaggaagttgcatggtccatgcatatttaatttgtaaattaattcataagatccggtctttcgcacgatcgacacaacactaaaaaaatatgatggaatcgcagagataattacacttcatttttttcatgttagagaaagaaagaaagaaaatgaggacctctccaagatgtatttttctcacttgaccctctccaagattaagggaataatctgtataaagacacgtgtcattccttgatggacgattgggtttgaacctttttggtattatcctctcttacgcccaattggatatgccatataatatgcatagttccttttggattttataagaaaacctttgtttaaaaaaaaaaaaaaaatttatatgtatttctttgtaaatgttggatcatatgcaaatgttggatatgatcatttcagttaaagtctccaaaaccacaccattgtctaggcagtaaaaaaaaaaaggggacacaattgtgaaagtttttgaacacttatttcagtcgaagcaagtttgagtttagatgtgggaccaataacataggtaaaagatcaacatctcgtctagaacactatgacctagccaaactatatcacgaaatttacatatgtccaaatttatatttctccttcccctttattatcatcgataacgtaaactatcaaaagcagaaaaatagagagacagagagaaaaaggaaagagctaccgagacgtgaagagaccatatgcgacggcgcgtgaacgaacgccgttgactatgtgcctcccgaccacctgaatgttcttcgatttggctgccattaactctatttctgtacacaatattgagggagagaagagtgagagagagttgtttaggatgagtattattaatggtgaattcagtagttgagagttgagtgtgagtttttataataataatattagtgtggaagagaagagatgggaggatacacaccaatacgattcgtgtgttgtggtgctccgttacacaacgatacacaacgggaataatttatattttaaagttagtatatataaaattttgtaaattatatttatttataaaatattttattttatagtttacaattgttattaagtaacgtcctgtcaaacccgtcccgccaaacccgtcccgtaaaaaaactattattttattaatattaatcttatttatgatatgtttatgaattattgtctaaatattttagttgatgtgggacgtacaactcacacattttcgtcaattggttaatatatgctcattttttaaatttcgagtcacaaaatatgacggaaagaattgagattttttaaactctatatattatataatgatgttaaaaaattatgatatattaaactttttataagtttaaatattaataatgttttataaagtttaaatatataaataataatatttaaaaagattatattttgagccttttaggtaatgacataataactctaaaagcaaggatttaaaagatttaaatatttaattaaatatttttattcctaaataaataatatcagtgtcatgacattgtaaataggttcaaatacatgatttatttatttaaacaaaaaacgtttagtaagaataatatttgttttaacaaaatactttgttttaaaatattgttaacaaatatgtttatgctaattttaagggattgatttgaagtttgtttggattaaatttgattgataatgtggttgacaatttaaatcaagaatttaaagtaaaattaattattttggagaaaagatttaatgctaatggcattgaattataaataagtccaaatccaagatttatttgttaaaatgactgcaaaaatgtatatttagattattccccaccaatgaaacgccaccgttttgcgtctgaaggctatgtattttgtacagtatggacatggacctgtaacgggctcttcagaaggaagcccatcttctaaaactaaaggatgtaaatttgtgtcattaatttcccactaataactcatttatctccgattatctaacgcacacatcacactacttctcttccactaacatttttttttttacgtaacatattaatgttcatgagaagattcatggaacaaaacataatttaatcaagaaatttgaaaaataataaattaggatatagaaatgatttgtgattgttatttgaggaagatgagaagagtgtggatagtgaagaaagaaaaaaaagagaagagtgtggacagagtggaccgtgcataacacacgaaaatgttacgattaccacgaaaaggttatctctttggagctttgacacgggcctcctcaaacaaaaacaaaaaaacctagcttctctcacaaaacgcatgcaacaacatcgaaattaagaatcaatcaaagcttcttcgttcgatcacactagaaagaaagatggcaacgtctggtgcgatttcaggagctactgtctcttccttcttcaccaaaactactactacttcaaacccatctcccaaactccattcctctgcttctcttttatcacaggtctatatcttctcttcgatgtctttacaaacgaatctgaaattctcgttttcttcctcttgaatgtgatttggacttagcttcatctaaaagtatgtatatttttttctcttgttttggtttgtgtgtttagaaaactgtgtttcaaggagtttcgttggaagattcgaagaagagtgtatcagagatcttcgctgtctccgagagaaagatcggagggttaaatgggttgagaagattcgaaatcaaagcgagagcagcagcttctaagacaatagaggttgaagtagataagcctttgggtctgactctaggacagaagcaaggcggtggagttgtcatcaccgtgagttattttgaactaagtctctgcaatggaatggtatctttgtaaatttgttgtttgataaaattgaggggtttgtttttggttttcagggtgtggacggaggagggaacgcagcaaaagcagggcttaaatctggagatcaagttgtgtacacaagcagtttctttggagatgagctttggcctgcagataagcttggctttactaaaactgcaattcaggcaaaacctgattctgtctactttgttgttagcaggtgagtttgagtgtggttgtgattgcctctcttgtttttattttggtattatcttgctagaaatgtgggttctgctttttgaaataaggattagattgaaatgatcaaatttgtcgcaaatatgtttcctttgaatcctgtgcacaagaaacctgtgaaaagctgtagtcttgattaagtattccatggtctgatgctatagttgataagtcttcttgaggtgcaatgtgtaggtttagttctcttcttatgctatgtcattagattttcgcaatgcttagcttaacaagctgcataagttagcacctcaggttattcattaagctttttgaggttctttattagtttctgatgcaatttatgatctttgatcaaacacagaggtgcagaagttgatgttaagaaactaaataagcgtccggctcctccacggtttggaaggaagttaactgagactcagaaggctagtagcaatctgttgtttcaaagattgaattattgcatttaaaacccctttttagaaacttgactgattgatttgtcttgacaccattacattctcgtttgcaggcaagagctactcacatttgtcttgattgtggattcatatacactttacccaaatcttttgacgaacaggtgagtctcaatcctttaattttagtttatatacaagtttgattttggctgcatatatgtttctgatttttataactaagttttgtattgttttctcggggttcttttacagccggatacatacgtatgtcctcaatgtatagcaccaaagaagaggtttgcaaagtatgacgtgaacacaggaaaggccataggaggaggattgcctccaattggtgtcattgttggcttattggccggtcttggagctgttggagctttgcttgtctatggtcttcaataaatttttcttaaaacttttataatctctataaaacaagtccgctttgtaattgcaaaccaagaatgaatgttgatgacatcaacttgagagttaaattatgtaaagcatttttcgattctctccttcttatgtaactcttgttttctctgtaatcaaactagtgcagcagcaagagttaaaaacagagtaaggtacttgcaaaccatatatcaaacacaattacattaattttttaccaaattgtattttttttttaagagaactaattttaattttttttttttttggtttaatgttaaacaattttaatttattttgttgatagataaactttctaccaattctaattatatttataaaccatttaccaaaaaaaattatatatatttataaaccttccacaatctttgaagtcacacaagtgaattcaaagagtataatcatcaacaacaaacaaacgatggctaacgcaaaagacgtgaaagacttcaaagaaacttttcagagatttgatcaatatgtaaacggagagattccatggagggaatttgacatgactggcgtacgcaaacgttctactccaatgaccaagtctgaaatcgacacaatatttgtagagcttggaactcgtggtgaagatagagtctttagagattccaagttttccggtaatcctcttcaagcttctgtctctcttaaacataagcctaaagatgtgattaatgtggtgcaaaaagagtcttgtctatataattctgacaatgatgaaaagaaaacagagaatcaacttcaaattccaaagaaggtctctcgaaagtatagtgaacgatgataaagattttgagttttgttaggtgcaagttcttttagttttggtgttaatcaagtttttaataatgactttgatagaacttttttctttctttgtgttaacaactttaatggagcttttgtcgttttaatatatctttatgttattatcttactaaaccataaagatttttattttatttacgaacgttaaatcagggaacaagattaggttctagaatatacttgatgacgcattacaatatgaatttgggaaaatcaattttgttgggctgatgacaaaaaaaaagttgggttgaaataggcccattaagaaacctcgacgtgcgagacgcgtacaccacacaagcgccacgtgcttaaccctccgtacatcttcttctaccttttgtaccaaataatcaacaaaggcaaagaaaaagatctaaaacttgttcactaagaaaaaatcaaaatcaaatcagagcaccaaaaccgactcagatctagatcggatttctccaatggctctcgaatgggttgtgttaggttacgcagcagcagctgaagcgatcatggtgattctcttgacgatgcctggacttgacgctctccgcaaaggattagtcgctgtaactcgtaatctcttgaaaccgtttctctcgataatcccgttttgtctcttccttcttatggatatttactggaagtatgagactcgaccttcttgcgatggtgattcgtgtactccttctgagcatcttcgtcaccagaaatcgatcatgaagtctcagcgtaacgcgcttctgattgcgtcggctcttgttttctactggattttgtactctgtcacgaatttggttgtgaggattgagcagcttaatcagagggttgagaggctcaagaacaaggattaagtaagatccagctgcttcgtccctcgtcttcctcaggtcctttagtgttttcgagttgtttgaatttcgatgaaagagtctctttactacttgtgccgttttaggttttttctgcgtttgttttccgatgtttgctctttgttgaactggggattgaaggatctataatacttaaaatatatgcttcttatgccttgttcaatgcttgtttgattatctgatctgttgcacgtttggattttgattgataaacttgcaataaaacttcaaacttggagccttgtttgattgtgttctaatatgttggtttgataatcatgaaccaatcattgttcttttgtcaatgattcaatcaacttaaggactccagttatggatttgattagtacctctttttcagttttcagttcttgatagagtaatgtagctaatttacactagctgctccatggttcttaatgaacatctttcccaatctctctgttacacagtcaaagagcgtttgaacctttctattcttctccataatctcattttttgcagaggttaaaatcccaactttgttttgattcaaagcaacctcagagtttcagtctttcttagatgatatgaccccaaaacccaattttctgcaggatttattgcaatagtaaaagtaacaaactgaaacatttattcagccaataataagaacaaattagacgttttctactttaaaaaaaaaactcgaggaaaaacggttctcttctaagaaaaaaattgagaagactccattttctttcttggttcttgaaggaaaggatttcacaagaaaggcatacttaatgtttcagacaatccacttttgaagcaaataaagacccatgagcatttttgcaggaagaaaacaacttgtgaccaaatgtcgctgaaaccatattcacattgtccatcactatatctgagcatcccaagtctgcatcgcagttcaatgtaatgtcttgatcgcttgcagatgacccacggattctagcgtaacgcacgtcagtcactttcacgcctttcccattaccagacggagtccgttgttttgctgttaaatgacagttctgatagctactagatgacttgcttattcctccgttcgtacctccattgtggtaagtctggtctatgataatagggttctctgaggcaaccatgttgatatcctcgaatgagattttccgagcatatcccgatccgttctacaaaacattcacgccaacaaaaaaaaacagatttagtttgtgaaaatgctgaataagaccaagaactaatgatgtataataaaaaaagaagattaatggacaacctggtatgtcttgattcggacaccgttctgtgtttttgtaaaagtgcagttctttaccctcacttcttcaacagtttcgaaatctccagttactccaagacttcctacgctataatatcaaatccatactataaatgatttagcatgtaccttgctgtatattatatgatgattgtttgtgaatctgtgattttaggaatcacctgataccgtgaccggggccacaaaaaatgccggttatgttgatatgagaggaaccgctattaatggcgatgcagtcatctccagtggcaatcactgagtcatgtatgtggactcctatacagttcgatatgtcaataccatccgtgtttggactatcaccgggtgctgtcatccttaaacccctgacctcgatgttctgtgaacaacttagacctacatggttccgagggctgttcaaatgtcggagattagatatcctaagaccattacagttgttgaagtgcattgcctaagaaaagcaaggaagaaaaagaaacatcattaataactgagaataaatatttgatcgaagttcatatttatggttgtgaggatcttgcaaatggacttacgcaggggcgattattaacgttgccccaccacaaagaaccacgaccgtcgatggtaccacctccggtgacaacaagaccattgatactgtcaaaactaatccatgttgtgtatcttcccgcataccaagtgtaacccggtgccacaagattacctcttatctaatgtaaataaatcaccaaattatttaaacattggttcgagttattgtctactcataagctaaaatcgatcactattgaaatcattcacattagggctggattttccaatataatttgaaacaagagaaagagacaagtatatatataccgataaggagatggtcgaagacttgcatggaccgatgaatgtaagaggcttaagcatgaaggttttcccttgaggcacaagaatctttctattgtgtcctcctttgcatacagcttcccatgctttaagaaaagcctgaaatatattgatacacataacacatacattaaaacaaaggttatacataccactttgatacaaatagtgatgattctataaataaacaccttagtatcatcagtctttccatcgccaatagctccgaaactagtgacacttatgaatccattgcttccaaatccgtttttaacctttagagattcttcttctaagcagaaacataatttgtttatttgaaacaaacataacaagacaaagaacaacgaagatttcatttttggacgactcatatgcttgacgatgagaacgaatttcgatgataatacgttttctatctatatatatctctaaatgtatatataggtttgtataaagaaaggtggttaattgaaagatattgcgtttgattttgtgtttctatggtaagagattatcgctaatcactaattttgtgtgctataacatggaaactaataatggactataattgagatattgaaatctttataactatggaatattcaaacttattgacgtatttaacaaatcgcaaacgatatatttttataccgttttgtttagcgataagagtgaaagtttacttatatgcttgattctttctattgcttacatgcttgattctaggaatgaattaattatggcttatctaaagatagaaaatagattcatcattaacttatgtcataagagagaaagagagacctatgattgaatcatttatatgatgaatatatccaaggcggcactaatcttttttgattcacaagaatctttagattgattaaaccaaaatgtaaatatgacgaaacctcataagaattttatcaaatataagtccatctaatttctttaattagataaatagtaaatttgaaatgaataaagataaataattcatggacgaataaaatacaaatgatagaacaaaattctcattttcattctttatatttttggtcaagaatattgtcattctattcatttttgaattatagtaagaaacagataaaatgtgttcgtcttataaatgatgaaactcttaaataaaataaaatctatgtaaccaataagctattcttatttagttaaatggaggaaactttaaatagattaattttctctaaataatttctttgcatacctcagtagcaaaccggtccggtcggatctgaattgaacaaatcaaaccaaaatcagaaaccaaaccaaaacagagaaaatacattttattgaaacttgaaagtaccattacgcgtggatctatgtaataaggaggagagagtagagtactttgccgactaaaagtgagtgcggtgtttaatgggtttgtcaccaactttccattttcttaccaacgaagaagaagcagaaaaaaagtaaacaaagactaaaaaaaaaaagccagcatcttcggagttggtgggagagagacagagatggagaggagaaagattgtgatgtgtggtgttttatttcttcttggtttattatcagctgttactgccttcgtcgctgaagctactcgaatcaaggtttcttcttcagcactttttagggtttctgttttttagtgaaatttgtggtttttctcatgatctttgggttattacagccacaatggtttgttgaaactctatctaaaggatttttgggttttgtctgcgtttctttttatgtgtcgattttgaaattcattgcctgaaaatgcgtttgagatgaaagcttcaatctttgagatgggagttgaataataattggtgggaaactcgttggtttgggaatttttcaatgaaacagtaatggtccccattcacggtggtttttgtatagaagaacttgttgatttcaaatttggaagatctttgagaagtttaatagtaattttttttgtagagagactgtgtggtaaagagttgttttctggtgtgttttggtaattgcatatgtattgatatgtttaatgtcagattccaattcaactaagtctcattcacaagcttttcacaattcacatatgtgtttttggatttattgaaccaaagttatagcctttcttaatggggtttatgtattggtcgattcggttgaatcatcttttttagaatcaattagtcatatagaatttgcagggtatgtagaatcagttttattctcttgaactactctgtctattaagaaactttcttggtgtgtatttgtgcaatgtttcaaactttttctgaaggttttgtttttcatttttatcttaaaatcgatgcagagatctcaggtcacggttaccgtttcggattcaatcacaaaatgcacttatccaagaagtccagctttcaatctcggcttcacttcagctctctttctgatgatggctcagataatagtcagtgtctcaagcggttgtttctgttgtagaaaaggtcctgctccttcaaggtctaattggattatctccttaatctgctttgttgtttcctggtaattctcatcatttctaatccttttcttgcttcaagtttcctacttataatttgcttacaactagtgagtgagtgatttcgcgttactataggttcacttttgtaatagctttcctcgtgctgctttctggagctgcactcaacgatgaacacaccgaggaatcaatgaatgctggtacctacttttgctacatagtgaaaccaggcgttttctctaccggtgctgtgctttcgcttgttactattgcccttgggattgtctactatttatgtttgacttcaaataagcaaattgttgctgccacaacgacccaaggaacaggaatagcaatggggcagcctcagattccagagagagtagaagatcctgtttttgttcatgaggatacttacatgagaagacagttcacttaaaaacagacaaagcttgcttgtaaagcacgttaggtttagtagaagatttagacaaaatgattaacggatatgtgtttgattaagagtattgaaactttgtaatgattgttattcttgattgaagtagaaatctttgagaaccccaaaaacgtcacttagttttgtagtttttttctctgaatctttcttatttattatgcaagtcaaaagtggttgttgggaagagaagtgttcgtctcatttacaacaaaaattcgatagcgatatatagtaatcgaaattttattcccaaacaagggaactttgttattgatagttggaactaaaagtttgtagagaaatttcaatgatacatatccaccgttagaggaacaaccaccacatgttctacccaaccctcacaacaaccagtttcttcaaatcttgagtctaataaaatgccaacacatctactctcatttcttctcatttataaaccagtttgatagacaagatattaataagtgcatatagtaaaatctttcttattcgtaacaaagttattgtaaacttatagaatggttgtgaaactatatggacaggtaacagcagcttgtccacaaagagtcttgctttgttttctcgagaaaggaattgaatttgagattattcatatcgatcttgatacatttgagcaaaaaaaaccagaacatcttcttcgtcaggtaaaaaaaacaaatttcttaaacttaaaacataaatatattataattattgttttcatgtgtagccatttggtcaagttccagccatagaagatggagatttcaagctttttggtaacatcctaataacaacattttataaacattcttctatcattttctttatagtgttttgaaatttggctctttatcttctaagaatcacgagccatcgcgagatactacgctaccaagttcgcggaccaaggcacgaaccttttgggcaagtctctagagcaccgagccatcgtggaccagtgggctgacgtggagacctattacttcaacgttctggcccaacccctcgtgattaacctaatcatcaagcctaggttaggcgagaaatgtgacgtcgttttggtcgaggatctcaaagtgaagctaggagtggtcttggacatatacaataaccggctttcttcgaaccggtttttggctggtgaagaattcactatggctgatttgacgcacatgccggcgatggggtacttgatgagtataaccgatataaaccagatggttaaggctcggggtagttttaaccggtggtgggaagagatttcggatagaccgtcttggaagaagcttatggtgctggctggtcactgaattagctccaatttatgatgatctgaagaaccaaataagctttatagtttctgttttatgtttgtgttgttttgtacgtttcagtaataaattcaatatacttttaagattcatgtcaatgctaagaccatagttctctattcttaagtttttactctatttttgagtgagatataaaatggggttaaaatagaagtggagtttttacatagtatacaaggttactcacttgtactattattcgaatataagaagaacttctttctgtatgtatatcacaagattatttcatcaaccaaaaattgtatatcccctcattaggccaagagaactataactaaaataaaattaaaaaaaaaaatacttttttacattcagaaagataatgtaacattataagaatttgcttccccattaatatgtatatattagttaacataataaattcgagcctaagttttttcttaatcacaaaaagcgctcttaggttgtttttgttccactttcctctcgctctcatatcgatagtcttgaacttgaagtctttagtactgatttagcataagccaatggcaaagctgcaattttcttgactttccccacataagctctcttagtaaaattgttgtaatcattcgcttcaatctcgtccagtattctcctgtacaatagcaatgaagcccatacctgaaacattgcagccaagtcctcggggttaaaatcgatccaaaagaaataagtaaacggtaaacttgcggctgaagagtgttttagagacacttacaggccatctgctagcggcactgagctcggtgacgcctttctcagcttcgtcgaagaacattcttgctcgtttaagctgcattttcatgaagtttctccatttatcagttacttttccggcgaatatgtcttcatctgaaagaccagcctgagccaattcatcctgaggcagataaacccttcctcttctcgcactgatagtgagaacaaaaccaatttaagagagatatgtgaatcaagaaaccggtttaaaagaagcatgtgaaatcaagaaaccggtttaagtgagatatgtgaaatcaagaaaccaaagctctatttaaaatatataaaaagactcactcttcgcctacgtctctgagtatgttagtaagctgattggctataccaagggccaaggcagcgttgtaaacactttcggttgttgctttcgacttaggatcgattcccataaccggaacgctcatcaatccgacggttccagcgacgtagtagcagtaaaggtatagatcatcgaagttctggtatctcgatttcttcaagtccattctcattccttcgatcatgtctcgaaatggctgcaacataaataaacattagaccaaagttttataaggtttattgcaatggactgaatgcaactcttaactcatgtaatgaaatgaggaagtaagataagacagagcaaggctgacctgaatatcgaccgggtatctagcaactgtatcagcgagagcagcatcaagcatatcgaaaggacgaccacggaaaagatcttctaaccttgcttcccatctatctaaagccatgggagttatatgtgaagcatttggcccatccacaagttcatcagttcttctacaccaaactgcacaaaagacagagtaaaactatcaaattcaaaccaatcaaacatataagaaaacaactttaaaattccccatatgctttggatactagtatgtcctagacagggggtcattagagtaaaatctccagagtttaagaccattgggccaaaaaagcccattaaaaacccatattagtaacttttttttttttggacaaacccatattagtaactaagctagtctttttgggtctttattctttatcttcaaagggtgcaaatttggatgcttggtgttcatggacttatcttagacacaaggtaaccacacaaactaactagagacctatctttctacatgagtgtaagattcaaggaatctatttcagcttcaacttctcttgttaagacaacttaactagatactaaccaagagccacaatagattgtttgtagaaatctactttgagcatcactttatcctacaattataatcaatgttgacaatgcaaatattctaaaacagctcttcaaccattggttttgtgcagtaacttaccgtagattgcccaaatcgcctttcgcctttcgggtgtcataagcaaagttcctgcaacacaaacattagaactcagaacaccactctacattacaccaaagccaaagaagagttaaaaagatccataccaagataaaacgtcttagcatattcagcgcaaacttcaccgcatcgatcataagcttcacccaacaaactcaaactcccaggaagaacaacatcttgtggtttcttcacatcaaggtcataagaagaagaccttagctgtttgttcaccaaagcagcttgtttcaacacaacattgtaaaccttctcttcagatgaaagagctatctctccagaaggacttgctactaagcttgaagacacaacaccaattcttctacttcggttccttacaaaagaagaactccaagttggtatctgcttcttcttacctttgtttagtctctgattctgacaaggagagaacagtctagaagattctagaacccttaccaacccacaattgttcattgggtctggatttagagaagaagtagcaacccataacactgctacagaagaagacatactcaagttcttgagcgcgtgagagaaaaatctcaacttttttagttttcttctgttgactctgtttcttctacagttagaagaatcaaactcccaactttttttcagtgaaacccagaattggatcaaactggtaaaagactaaagctttcctgcaaattgaatacaaaaacaagtagattaggaatcgagatctctaaatctgtatataaagccaaatttaagcgagatgagaaactcaatttcttcaagcaagtaaaatagcgaagagacacaaacataaagaggaagatcttcaaaagcaaatgaagaacatgaaaagagaaaaaacaagtaaatcctctaatcgtattggctaaatactcaactgggttcaactattttccactcgaaaacaaattagattatgtatcgttgtgttacatcaacattaggtataagagcccaaaagtatcaaaacagtgaaccacatggcagatgaagcttaaccaaacgagcgaaaatgagtgatggacacaaaagcctacctttctctctgtaagaacaatagatactgcgacaaaactttgaagaagaaggagaaggaggaggagattgtcaaacactaaattaatcaaaaggaagagcaaaaggtttgacccattaatgtgagaagatcctcaagaagttatattgcaacgcttactgtaatatatgtacacagacaacacaagtagatgatgctgtctcttcctctatcgtaaaaaattctcacccactcaaattttcttccttctttgtcttttttttttttttttgctgggttttaatgagaatcttgccagtataaatacaaaagtcgttatttttattttttgggtctatatagttttttaatttagtttttgactggcgagatgcgactctcgagtgactcgtgtcttaaatcaaaccttaatagttttcaaataaaggtaactatcccaatattaaaacccattacctatttaacatgttttctcttctttttcttggccaaatttatgtcttattatttagctaaattgattcctgatcaattagaaagtttggttaattacatgtttgatttattcatcaattgggcaacaggttgtaattgtaaattaatagctctaaattgatatttgtattacaatatttcttatataaatgtaatttaagcctttatttgatatatattatttaaagcaacattagaaaatgatgtgattttagcctattatagtattcaaaaatacagaaagtgtatttatttctaatttacattcttttttctaaactttgtaagttttcaattcaaaaacagaaactacatcatcaaatttaacagatatattacaaatagtgataaaaatgtgacgaaacatatatgtcgtttactaaatcgtattcaatataaacatttatcggtactcggtgaattaattttaaagaaaaaatgataaagtaataataatttcacaaaaatgtgcaattgtacatgaagattgaagaactctattagaaacattaatttcatgtgaatttatattttagatatttagattgtaataaaaaaaaaaattgtccctattggtgatgctatgttaacaaactcagcctaaaccaaataaggatgtaaatacatatatgttgtggaaagaaaaaaaaaagaggcataatcatggtaaaatacatgttgtgttacgaaacgtaactatatatatacagtagctttggatcattgctaaaattctacgagggttgcgtagaaaacttgatccatctcactattttatggattacctttcaaaatgtataacgttttttgtaataacgtggattttgctacgaacatgatgaatcaagagtgacgcattttgttgtggaagaaaaagtgagacatgtcactatggagatgggatcaatagttatttaattacataattaaaatataattagaatattatataagtcattaagtaattgttggtagaaaggacaataggggtttaggggtggggtcatgccagtttgggtaaaaaaggattagcagaagagagatcagagagatgccacgtggagcctacggccaatgggagagcgataagcttatcaaagatttcaaagtgcggagggtaaagtgggcgacgttgcttttccacgtgtcaatgtttcattggtaggaaaagttaaaagttagatttccgcttagtcggtatttgggtcccatactgtcttcgcaacttggccctctctcttgcgctcagaaggttttgtcttttaagtttcttcttgattttggttttatcctttgttatttttagtctggtccgtattttctccgtatcttgtttcaaatacattctctcgtaaagaaaccgctttttttggtttagtactgaatgataaaagtattgttttcgtacgaaatttatgtcaaccgccctagttctagaggatcacctagaccatatgcatgggacttggtcgagcttcgatgtggattagcccgagttatcaatagaatactgaaaattggcataattaactttgatttaatggaaatgcgtttttataatatactgaaaatttaacagacatgatgattgatgagtagtaaatttcaaatggtataacaagtttaattgtttttttagtaagttatatatactgaccaagacgtttttgtttgagtcagtgactatcactctttgtttttactcaacttaattccatagatcctggtacttataacgtgtacaatctagaatcacaagcgtttagagatagtgataattagcttggctactttctcagctgtgttgttgcttgatcgaaggtggaaaatgagagtggtcatattgaagttcttgcttagtgctattgttaatagaacggttggagagccggccaagcttatggataatatatttatatatggagaatgagaataacataaagatgagacatggttgaacctaattaatcaaaaaaacaatttacatgaattttttttctttaaaagatttcaatctgtaacatgcatagaaacttgtctcataaccctcgtagtcgtatagcaagcattagttttatgatagagatgtttcggttacgaaagaaaatttaaaccaacttaagtggttgtaaatcacgttgtaatttttatgtttatgtacaatttcaaattacaaatcttcatttttaattataatctttgccactgaaattcacgataatatcactaaggttcgatgcaattcgtcaaacatttcacgtactaaaatttgttcggcgagtgatggagacatagatgtaaatggaaacgtgtactcgtaaattgtgtcatctttcgtggcccataaaattgagatggagttttatcgttttctatatcaaataatgtaaataactgaataaaaaaggttttattataaaaagtaccaaagaaatggaccgtagtcaccatttacatggttacatggttacatggcgcgacacgtagtgtcacttaatgctgcaagtgttttttcctctttgttttttgcctccctgaatattttaaatttggtatataaaatatttctgctgacgagttttagttactctagtttctaaaatggtctagaaaaagttgtgatatataaatataataactcggtaatggctacgtacagagtcagccacgtaacactaaatggatgtgtcatggacccgtattacactccccattatacacggatagcgcatacatgtagtagagaatgataatgtagttttaacctctcaacagggagataaataattatgtatttcgttttctaaagtcatagttaatataagtgataataaataagttttgacttgtttccaaaccacttaacaaaatgatagttatttttctgtccccgaatcattatgaataattttctagtgggaattagctatttcagatttgataaacaaaatttctttctttaatcaatattatgtttaattgtaaaatgtacacacaatccacaactagaaagacgaatccaaaaactaaagaaaataggaaatactcgacctttattttctaacgtcaatccaccacatgatatttgtggtttttagcgtaataattcagttctaacacaccacatgatttgctaagctaccagtactactttctttgttaggccgtgagaaattgaatattccttcctcttattctgcatattctttgtatttgttttgttacctacctcttctagtgtgtagcctacgtaaatatacactcaagttgttttgatgtaaccggttttctccaccgaaaatcgtattgtgaacataagtgttttttagtttttttgtctagttgattacactacatatcaattcatacttattataattacactgattatatataaatgcatgaatgaaaactcgaattcgatatattacgattcgtcaaaaaatgtatatctagtgaattctggtatcaattagaggtctgaatttgttcaatatcgtccacaattccctacctaaaaaattagagctttttggaccaaatccaaaaatggatctaaaaagtgaaaaccaaaatattcctttaagaatctacacagattcgaaccaaaccggattaaaccgaatagtctacggcacgtgtggaaacgcgctgcgtttcaaaaacatttggggtatttttgtaatttttgtaatttttaggatcagggttttaggagaaacccaggaagaagaagaagatcgacatggacttagaacaccaaaccatggagacgttcctgcgatgggcagcagagattggcatttcagattctattgattcttctcgatttcgcgattcgtgtcttggacattctctttccgtctccgacttccctgacgccggcgggtgcgtggaattgaattcgaactctttcatttctaaatccctaaaatctgtcttctcattgctcgattgatgcaatcaggagaggtttgggagctgctcgtgagctcaagaaaggagaattggttttgaaagtccccagaaaagccttgatgactacagaatccataattgctaaagatctaaaattgagcgatgctgttaatcttcacaattcactttcttcgactcaggtgctctctatttctctgaccatttgaatctgttctgtttttgtttctgagaaaaatcttaaaacctcagaattgttgaaatttgcagatactgagtgtatgcttattgtatgaaatgagcaaggagaagaagtctttttggtatccatacttgttccatatacctcgtgactatgatctcttggctacatttgggaatttcgagaagcaagctttacaagttctgtgtttactactactacacttttgtgttttattttgatttttgaataggttagatctcatgttattggattgagatcatgttcctttcttttctgttgatttcaagtctaaaagatgggatttttttcatgtccttaggttgaagatgctgtttgggctacagaaaaagccacagccaagtgtcagtctgagtggaaagaagctggttcgttaatgaaggagttagagctgaagcctaagtttcggagtttccaagcatggctatgggcttctgcaacggtaagaacacttcactttatcacacgaaagttgctcgagaaatcgatgatggttgattagaaaggtttgtgtaaacttacagctacaaactttacttctgtttgaagatatcttcacgaacactgcatgtaccatgggatagtgctgggtgtttgtgtcctgtaggggacttgttcaactacgatgctcctggagattattcgaataccccacaaggtcctgagagtgctaataatgtagaggaagcaggacttgttgttgagacacactctgaaaggctcacagatggtggattcgaggaagatgtcaatgcttactgtctttatgcaagaaggaattatcagctaggagaacaggtacaagtcctcaactagcttttgttacagctgcgaaactaatgaagcggaagcacaacgtagaaaatatactgaatggtgaggattgtatttgtgggtgtaggttcttctatgttatgggacttacacgaatctagagcttcttgagcactatgggtttatgttagaagagaactcaaatgacaaggtcttcattcctctagaaaccagcctattttctctagcttcttcatggcctaaagattctttatacattcatcaagacggtaagctgtcttttgcgctgatatccacgttgagactgtggctgatcccacagagccagcgtgacaagtcagttatgcgccttgtttacgctggatctcagatatctgtgaagaatgagattcttgtcatgaagtggatgtcagagaaatgtggaagtgttttaagggatctgccaacttctgtcacagaggacactgtgcttcttcataacattgacaaactccaagatccagaattgcgtttggagcagaaagaaacagaagcttttggcagcgaagtacgtgcttttcttgatgcaaattgtttgtgggatgtcactgtattatctgggaaacctatagaattttccaggaaaactagcaggatgctgagcaaatggagatggtctgtgcagtggaggctaagctacaagagaactctagcagattgcatctcttattgtaatgagaaaatgaataatctcttaggtacccaagataggcttagagatttgtaacttgaatcgaaaccgatccttcttaatctatcaatgctcaaaaaaggatttctgatcattcttttttacattcatagagaagtaaaaaaaacaattacctgctaaaatctactgttacatctttcatcaattgcaagtatgaatcaaagatagtaagctgaagccaaacagatgaggagatcagtaaggatgagatcaacaacgtcaaagacgaactttggagcaaacaaaccccaaacctgcaagaacatgagagcaatgttttagtcacagatacaaaacaagaacctttggcttgagtgaatcttgctgtgtttaccatcagatgtcttctctggatggtgacgcagagaattgtagctgtgactgtggttgcagatataactccaaagagcatatacatctgatgcggttaaaaaagttatgatttaacacattgtcactgaatctactagaataaaccaaaaacgaatcaatatgaagatgtcttacttgaaacaactggtggcgcttttcgccatgagcctgaggagtttgagagtgaaaaggtatgaggagaggaagtccaaatacagaaaggatgatcgagaatccaaatgtctcgattgtcaaaagaatggcttgtcgtataagcacaaactcatcaaacctgaagaaagtatgtcaacaaaaccaccatattgaattaagactccattgtaggctgagtttatgaaacttggacctaccccacaaatgcagctccataacgaaggccatcaaaggcgcaccaatgcccgctggcgaagaacatgcatatagaaagaagactccattgcaccacacagagaggatttagttttgagaatttgctctgtccatctgatttggttcttctctctacaccctccagcctcattatacaatagcctacatacatttaactgcatcagttaaaccttaatgacctgagttgccatctttattataaagcttgtttgctttgagaatcatcaagtgagaagaaaaaagttaccagccactaaatatactaatgcaagcattgatccttgcttccccgacaatagaattattggcgaactacaagcagatacaagagcgacagttctgatggcccaattcttgtctttttctgtgcaaaacatacgtgcagaagctaaaaggcagagctgcaccaatccaattacataaaccgtttgaggaatgcggtttcttcctcccgtcacttgaagcaactgatccaaaccaaatatcttgctctccgaagcccaaagcaatgctatgaaaaagtagcttaccatactaccaacagtaacatacttccacaccccctcattgggtgctttcgcaatggctacgtagagcacgcaaatgagtataaccactgacagaattggtgcaatttcaatcgcatatgtcaatgctggatggtctggagctatccctagcatccacgatggtgagctactcataaactgagaagttgcagcttgctttgttagcccaatatctatagaaactctgagaacaaaaaccatagcaagaaacataaaagcctgcagacaagataattgaaaatattacaatccaacaagcagattttaaggtaataaccagaagcaacaaagacatgtcatagataatactgacttctttccgcattgtttttctcataacagagtaccgcagcttgataagtccagttgttgccaggagaaagtttgcaacttttccttcttccactattgacaaaaaaattctctattagcataaagaaaaagagagcaaaacgcttaatctaagattacttgaaacttacagatatagctatttgaaagaaagctgcaagctcgaatcgttactataaagagagtgaaagctgcaccagtggataaccaagaacccactgcataagatttgtcgccatggaaaacagcaagaaactgaaggatgagtgatataaccaatatcccaaacccagtaatcattagattcagattgaactctgtccacttagaccgggcaagttcaacaacgcttgagaagaaattcaaatattcagcaatttgctctttaagaagggcagatatatctgtactgccgtcatctccatttctatccatcaatatgtgtttgacagaattggaccaattctgttctgctgcagaatagagatctgatatccttgacatatcatcggaagagaaaccaacaaccgatgaattagaatacacatctatatatcttttcacctgcatataaatagaattggaaactgagagtccgaaaacagaacatcgtgacaagatattctttcaagtttttgaactgttacctgccaagcattcacacaaagtacatcaacgtaatgtttcatccactcgttagcagccgattgggtgccaaaattgcccaaatctgacttatccaaattccagctactggaaccaagggcatatagctcagggttgacatgcccaatgctgaaattttattatacatagaaatatttcgaatattaatatgtgcggatggatattttcctgaatagaagcaggaaacaaaatttgacaatgatccttacaaggcaccttccgaaaggaaaggatatcccaagcaaagctgacaatgttgctgcaaaatcaagctgcaaataacccaaaacaattaagttttgcaatgaggtttgcatagagtacatggaaagacatcacatcaaatttgatactgacctgctcaatgtagctgatacacatctgcttcccgtcctgacattaagataaacccaatagaattccagtaataagaaatctcaaaaatcaatccttatgatcaccaaggaatatgtttcgcaggttacaattaccttgttttgtttacaagatgaggtatcgaactcaggaggaaccaaagttgtgtgcttctttgtactcatggcaaacatggttgtttctacctgtaaagggatttagaagtaaaggtggattaataatcttgaagcagagtgagtaaaagaagaaaaccaatttcttacctcttctgcagtccctccgccatgatccccatttaatgtctgcccatggtcacccattactataagcatagtattctcatgcaaaccacctggtcccgcctggctctccaatatattgatgactttctagaggaggcaaatagagtgagaatgaaacaagattacatatagcatactaataactttttgcaactgaaggacaaggaatacgcaagtgaaataatatggttaatttttgttgcagcctttatcaggtgattaaaaggtagtaaacagtagttaacctctaaaactgaattatattgctccaacttattaatcattgggctggaatccactccaaatatgtgtcctgcatggtcctgcaaatattcaaaattcagtgaatcaaggagatgagtggcaagatgatgacgaaaaaaaagatgtaattgtccgcataccacgccgagaaaatgcgcaattagaacatcccaatcatctttgaaaagggttgggaataggtgctcaatgcatccattgtcaacctaaaaacgcacaacaaccaatatcatatttaaaactctacacagacaagctacctcggaaacaaacataatgtagaaaagcaaaacatgaatcacttacagtatccaggtctttaacattgaaagaggggaaaggatatgacttttgaaattgatttgggaacaactgtgtccaagtatcatcacccatcatcaccaaccgtttcccatttagcactaactatgcatagagagaactcattcaagtcattaccgtgtgaccaaatcaaaatgacattagaaaacaaacagtttgttttagataagccaaaacctgattaatgaagttatcctcaacaatagcaggagcaccgaaactattcccaatatcaataaaagtaggcaatcctccagttgttaatccctgaaattcacacactagaatatgaaaaagagttgaaagcaatcaaatgtagacaccaatctagaaactgattagaattgggaccttgagacgctgtaaactagttgtaggaggatcagcaaaagccttaaagatcttagcagatgaatcattagcaaatgcaagcgtctgcaagattgttaatttatccatccatggctttggttctgtcaattaaagaactacttttagtttcattactcaaatcattaacacagtcatacacttacacacaaagatcattcaaaatcacctgggaaaaaagcactcggggcaacaaaatcgattctgaataacaaaacaaaacgaaagtcacgaaatgcctatggaattgtgaaatggaagctgtaaaattgaagaaaaccaatctcagttattgcaatacttgaaacctgagtgcatctaagacaattatgatgacacgatcaacaactggtttggtccaacatttcggctgagtctgattagattgacccgagcttgaatcgtgattggagcgtggagaagcaaggcaaggagagagagaaacgtcggagcaagtactgtggaaaggaagctctgttcgcgtgagaagaaacccacgcgtgaagatcaaaatggcgatggcgtgaatcaagagaaatcctaaagctgtcaacttcttgttcttcagatatgtctccatctccggatcaaaattctccggtcgtatttccgataagtagatttcgccgtgacgggctactgaccgcggcaaaataaactattgaaggtgatgaagacgtgaatggaaaacgacgtcgtataacttatcattgtaagtgtaatcgagtttttgctgctttgcgttttgtttagcaatggcgcgttatattttcagacatttaggtaatcgattcgttttacaggttataaccggtatggagggtgcataataaaaatttagtttagctactccggttattgaagtaaattattctggcgaatttttactacaaaataagcttcagtcctttgatatttgattaactgagtaagttatacgattccgatttagctagcattcaacagtataagttaatcaaattacagtcgtctcttatgatatgaagaatgatttcgtcatccgattactatcatctcttatgatatgaacaaaggtttcgtcttgtcaatacagcttgtagatatgtgtttcaattcatcaaatccaaatcagtccaaacttaaatccatttgtctcagtttagtatcatcatatacctaataaacccaaaacaaaaaaaaatctaaaacctcaaattattctagaaaaataatcgaagctattattaaaaaaggtttaggagaaggatcagaacattggcttgatttcctctgttgagaaggaaataaaaatcgcttagtataatctgattcgatcatttggggaaattgtcatcacctccattctccttaataccaatcttatagtttaatcataaaaaagacccaacaaattaaaaacgaatcacaattgaatctagtgaacctatctaaaggcaaactcatcaaaaaaacataaaagagacaaggatcagaatattggcttgatttcctctgttgagaaggaaataaaattcgcttagtataatctgattcgatcatttggggaaattgtcatcacctccatatctcttttcaaaaaaaccacgaaagttttaaaatcaacaaacaaacccaaatcaatcgtaataatctaaggagaaggatcagactaattggcttgacttcctccgaagaggaagttctattcgctcagtataatcagattcgatcatctggggaaattgtcatcacctccattctccattattaaccaatccaaatctcgatttctaagaacaaaaaaaacgagttcaatgttgtgtatgaactaaaacctaaaacaattctataaaacactaatacaaaatcagatttaccctaatctgcaaattcgagctgattgaagaaaaccccagagggttttccgaagaaaatcaaaacgaataacagatatagggaaacgatttggcgtcagctcatacacaacgaacataaacaagtacggtggtaatcagtaatattgacgcacaatttctaatgagaacataacctaggaaaccttatgaagaacatattaaggataagaaatctagcggagagaagtcgacggcttgttattttggtgttttgaggtttagtcaaaagagtatttataggtacggtggtgaggcttatgtcggtctagaaaccctaatgcgcgtgttattcacgtgacttgtggtattaggaatttcttattggatccttatgttttggtgggctttggtaactagcaaagattacttatttaacaatgacagtgaaatcaaactatatagtatacaagtaattgagtatatgtatttttcctctcttcattccaaaagggggttagtatacgacaataaataatgaaatacataaatcagaaaataatagtaagacatttgtaataacgttttgcaactaaactaatctgtttcagtttcatcttcgcaacattttcagccttctggaaccaagaatcatcactgtcttcttccattaacattgttctctcttcatttccatgaaccggatttatgtgaattttcaatatctgcgacggtaccacttgatagtataaaatctccgtagtctgccgtgtactaatgagcattttatggtttactataatctcttctccaatcatttcgaatcctgccgagtttggggttacgtttgagttgtcgttgtcttgtgcttggttctcaaacgagaaaaaatcgtcgatctctatgttgtctattgtattggtccgagatccgcctgtaataaatatacaattatttccgattagatcattataatcaacattttatatggttccaaacttccaattataatgagttttatatcatacccaccataaagttcaagatcttgatcattactctggaaacttggcaaaatcaattcttgttcttctatataactctgttaacatcatatagattatagagacaattaatatttggtcttcgagcatatataaaatataaatgacgaaatcaaattggtaactatgaaataaaattacctgctcgtcaagatttccaatgtgtatcaaatgatcatcaacgttgctgttgtagaattggttggagttacttgcagcgaaagtaaagtcgtcgaacccactttgaccactgttttgatgtagtctcttggagaaatcgctggtttgagcctgcgagttttctactcgcaatggtggcaatgacatttggtgttgaaacatctcacattgcacttctgtattcacctatataataatacaacattttaagatacatgtatatttgattctgtatatgatacggaatcaactgtattaattaacaaattacctttgattgagtgaggtatggtccataaggagatccgtaatctgaaaagcttgtaggcatgttttgtgacaagtactgcgaccagtcatcatgatcactaattgcgtttgcgtttccaaatcgcggttggatatgggcagcggtattataaggtgtgtttgaacttatttcaagatctgaacaaacgtcaaaactcgagctaccacttatattcgagctcgtgtggacgtaaggttgatgctgctgctgatgttgatcccttggtttcgcctcaatcactattttcttaaacacgcgacagagtgcatatgcgtcctgaaaatagaacaagaatcttgttagaatatagttttccctagtaatacatctactactttaaagtagatgattgatgattggtttggttagtaagtaaacctgcatgccaaatgcagaaggctcgcattcggattcatcgaggcgatattcatgcatgacccaaccagttctaataccatgcggggcacgtccacggtagtaaactaatgttttcttggtcccaatggctcgatctctccaactcacccgccggtctttgcctgtggctttccaataaccgccttttgttgcccggtttgtccttgaaccattggggtactttctgtcccgtgggctgaagaagaaccattcttggtctttgctaggaatcagtgacttccctgccaattgacatggttgagtatattagtaaacaataacatttgaatacaaaatatcgattcaaattgagtttctctatatatggtttttatttgttttattctgtcccctgtaaaatatgttatctctcaagattaaaccctaaggtacaaagtgtagactatcataaaagtgtggtggtccatgagaggttaacgaaaagtatttgaggatttgaccagagggaatcctacaattgcgtatgctctaatcaatactactatagtattatggctatattgttatataatatattcagaaaaatcatatacttccaatccaagttgaattgacaaaaactaatccaaacgttgaattgattcattttaattgttaaaattttgatttcttgatatatacgaaaaagtcaaagctagtaccaaaaaaaaaacacatggtatcacaaaactctttgttatttaaagggatttctaaatattagttaaaatcctcatgattagtgaattctagaaatatttcaaaattttgcttcgattttcaaatcaatcaaaatatgcaaaccaatataaatgtatacatataattttggtaaaagtgttctatattatagttgtcctgttattgtgatatatattctttttcttttcttcactctatctttcgaacctatacgttcaaaacctattcagcgcttagaccataaaagggtctcattccaaatatatatatatactgatagattgatttatggttaactaaataattcttacctggcaagtcccatggttcgcacttgtagaggtctacttcagggataatctctagctcgatctcttggccgttgatctttctcttgagatagtaagtgattagttcttcgtccgttggatggaacctaaaacctggaggcaacgagaccggagccatgtatatactcttcaacaatattgaaacctctctatcaatttaatatcggattatataacaaaaaacttaacgaacggtcttgtttacgagataaactccaacaagaccgatcgtttttgtttatataaatagttttataagtatggttgggtagtagagagaaggagaatgatgatacgaaaacctcgagagaaagaaggaaacagagagaagacaaatgttttgtgttttcagggcttgaagggtatagggttataaataaagaagagaaagacagaatttcatataaaaatagtggcaggaaagtgaaagggatgatgccaccctcaaataatatatggaacttataatataaaagttataaaaagtatggctatacccaatttgtctctcgtaattttgtttcttccttacacatattctgattcttactgtcgttttcttcaagattcataggtaggttaatgcaaaaccgtgtttcttcatcaaagtggtcgcctcaaataatcacattcttctccaagtatggtcggtttggaatgtatccacgtggcggaacatcattggcttcatggggggaacgaatcttggtttaaccaatagaaactggtttcaaatctttgtctggcggcgcttctaactgaataaaactgtctcctttgtatcgtatccccacttgcgagaatcctttagttccttcgtgattgccgctgatcaatatgccatcatctcaattatttcttatatctaatctcttttctgaaataaaaatattatacttcattttgtatcatcttcattgtgtcgtcacaagtggctcgagtatgatcgtttgattggtcattagtgttagtttgttcatcttcccccatatatatctgatcttgtgttcataagttatgtctcgggagtatgttttaataccgcccaaaactatattataaccttttttcagtgtaaaaatatgaatcacttaaacgaggagtcgaggatgagagacaagctcgctcgttcacgagcatgtggctctagatggatatgaaacacatgatatagtgacgcaaacacaaacacaaacacgagcacaaacgcacacattaattagattcatatgcaagttcatacatagataaattaaaggcatagatatataaaaccaaaatttgtttaaaggtatagagatgaagaataaaggtccacatggtagatcatgtgggtccagcttgtaagcatgtgaagaaatccttggaggcatagatgggccaaccccagcatcacttctcagcttttctcatcatcatcatacacttttctgtcattatgcaaattccatattctagatctatatctaattaatcacacatataataagcattagcatatataacacatgtatataacaaattgtacatacccttctttacacttttccctcacatgaatccatctttttgttctttacttttatttatttctctttcacacacatctataagttaatgtactccaaatatctttaccaaataaatgtatcttaaattcccaagttgagaacatgaactatttgaatatagtttcaaagaaagtatttagaaaaaatatataatatgtaagacaaaaacccaaacttctgtctctttgtttatgctaagctaatttaaatttttaaagtgttattaacatttcagagtctagtgcatgtttattttctcctagaaaagatgagtgacaaaaataccaaaagagaaaggtacatctgtaaaattgataaagagttaagaaggaaaaaatgtttaaatcataaacttaatcgcatacacaacttagcttcaataaatttttgaaaattgtcaaaactcaaaaatggggagaagaggttaaacttggtttaaccggttcgttcattatacttccgggttagcattttgagcggttcttttccggtaaccaaaccggatagacattcgagttattgttcaaccggtttcaccgtcaaacgacgtcgttgtcacagtactgtccctcacaaaaacctcacaaaacctctctttcgttctcgtctcctccagaaccagtacaaccatggtcgacggcgaagttgaaatccttcgcggttacgagctccgtctcctccggtgcactgtatcctttccacagacaggttctcctctcgaatcccagccgctcgatggaactcaatccggaacccatccacacgactctcttataacgtctcttttgtcttcaatcgaggctggagactatcttggagctctatcctccgacgctactaagctaatactcggagattccgagttaaacttggttgatacggttgattccgccgagcaagtttactccgagcttctcgacaaggtcgaatcgttcgtggtgaacgattcttcagatgaaatcgataaggctcgccgtgctgttctggtgatgtgcttagcaatcgctactgctttgtggttcacccgttgcaatctgactgggtaagtcaccgagtttaattcttcgtaatttatgaacttccagtgttcttcaaatttcggaatctggttatattcaaattctcattgaggcttttgattgtttttaaactgttaggtcaacggaaggatcaacgaaatgttcgttgccccttagagtgtcagagagtaaggaattagttgagtgggagaactgggctaagattcagctcatgtctgtcggttctgacttgcttgggaagttttctaatctccaggtactctcttcgtgctactgcatttttcaatttcatcaattcgagctttgttgttgtcccagtctttatttgtgtttcggagggtgtttgttggacgttaatgtttgagaggaataaaccaaatgtattatgctttagatatgtccacacaagcttgttgttttttcttatcttatagtagaatgatcttgatatttcctgctctttggtctgcatcaagatgactttatcctggaaggctctaagctgtgttgtaggcttcttagcattcatttctgtttgctagtatgtgaattagcttatatctgtgtacattatatattagtagctatctgaagtagtaccgatctgtctttgtttgtactttgtagtgaactctatgcaacccaaactactttttttttcctgcagcatttagtttttgctagattgctcctgttcaagttgaaagatttgttgtttgagataacttcaactgaaacttttgaagtaaggagtatttcatggtggcttgtcagagttttactgattcatcaaagagttctacaagagcgatcttcatctttgtttgaaatgttgcaagtttacatggccgaagctatagaccattttggagaattggaaaaagtaaaaagctactggggtgccaatttgctagaagacgaagcttcatccatcacgtcaactatccatctggaagcatgtgtactgcaatatatatatggaaggattgatccttcacggtaagttaccattgagacttacatgtttatagctttttgtcctaggatattgaccagattactttggtttcgcctgattccgtttttaagaaaataaggagaggtttgcgactcatgtagttacgaaattgagctggtatagcacatatgtatatagttgttactcctctcatttctgatagctatcacataccattccatgaccttttatctacttgtctgctttagtatattggtcttgattcggagtaaaattgtcaggttgcagcttgaatctgctaaagcagcagcaagcctagagttctctgttaccggggctcttggatttcgtactattcaccaagtaagatatgagataaatttttcctttttgatgtattcggctatgttattctaaattcctctgatcttgttataggtagatccaaaggcacagatggtattggtagccaatactagctcatccaatggggatgtgaggttggcctctgagaaagctgatgttggaccttatgaagcttggggaggtgaagcacctgaagtatatatgactcccaaactagtgaacaacgagagtgaagctggcaaagattctgtgcccttgaaaccagttgaacaggcattgattttggcccagtgccttctaattgaaaggggtagtcggcacgatgagatgcaaagtaagtgaactcgaagtcaagtgtatttgcaatgtctatttctcaaaagtttaatgctttatggagagctcaggtggaaagatagagaagaatattaacacttctcctacacaattaagctactaggcatttgttgtaactgcaattaaaaaacttagaaaggatcgttacggtgttgccaaattactacagagaccgtgaaggagaagaagcaattgtcaactagttttactcacttgtgttgaacgaaattgttttactcactagttttatttatatattctaatacttttttcttctgcaggatgggatatggctccatatattgaggcaatagattctcaaaagtcaacatattttgttgtaagtttcaaactctcagttaatttattcttacaaagtgactgagtttaaatattgatgtatggatctgttggtttttcatttcgtcacaactatgcaagtaaaacaaactgactgacttttgttcttcgtacatgggaatagctacggtgtttttgtgacttactacgtgttcgatgggaatcaactagaggtcgtacaaagggacgcgccctagagatgatggataaattggtatgtgtgaacagcgctcgtattatcaattttggttttcctttttgattgtatatctcccaggctgaaacactcatattgtagtgttatttcattctgtccctaagtatagctctgataattttcctttatcaggttggagctattaacaagagcgatcctggagtatcaaacaggatccctttatgctatgctgtccatcttcctactattcctgctctgagaaagtaggatattctctttacgtgcatgtatagatatccttttaggggttttctgcggtcttattcatttattttcatcgttccattttgattttaaccacagggaatacggtgagcttctggtgagttgcggtttggttggggaagcaatcaccatatttgagagcctggaattgtgggataatctaatctactgctactggtattttttttttttttttaaatactgcgttgtgatgaattcagcttcgcttgtttcccccttcccctctatggtttctatcttctgttgcaaaacttattacgtgacttgaaattcagccttctgggaaagaaatcagcagctgtagatctcatcaatgcacggcttcttgaacggccaaatgacccaagattatggtaatctgttatttggtggtacccttagtctgttcttttcttgttgtttatatcttaattaataaatcactgtgaagtgccataattatctgctgtgaacgtacgcttaatcttattataagcagatatttctttaagctttgtatatacgagagaaagttattatggtatccgatcgttaaattaaatgtgatgataaatattggtttcaggtgttcacttggtgatgttactataaatgattcctgttatgaaaaagccctggaagtttcaaatgataagtcagttcgtgctaaggtagtttgagacagaaaactgaaaaatcttttatgttcttctctcttagtccatgctctaattatcttcatcttgcagcgcgctcttgctcgcagcgcatacaatcgcggtgattttgagaagtcaaagatgctgtggtatgttgaacaatttggatctgtctttttttttctaaaacggaactggatttatgaatttggcccttcaggctgatttacttgtgagacgtctcattttttttcttacttttagggaggctgcaatggccttaaattctctgtacccagatggttggtttgctcttggtgctgctgcgttgaaggtatcttacttcatattctccaatagtttagtagcaatatgtttccattccaatgtcattagattgactacattgacattcttgtcatgttggctgagaggtatactaatttaacatctcctacatgataccataggccagggatgttcagaaagcactggatgcattcacttttgctgttcaacttgatcccgacaatggggaggcttggaacaacattgcttgtctgtaagcatttcagtttcactattctgctctgtttgttctgaaattactgagaaaattaattgttttcttcacacatatccttactatttaacttcacgactcactgctcacctgctttatgacatttgtaatggatgatgctgaatgtgtaataatctgtgagtgcaggcatatgataaagaaaaagagcaaagaatcattcattgcgttcaaagaagcacttaaattcaagtatctctctatcctttacggtttgttacttgagctatgaaaatcagagttagtaactgaaaaatattgtgtcaacaggcgagatagctggcagatgtgggaaaatttcagtcatgtcgctatggatgtgggaaatattgatcaggtaaatgcagctattaatttataactttaatattctactcttgtctaaaaacagcaactgtcacttccccgtatatttgttttattttagcttaggagttaaacaaattggcttcatctttgtgtttttttctcttccaggcctttgaagctatacaacagatactgaaaatgagcaaaaacaagagggttgatgttgttttattggaccgtataatgacagagttagaaaagaggaattcagcatgtaagtcatcatcttcatcgactgaaaccgaagcttcttcagatgagtcaacagaaacaaaaccatgtactgcaacaccagctgaaactcaacgccagctagaattacttgggaaagttattcagcaggttagcaaaacatttcaactagtattatctctgtattgtctcattctccgagtgataactcttgaggatgcatttgatatgtagctttgtatagtccctttatgtgattccttcatttgattatttcttttatagattgtcaaaacagaaagtacagcagaaatctgggggttatatgcaagatggagtagaatcaaaggagatcttacggtatgcagcgaggcactgttaaagcaagtgcgatcatatcaggtatctaataatgactgatgatttaccaaagccactcttttatcagtgagcagtatttgatgacatatcgatatctctgccagggatcagaagtgtggaaagacaaagagcgtttcaagaagtttgcaagagcatcattggaactttgtagagtgtatatggagatctcagcttccataggaagcaaacgagaactgtttactgctgagatgcatttgaagaacacaatcaaacaagtaacaaaccaaacttatcattaattaatccccacaatacttactaagctttttgatcagaatcaataaaaatggctgacatatgtatgtgtaggctacagtgagcttcttggacagtgaagaattgaaggaacttgaaagttgccttgaggaggtaagaaatgtcatgcagaaaagtgaagaagagtatagagatacaaaaacatgaaagaagaaaagacttgtcactatcatcatagattagcatttggtttctgggtgttgtaaaattaaatcatttctgttgtttggtttatgggtgttgtaaaattaatcatttttgttgtttgggttaaagacattgttgagatgataacttaatgtttctttttttgcgattatacgagttttgagtttacatgtttctgaaattcctttggggatgcagaattgcagattgcagaagcagatgataactttaatggttcattcaaatttgcccagagaggaaaacccttaagtaacaaatgcaaaaatagaccttaattatggtccaagtaagcgaaagtaaaaattatactcatgttcaggaacacaatgtccaagtaaatttggaaaagttagagaaaaagaaaatcaaatttctaagagatttgtgcaagcttgtgtgattatagaagataatcacacctcaatcttatacagcatctccttgtttcatgtctgttaaatctgtaatccttattgttaaaaagagttgagaatctcaaaatcatggcgcagctgaagatcaagaagttgttggttcttgtgttcaaaaaagatgtcgtgccgttttaacgtttagaagataaatatgcgtgccgtttatgattggcggctttttttgccaactataggatgacaggtcataaagaaatcaattctgacacgaaaaaaggaaatagaaaaaaaaagaagagaacaaatctttttgatctgtgcgtatggttgttgtgtctcttcttcctcgaatctcgatcgttacatcaccgggttctagccttcacgatgtgcttttgagcatgagatttggtttgacgcgacatctccctctcaaacgatctttctccaattattcaatcacttccgtatctccagaacaacagctcaaatctccggtgaccatggcgacgaccgagagcaagaatcttgtagaagcttccaaggaggagacaaacaagaaggagacagaagataagaaggaggtgggagtttcggttcctccaccgccagagaaaccagagcctggcgattgttgcggtagcggttgcgtccgatgcgtttgggatgtttattacgatgagctcgaagattacaacaagcagctttctggagaaactaaatcaatttgactgatttttcctcgcattgttaatggagaaattaaacatttgtctttgtcgatttgatgatacagtgcttttgttgaacaacattttggatctctctatgaacttgagctgatttacttgtgaatagaagaaagtagtgattattatatcgaccataaattgatttcaatcaaatttgctcagagaggaaaccgtcaagtaacaaatgtaaaagagctaacgagtcaatcaaaatatttctactttcttttctgtattctgtgttcttgcttctatcagaaatagaagaagtagctgtatacaacaaatcattgattctttcggatttgtaagatggaacgagaaagcaatttgattcaattcacagatggattgtaactgcagagaaccttacacttcacctttgaggagctttcacaaggacagagatatggagatagaattctgggttcatcaagttatttaccacccacgaaaacggtatctctagcttcatttctatcccttgtatccttaccaatttgatttcacccatctccctcgacccatctgcttcttctgtatcatctatgcttctttcttcaccactcgtttgcgctctgtctcccataaactcagggaggagacttttaatggcgtcacgtaacgtaaagcatttccctgttagatgatggaagaaatcagttatctcacacaaagagagactcaacaacagttggattcactctacataacacctttgggttcttttcaatgaacaaggtaataacaacaatgtggatcattaagatgaaattcttaccttcttctttgaggaactcaacagggcgattaaggtacgagatgtcatcccaggtatcgatctccggtacatcttcaagattctcgaaatctttatttagacttcgaacatacaaccgaacaggaattcttgctgaaaaaaaggattttacattaaatcaggacgctagtactttgtatcatgtttgccatcactgcaatagatgcaacaatttgtgaaaagtcattattcttttcctgttaagttgttgctgtttataggatttatcagaaaagggaaaactactacttacaagcagtgtttttactaggtcctctgcataaaaatataccagtcccatcttgtgatactacttttccaaatatgggaaaatttgacaaggtgtaactgtctcagctgagtatatagttggcaaacctgtcttaacttgtccagccacctccgtctcaggcacaacttgttgagattgtggagatgacaaacttgttttccttgaaaactcatcttcgactgttcccattttaagcttgggtgataatcttgtataggcatcaagatcacctgccaaaccatcagttttcaaactcgttactaaatcagtcatggatatccaacggttataccatggttgatgcaaatagtgacattggcaatgctgaacgcaaaaactacacctacatcgagtggcaactagagttacgaccagaagaagtggtgtaacaaaaaggataagggatttgtgactgctagtaattgatatgcctaacatcgtccactcgtaccgttcatgacagaggtccatagatcctcttgatcactctgagacatgttcataacattcttgcaatttccattgatgatatattgtgcctgcaggataagcggataacagtatctcacatatgtcaaaacgtcttatcatttatcctttttctttacttggggcatggagcattgtaaaaatataacacaagagaagcctatgtattacgttagataatggcaaaccaattgcagcaaaactaacaaattactaacaatactatttgcggatatacgcagctacacctatatagacaatacatcatcaatatgttgaagaaaaccactcttataacaaaagagaaacactcccaaaggtaacaaatatttcactgttctacgatgtgaaatccaatagaacagtatttatagtctattcgaaaataatttgaacatagactttcacttaaaatgataagaaagtcataaactttgaagaaattttcactaacctctttcaaagaattaacaaagttccattttacagaatcttctccttcacatggtatcagtatgttgcaaggatatcctctaaagtgtatctgcaagcaaaattttcagaaaagctcaagaaatgcaaagatataaggaggtaagctttgtgcaattagctagtcaagagggacactggtgaaagatcttgttaataacatacttacgagtgtcagcttacaagaataagagaatgacatagtggatcattaacattgtccacttaagcttagattacaagaatatttttccctcaggcttacttaagatcctaatacaaagttcaatctgaaaaattaccgtgagattccatggtctttcgggttctgcacaaaggagatcgaaaagaacacctgttggtatatacctgcaaccaaagaagattcacactctcacataacatatcacaaaaaacaaacacttactcccattatactaagagatgaaacaatggcgtaccattttagaggaaatcctttgtaatcaaaccaaattgaatcttcaccaggaggaagtgaatccttgaaataaggctttataagaggaatcaacagaggcaaatatcctattcttggtgctaacacctgataatgcgtgccaaacaaatagcaaattcagaagtatgatcttatctcgacccagttacacaaatttcgtctaaattcttcctcgtttcaatcaatttgatggtcaaaaatcgtatgattcaatacgaaatggaaacgaaacccctaaaacccgaaatcgatcatgatccaacaccaaagaccacagatttgcaccaccgatttgaaaaccagacatgagaaaaaaagcttggagaagaaaggtgatttacaagagcaggaggaggagcagggtgagaagcgacgtcggatttgtggagatgaatctgcagaggaattgctccttcccatacatacttgaccgcttccttcgccattctcttccccgtcacaccttctcacgctcgctcgcttcacaaaaaaaactcagctttcaaaacgacgctgtttctgtatgacgtcatcttctcttgcgtctttatgtggtattaataaggcgtacgttagacactgcttaatctgttggtggctaacgtgaaagggtgttaaccggtctaatttggtctggtcaaattctatcaaaatttcaggttagagttggtttccgaatcggttcggttatttgttgggtttgaactttgaacacacacttgttcagttggtggtaacctcactgtttttcttctttgccttcatttcaaagcaaactctttaccaaacctaatttaatcggagatattgaagagagacacctgaaacttgcttttgttgaaccatcaattaagaaagatctcataatcattagatttaactgtataaattgtacacgagttttacagttacaaacttttgcagaaaattttagcctagagaacaaacacctcaagagaaaacaatgaaacaacaacaaaaattacattgatgaaaacttagaaagtcgaatgaatagtaaatttaaagtctcttctttagggtacgtaagaaaatgtgttataagtggagatgaatctcatgctcttcttcttctgttaccatctttctcttcttgtatggaccaaatcctcttgaatttgactcggagtttgttcttctgagctcagaaaatgcagacctctcacttggtttaaactcccattgacatagcattgtttcgggttctgtggtcttttccgtgtgtcccgtatcatccaccgaaccagtgtttgatccagtcgatgatccttcgttttggacagcctttcctgaatccaaacatctattttccacatcttcttgcttaagagggacttgtatccagcagctcaagagttcttcttgtgagtttcttattatgggtagtgtcttggatgatgagagtttccgtggtaatggctgaattggggatttacaatatgttgaagttgttagagaagaggacatgcctgaatcagataccaaaactgtcttcccaaagagtttaagactttgcttcgttggttccttgatcgagctctccctgtttaagagtctctcactaggaaacaactccagcttctgtacaaattgattaaaccaagaatattaagcattaagcatctaacagcaggtattgctgttaagtataaattcggttttgtttatgtcaagtaccagagtctcaagctcttcaggtgcatttgcagtggttgtaagagcagctggtggtgatgcagaagaaactggggacaagcttcgattgggtgaactcgaatcaagggaacacaatgcttctgatccaacagtggacaacacagaggttggagattgagtatcacgttctgagggagaaaccgatctacttgtttgatctgcctcgttcccaaacttacgagggtacggatgcgctggctttctcttgggacgaggaggaggtattacaatcggctctactgagctcccatcacctccagttgcttctcgagcaacctgtgtgaatacaacagaacaaagccaagtcagaacacaagtctccaaacaatgtatgtataatgattccttatttatgcagaacttaggtttgctacagagattagactgatactttctttgaacaagggtaaagatataatagcaaataagtgtataaaccttagagaaaaacttctgagcatggcttcgaatctgaactgcggtctttgagcccacatgttctgttagtgaaacaaacatatatttttgagggtccaggtaaggccataactcagtagcaagagatattactaaatcattaatttaccttctattcgtctccaagctcgcccgtataatttcaaggcttcaacaaacttcttgtgctcttcatctgtccatctctctctctcttttgttatcgtgtatggcttccgtacctaagtaagaaaagatgaactgagccacagatcttcactttacataacaatatttgacatttgatgttaaaagaaacaaaccttgggtgcatagtcatttcccccaaaactttggtcattgaattgtatctgcttgtctgcagtttcttcatctctattcctcaaagaagcgttggtaccctaaagccatcatcaagcaaaacgactttaggaaacatcattttaaggactatgacacaaagtggcattggattatttactttcttcttcagtttctcaatgaacattcattcacaaagtccaactaattaaactcgatttacatatcctaatcacaaaattccaacacagtcgattccatctcaaggattcaaatgaatgtagttgcaacacacaaatctagagagaacttatagctcaaaagaaacaagagtctgcaaatgaattgcaacgaacttgctttaactctaagctttattacttaaatgtccgtatacagtattttaaactcatagattcatttgagaccagacctgaataaagcagaaacaaaacaaaaaaagtggataaaaatcaaattttgagaccagacctgaacatttgcagtcaacggagacgacgccataacttcccggattaagatctcggcggaggaaaacaaaaaaaaactcgaaaggtgtggaacacagaaaaggaaacaccaagataaattcgcgaatctagacttgaaaaaatcagcttaatttcctctgttctccgtctgtttctatagatcccataaattgattcggtttacttaggcaacaacaaacgatttgcttctgaaatcagaaccaatctaagcttccaccttccggaaaaaaaacttccagcaaaccagagatttcttatgttcgataaaggaaaagagaaaaaaactctcgctggaaatcttgccgcaaataaggataagaagaaggtcggaaatgaaactctcagagaaactccgagaagttttggtagccggagtaaagaaaaagacaagctttctgattcggcggaagaagaagaaaacagagagaaagaagaagaagagaagagtttggggtctgtgaaggaggaagaagggaattaggggggtgagaaaatagggaagacaaaaaggagggtgatgccacgtcagcttctgctatgtgcgctttttcccaatttttaaaaaataaaaataataattcttattggttttccatggaacgctcgagaaacagatggaaaatcttgtggctcacgttcaatgtccatctttgccacgtgtcgctctttctcatattcttcatcttctttttttgcaacaaaatttgtactagatttattcatttatctctttgaaaaatcaaatatttaattttttaaaatgaatctacttgttttaaaacagttagatttggtacttcgattatcactgtatgtatttatttaattcccctacttttcctttccttttttgacatcatttcaattggataatcttttaatataaaatatcaggaaatataatatttatgtaacaaaaaagattttgctggacggagaaatgtgagccaccagaagatacttttaaaggaaaatatggaaaggcgtactctcgagagtatgacttcttagcttactcgcttttcattggttccactacatgagataaaaatgtaaatttgcgggataaattcattttcttttcttaactatatctctattgatccatatatgggtggacatattccaaaatttatgattggttctttggatccggatccataggatttgtttgcggaaccatccaaatccatatctatcaaaaatacttcaaaataattaaaacagtaatatataaaactataataaataaaaagttaaaaatatattttgatttatttacataaactctttatgaaaatatttattagggtattttaaaaagctacatatgaaaacatatccgaagtggatatcttaatcaaaatcaaattattcgaattcgaaaactcttaacattttatttttggaccagatcagaagattttattatacactttgtccaatcttagaaaacatagtctatccattttttattttgtggggttctactcttttttctccattcttccatatatgaacacaatatttgatagtaaatttatatataaattataaccatcataatatctaaattcagattttaaaaaagatttctgtctaaacacatttttgcaggacactaaaatggtttattttatgaaatgagatccacaaaatgggttattcaaatttggactgatattaagatttgttgatgatgcttctatactagcaatagcaagcctcatacaaatgcaattgataacgtatcctaccatgattccgatatacatataaaatttggacctctaaattttcctatattctttttcatgtcaaacttatatgtttagttgggaaaaatattgcacagaattttacatagttgaaatggttttgaatcacaatctaaataaatgaaattccaaaatcaagtgaaagtagaatgagatactatttttggttctttttcgttttgtcgttgtctttgtttcatattttacgaaaaaacgaaaaccataagttaaatatcttctgcctctatataaaaacatggtgggggtctatccataacgtaagtctacgtatacataccatataatataatatatacagatacgaatctatctatgatatttataattagtttcaactttctcgaattaatatgattatccatcgtccaggtcgtcatcaattttcacaaatgtgtagatattttattgaaatcattgttaagcacataatttaatatactcctcaaattgtaaaagtcatcctcggtggaagtgaaagtaattacactttaatttataatatagtactaatactaataattagtgaatgtcagtgcacttttctccatgtcactgattcttattttagccgtctgttctacagaaacttgacatgtggaatgacgagaaggagggttctagccactagttttctttttatttgtttcttattcattttattcacgttcactgataatacaacaaaatttctcagccacaagaattccttctcgttctttacttagggtttcaaatatcagaaagtggttggtgtgtggctgttgtctacttagagtatttgtttttgtcatctcttataaaaatatttgttattaccatattttctaatgcaataaaatccaaacctgtagtggaaatcacatttatctaatgtaacaatcattagtgaaaagaaaatccaaattttttaaaaacagatgagaacatgttcaaaaaatatttaagcgattaggatttaggaggcgtaagacgtgaaaaagataaaataacagataacaattcaggtgtcgaaacgaagtgttaaaaaaaccttttaggtcatttgaggagtttatggttaggcttggtggtgctggatgttaggtactggtctactggattgtgtgaagtgacacgtgacaaccattgtgatattttcccttttcttcaccaccatccatttatttttaagccaaagtttatataatctcaattatatacatgtaattatatatagtttttttttgccaaaatgttttcttattatttgagaagaaacaaaaagatttggtttattataaataagatttttgtttttaaatgaagctgtctatgtaatttcaattttgtaaacacatgttattcattcattctcaaatgtaacttcaatgttgtagacatttacaagacatgttatattaatcatgtattgcaaatagatttacattaagataagtatacaaatattgtgatatcgatgtaacctatttttttggattgagaacattcaaataaataaataaataaataaaatagaagaaattaaacaaatatatatcacggttgtaatatttttgaaagtgttgatcatttttaaataaccacaaaatactattgttttcctataactcaaatctgttggccaattcaacctaattagaattgcaaaatttcacatgtagccatgttagtacaaattcattcgaaatgtgactttggcatgagtaggaaaaagataagagattttacgaatcaattattttagtgaagagaaaaagaattgatgggtgggtctacatatatagtttggatagataatccctttctataagcttctacgtatgttatgtggttcatatttctcgccaacatgtttttgccgctttatagccaaacgggataacaaaataaatgaagaagcagatattcttttgagataaaggtctctctctgactttgtgaaaatcagtgtgaatggttctatctaacaaaagagattgaaaagatatgtggtgtacaaaaaagccagaccggtgatcctattcatggaccaaccgtattaattatgtctcattcatgattatcttcatattttcttatctttttggattttgagttgtacaagtggtcaaaccatttgggacaattggcgcaatatggtacaagtactattgaatgaaacaagtggttggaacacaaaaacatatgatattgatcactagtacatattgatcatcattgatatctatataacattccaaccaagtacatctttagatatttatctatattaaatttttgtggttactacttggagtaaaaaataaaggaaaagccacagagaaattgtgatcacaagcaacagataacatcaacacaacccatcttttcatctatgatgtgatgagcttaagaccaatagctaattttaaaataataatattcaataaaattctacatgcggacgaaaagagttcatttcaccattatccaaaaaggcatgaaaaacttctcatcaattcaaaaaaaaaaaaatcaatgtagagaaaaaaaggaaatagtaaatttgaaaacgtactttggagggattaaattaaactgccaaaaacatattcaactctcgttattcttgtgtcttttcacatgaaagaggtttcatatcaaaagtgctctcatttacaagagaagtgaaaaacagaagaagacgcatcaaagtaagtcttttaagttttttcacagatcctctggaccgttgatgtcctgtaagaacaaaaagcaaaagctgagtctagcgcatttctacaatatctctcctggaataaatttgtgcctaaaacacgttagttaccttattctcgagcacggcattgtcagggatttcaagtttagtcccggcgtttgcctttactgtcactttgcccttgagaacaacgccggagccaaaccaaacatcacctgagaccttaagactatcgagctcaactatactcgggatggacttgaaccggctaaggaaactcgctacctgtataattaccaaaatataaacgaacaaaaagaaaacaagaagcaattagagtgagatactatctttcagagagaccactagagttattttacctttttgaattcgggtcccaactcgatcgctgggtttgtggggtttgttctagctttgtttcttgtgacaaagccatctacgagtgtgtacagatccgactgtgaaaaatgattgaaaattgttaactctttgttgatcatttaatggatatatggggttttgcaggggggaaggagtgtgtttggcttacttgaacaagaagcaagtctgaagttgccttcactggcaagaaccgtgaccgaggtacattcacaccaattgcattatcaaaaaactgtttcaaatgggcaaacaataaaggcagttaactgtgtgtttctttaaaactgcgttaattaaagatagagcgaaatgcatacccttatcgcagcaccagctgcagtttccagctgaagaactttgactccgtcaacttcctgagaagagttaagactaattatgcagaactgcaatagactaactacgtcttgtggtatgattgtagatctagtaccttcgggtttgggatgatctccattttaagtgcatcagcttccacaagctttttgatggctttcaagttcacccatctgtaaaaaattaaacagttgagtgtccgcatataaatttgtaagcttccatgttttggggactagagagctacagctactacttacaggttgttggtgttgaaaatcttgaatttctcaattgatttgaattcatttacctacgagaaagacaagcaatgtaacgcttagcgacacgtagtagatagagttaagtaattttgtttcatgcaaggagcaaagagagctactgaaacagagcaaagagtgactaacagctagaagaattacaaacaagctcaagacaaaagaaatctaaatagagactaaaaaagaaaaaagaaaaagaagaggtgtggacttacatgttcatcaggaacctgagcaatctccaaaagctgagatacacaacagaggaagtaaatttagaggtcaataagactgcttacattcttcaatatcataagaaaaacgaaaaagtgagaaaatcaggagttgcaaagagacaataatatatatctccacatatttaattaggacacgtataataagaagagacattgcagaatgcacagacaatctttaacatgtaataacaccaagtttacctgtacttttccttcgtaagaaatgagagttcctccctttacatcagctagtgttttgggtgtaacctccatacagtactcatttttgttctggatcaggtgcttcaagatttctgaaacagcatggagtgaagggcagaaaaaaattagtctctgattgaatgttattatcctgattgcaactaaagcaaaagtaataaaagagaaaagataactaagaaggatatatacttaagtcaacgattgcgcccaagttgtctgagttggcgatgaacacatactccttaccctgaatagtgtgagaaactcagaatcagaattaaaatggcaaacgttgaaagacacaaacatgaacgatacattctggagacaagaaaacattaataggttacatcaaagaaagaacctgtgataagaacgcatcaagcttgccactgttcatgagagatgggaatacatcaccgtgaccgggaggataccttcacaaattcatcttttataagtggtgcaatctgatagataacacagaaggatgtacaaatgcaaatggaatctcaatgtaaatgcactttgactggaaaccataccatccatccttgtcagtctttcctttgcttggccacggcacaaactcatcagcaacaacacgaggatacttgctctacataaaagtcaatatgattagttccatacttgctctactctggatcgtccaaataaatgagcttttaatttcttaacttgttatggcattgccatgaaatacctgattaaaagtgtgaatatcaacatttgacttggtgtatttttccacaatctgaacaaagacaaaaatcagtaagcctaaaagtataagatacatgtagtacaaaaaagatgtgatcctcagtgaaatagacgtaccttttgtgtgtcatcatgtgtattgaatgagttcataagaaccaaaggaaccttgcagttatacttgttgttgagattctgttggaaagtgctatgtgaggttatgtgaaggcattaagattataacaaaataaatgaaaaacgaagaacctcaatctggataacaatcaggtcaagaaatgtcaaaccatcacgaacttcaataaccgatctgcacaaaaacaggaaaagaaaatgaaacctgaagaaagaatataccgcataacgcatcagggaaacgtgatacagaaacctctagaagatttacatgcaatcgaagatggtgaacatactaacccaagctgtgaacatgaaatgtaagttctattacccctgaagtcgaaactactaccacacccctgccattgtcaatgctaacagataatggtttattactaggacattaagtctgctaccgctgtcaataaatcctatagaccaagaaagatagatcttcaggctgaggaaagatactcagaatttaaacatcaactttgccatctcaaagagactagagaaactaactcctaagcaagaataaacgaaaactgaattggatactactgatagtaacacaagattagagggcttactttggaccagtgcatcccattgtggttcccaaacctccattaagcttcagcacaacaagcttgtccaacagatatttggtctcggaagcatcttcaatacgataaaacagaacaaaataataattctttaatggtatgtagaaaatgatccaatgtaaaactagcatacagagaaataacagatttgtatcattcagaaaaataaaattaccttcagagacgttagccattttatcataaggaacaacaatttcatcagtaggtgtctggatcttgctccattcaatgtgctgggcttcaccacttcaaattcacaaaacattacagaatttagaactaattggtcatctaaatgtaaacaacctaattttctagatctgacaacagatccgattatcagtcattagtagatcgtttcaaaactcagaacaaggtccaagaacagagcaaacaaacactaactggtaaactcaaaactcaaattcagaaaatctatgacaaactaagagcacacgaaaaaactttaaaggccagaaattatttgagattcaagataacagcagtcaaaattcgatcaatacacatccgaagcggacgtacgaacctgaggtaacgtgaaacgaggttgatgaatccactcttctcattctcgctgaaacagaaggaaacaaatcagtctaaacgatgaataagatttaccagatccagaatctgagacgaaagctaatcgagagagcgtaaaacctcatctcagtaagtccatcgacggcggatttgagctgagggagcttctcggttgcggtggcagccatggatgatttcaatccgagagaaattaaaacgcaggagagaaagattgagatttgagcaatattgaaaaatggagagtgttctagagttaaagcggtggggtatttatagtggaagaaagttagtggtgacaaatggatggttaccaaaaatatgtccgttgtcttctctttaccaattgaaagaaaattcagatatctgtcacaccctctcgcgcaatcgcatgcaaactttactactgtaccgttcggtttagtattttaaccatgtgaatcgatttttctaatgaaaaatgtaaactgaatttaaactaaaccgataaaaacccgaattgtatacccgctaaaaaccagttttaactacaatttcaacataaccgatcgaagacaccctagtccagttattatatcatcatatgatggtggaaaaacgagtaccacgtcttgtaggtaagcttagctatccattttcgatggtgcagttttctcgtgcgagaaaagatatttgggtttattggcaaactagacactttttcaaaagttatttgagaagtaggtagttcttttagatattagagaaataggtatttttttttcttttgtgggatagaaaatatgtgagatagaaggtacataactaaaaaaacaaaataaatgttaaatacaattgtacccttttgttttgtaagaaagaacttttggtgtaggcccaaatcttttagagataatgggtcaaatactattttcatagcctaattaatttgacttatgttatttggcccaaaaaaaattccaatcgttttcgtttttcaatctatttcttcagacggttaaacttaacattatatcatttttgtcgattaaaacgaaatttaggaaaattctatggtgtacacaatttttaaatgaatacggaatggtgtaccattaaaatcatgatattggtgacgggatggtgtacacaatttttaaatgatttaatataattaaatttaatggtgtacatgttggtgtacaatattatgatatacgagaataatgacagaatgatgtacacaattttaaatgatagcttgtgagattggtagacataacgtacaacatttggggtatactaataggaaatatataaaccattatttcaatttactggtgtacatcatttcgtacactgaatttgtacactatctcataaaccttcaaatacaccaaataattctctattttatagatatggtgtataatatttttgaatatataacctattacttcaatatactagtgtacatcattttgtacactgatgtctgtacactatctcataaactttcaagtacaccaaataattctctatctcatagattcggtgtacaatatttttgaaggtgtacgatagacgatctaaagagttataaatggcgtcatctactattttattattttatgtacactatcgttgttttatctttaaaattattgttgtacactatttttaatattattttgtacaccatcgaattcagataaaacaagatagaatattacgtaaccgtaaaatataataaaattaaaatctttagagatgtataaaatttagtatttcaaaatatataaaaatattaatgatgttagtattttaaaactaatattacatacccgcaaaatataataaaaataaaattttagtattttagtaaacttattttagctaaatataacaaaattagtattttaatatgtattaaaaattgaaaatgttagtatagtaaaatgttaaaaataatacatatccgcaaaatataacaaaattaaaatctttaaaatacttaaaaagattagtattttaaaatgtataaagtgattgaaagaattttattgatgtgtattttttaaattaagaaatatattagtaattagaagataaaaaaattattgggctagcccatttaatatcacactcatatgtcttttgtttttatatgtttacataacaaaacaacaaaaggatatatttgtctattaccaaaatctctatattagagaggagctctattagagaagaagagaaaagtacctattcctctaatatctaaaaaaactatctagtttacaaattatttgtgataaaagtgtctagttggcaacttatctcaagatattttgatgtatcacttacaaacatgcatgaaagctacatttattctctaactagatcaatttcataaaacagaaaatatcaaaaatattatataaaaacagaaattaagcaataatatcttataaatccaacaccaatgtcagaaaacaaacatgccaaaaggcaacaacataaatattgttcagctaaggcccttaccttagaaatttattggaataagttttaaaaccaacgaaaaatatggaaaagtactaggactctccttagagaatcaaacggagaaagctcttctcacttatttgaaaaagaaagaaagataaaaaaccaaagagttgagagttgggaactggtaacttcatcaaacgactctcactgaccatcattcgcacttgagcatggctttgatcctttgaacggtggagctaatcaaggtattgactgtggtggcagaaacttccaggttggtatcaggagagtaactcggaccggagacaaggatctggaaagccacggtgaggagtgtatagctgccaccctcggcttcgccctcggaaggacggccgtcacgggagatcataaaaccggaagggaggattggaatggtggtaggatcgatatcgcctgaaatggcagcgcaggcggtgtttagatccattggagcgtaggccaccattcctcccaatgcatctttgaagctatcttggagtatcattagcttagtattaatatccctaattgaaggctatataagaaaacaaaaaaaaaaaccaatcatatagttaatgccaaagttattgaaattgtaatagaatttattaatatagatgtgaataactttccgatttattcaagatttgatgaccggatctataaaacaaaaacgaacaaagttgaccggttctatggaacttttgctcttttatcacatctctatttaaatgctagctatgctaaatataaagttttctatcctataaaaatcattagttttttcagtaagagtaatatatatacctcgagaaaagacacagtgttccttgggtttgatccggtgacgaaacgagcagcctcagtcgctggattcccatggcacagaacgtcccacttttttgcatacaaacattaaaaatcttgttaattaccaaaaagtaaaaaagaagctgattaataagttggacttgtgcagtgaatgaagccatttattcttacctggtgacgaacctccagattcttaaggaaatcgtacacttggacaggagggagagggagggataaagatgaaccagcacagacaatgagaccgggcggttgacccgcctcattgtttatccgcaccccaatcctaattccgctgttgttagtttcagactgtggcgagaagtcgagtttgttaaccattttcatcatccatgcaaagttcctcaacattctttctcccaaatgcattacgctatttctgcctcgtattgtttgcacaactacaaaaaaaaatcacaacattttaaattattcatatataccaaaagttttgaaactatcacttgttgtcaatattaaatccgcatttttaacacattttaagttgcacaaaaaaaaagttactttgtatattaatgtacgatataatataggtaggtgtagatgtaattaagtacctccgggattgtcattgttgggcaaggcagggacggaggtggagaaaatcagcctctcacacgtcctctcaagagtaacggtccaacgtcgagctccgtagccaaagccgccgtataagaggtctctgtaaagcttatgtggccgcactctattatcattcactaccacatgctctatccacgtcacctgcccatttgtttttgttattttctggttttgctttcaataacacatattctctaaaaagttattgaagctctctatatatacactaatgaaatggagaagaacagaagtttaatttgagaaataaaggtaagagtctattaattgtagatgtctagatgaaaatgttgatcaacatcaatgggaatagttagaaagaaaaatgtgtgtgtgtgtgtgtttgtaaactatatattaaaacacaatagatttacatatataataaaaagggattttaaagagaagagagaccttagagaagccgtggggcaaggcttgaatgagcacacctgagggacgtttggtgcaaatgggaaacgaaagatcaaactcaatgtttgggagatgacacgacacatcagcaatcatccagacattgtcttcaatttgttggcaagtccttaggatcataaattccctcggtggcaccaatggtgacagtatgtgcagttgctcataaatctgttttatttatcatccaatttgttttcaccaaatgctcataagtcttaacaaataaaattttaaaatattgtaaagattcataccactcttgagaaagtttttcctcgatggtcaacggaatccaagacgtgaatcgttttagcttcgttcacaattgttggaaaaagcctcgcccatttctcctgcattatattgtaaatgtagctttgagaaaacatgtatgtacgtataagtttaatagaaaaaggtattacgatatttgatcattcatttgttgatgtcagcttagtacgtaccgcagttaagaagatgtcgatcaagtttccagcatccatttgaaccaccacgacatctttagaagactcaggacgaccatttgtgttagtcttagtaaaatatttctcatagagccctggatcaatgacgagcctatcatcaatagacgactttttccacattgtatcatccatttgaatgaggctcaaaacctctgacaccgctttttccgctgcttccaacattgcaattttctccagttgagatagtggttggaaattctgcatttccagcggctttcgcggctgaggcggtgcggtggtgttcatgtttccacgagtgtatggtcctctaaatatgcttgaaggctcggggagacggttagaagaggttccgtacaatgctggacggttcttggacgttgatgcatggtttgatggaccatggagatagggtgtggcctcgacgttatgcattgagtgacctccgtactgttttaggtagtttgagactctttcatactgaaattcatattttgatcaataaaaactatatgagtgattatattttttccaatgtagagacgatttctagtttaaaaaattaaaatctcatatagtcacatcacatatgatgccaagaaaatcactctccaatagagtgccaactcatcaaaattcagtgaaatattaattatttctgtcaaatgaatgaattagatgaatactaagtacacctaaatctaatagttatatagagatgtaatacactaatactcatgcaccttatcaacagtttcgttttaaatatttgattaataattaagtaaaaaaactacaaataatttgattacttaattaatgttttggaataccaaaacaacaaaaaaaatgttgcgttaaaattttgaacagccaaaatatttttttacttaaatgtatacaaacttttacattcatacttaattaataattataagtatttttttaagtatataagtcatgaaaaatcagactattttagtatttaaaaataaattgcacgcaaaaatgaactgaataataggtaaaaccagaaaagtaacaaatcatattattgttcatataaacgcataatcacaaaactgaggcgtgcaaatcatgaatattttcaaaacattactaggataaaaaaaaggtcatcaactttagaaattagaatttcattttgcaacatatgagatagtaaaaataaatactgattacgcgaaatataatttattttttatataaatacttgcgaaattatacctcatctttgagataagcgttttgtgcacggagtttttggagatgtcgaagttggtcttctctcccaggaccacgaccaccacatggagggcaaaccacattattcagtgcatcttccattgattcgttctcacgtctaatcttaatattttctgccctaagcgctgcattgtctgctttttcattgtgactctagaaaaataaatcaattttggtttttaaaacagaattgtcgtgttaattctactgtggtagacaaaaaaaatcaataatgaagatgaacaataataatgactagtatataaccattaattggtttaactaaattaaatcattttttatgatatacaatagtataaaacaaacaatagataagacaaaaagaattaccttagcttgagttcttttgttttgaaaccaaaatttgatttgttttggtttcagattcagttcttcacccaacagacgtcgctgaaattcgtctggatgaggacattccttgaaataccttcaatcgattaaaaaatattaacaacgaattacgaagccaactttttaaaaagtaatataaattaattagattagattaagatcttacgtttcaagcctatgaatttgttcattagtgtggcgatggtaacccttcttctcgtgacggttgttggtgttggcgtctacatcattttcccgttcatcacttgagttgtcatcgcgagtaaaatccatattttctaaatccaaatgaaagatgatatacagaagatatgaacaatctaatcgctatatatttatataaaaaataatagaaaactatattaggtaaataatgtataaaagattgttttgggtcatcatattaaagatttatttcattttcttcaattttaattaggaaatagaacaagtaggacaagcctcaaaataaaataaaacaaaacacatttatgaaaaaaatctcatttacagattttcaaccttttgggaacgttacttttaaaggtaatttatcatttctattttatattattttagtaaaaaggagaaatgtttatattttattttaaattttgatttatatacatcgttatttcacgctttaccaaaaactacaatggttgtaaatccaaaatatgatagaaaaacttattttccttttgattgaaaatatattaaatacccagtaaggatataaaatattgacattcaatgtttctgttgaataatttatgttccttttctaattacttgataaactttaatctaaatttattgtggtgtcattttatcaacctcacaaactaaaagctaaactacatctctttgtaaaatagttcacatatgtcactattacattaattttacttttttatgaaaaacataattataagatcaaatcttatacctaatattcttatcacctctgtttgatcctaggtgaaacaaaaaaaaggtgaatcatctgatcatttatattgtaagaacaaaatttttttgcatatatgattcgagctagtttgtaacaaaaaaagcgctcaaatatgttgttggatgttgaagaggagaatccaatatatatgagaagtaatttttaaaagatcaagatatgtgttttcacatttcacaagctttcttaaaatattatagaccaaaataacagttgtttttttacattattacatgtttgcaatttcaaaaattaatctcacttacttatttgaaaatggaacaaaacctctataaattaatattctatctcataaattagtaacttctataattttaataaattctttctgttccaagttgggaccagtgtaaaaatgacataaatcgataaaataatattttttttcaaaatcatatataaacatatggtctctacaatataaataattaataattgtataaagttatcaataaatatattaagtgaaatataactctagtatttttatatattgtattaattcttggtagagtttatttctaatatttttactacattgaaaaggtttgcactatgttttaaacttaataattgtttttctacttgtaattgatttttgaaagatattaattataaaggaaataactgtgtttgagagagtatatatatattatatgataggattaagaaggatgttttatcttcattggtcaagatggaaaaaatagttaacatgatctctcatcttgaattatgtaataagtctatgcatttactgatccatttgaaatagcagaatatgaaatcaaattaattttattgagatggaagctaatgaactattaaatatgaagaatttgaaatcctttaccttttgcttatgtgatattaccaagctatgatgtgagtttgtatgtgatatcatgttttatatgtaatatttcgaaaacaaatatataaacaaataaagagaagcaaatgaaacaaaactttggcttttttatatatcatttgtcatttatcatttacaaacctaaaagtcaaagataaaccaaaggataccctgatttgttaatgttatgatatttgagcaaaactgtggagtataatatattataactcattgaatataaccacatagtcataacaaatcaaaataaaataaaagtttccaaaacgtagtcataacaaataacaaaattatttaaaggttttcaatttttacaagataaagtatattaaaaatgataaaatagaataatatgtaactttgttaacatcttggaaaaaatagaaaatttaatatgaagttgtgtctacgaattctatttatgttctagttattgtacatattcaaattaacgatgctaaatcattcttctgatattgagttgtgtcacatgttaagtatatttattttaattttcttagtatcataatgttttctttcttgtatgattaggtgcacatggaatatatgtcatactattttaaaattcatattttattaattcttttgtcatagctagccatcatatataggtagaccagtatataatagaaaaaaagaacacattcaaatgattttgatttcttctaacactagattaatcttaacttcacctttttttttgtcacagttaacatcttatataacttcatttcaaatgtctatattttttaatgtctacataaatatacatttcatcacacgatttacaatatgaatacatgtttataagcttttagatcatggaatataaaatagtgcactttttaattatgtcgatatagtctttgatttttaaaaaattaaagatgaaaaattagaaaattatgtgatgcattaggactcaataatagagactatacataataacaattgcagttagttcttagttggatataataggtcagtaaaatatattattacaaacatcaactctgcactacgcaagatgtagtaaattacgaaaatatatgataaacaaattcgcatactacattatgactacaatagccaccttccctatacattatgacttctaacattgaaaaaatttgcaaacatttggtgtaaattaacaaattaaaaacatttggtctaatgtatgaagaaaaaactagatattccgctaatttaaacaaacatttggccttataagaaattttaggtaagaaaaaattctgagaagtcttttttattcacatcacatagtcaatattcaattcaatgcatataaatttcatgtaaagcttcttttttcctcggatcccattcattattttacttaccattgaatactttcaccgtgtagtctttttttagaaatcgttgaatatcaaaaacaagaagaagaaaaagaaaccgtgttttcaatgtgctgtcatacgattcatgaccctttatgaatctaatacagagtttgaaacataaactaaacttggaagtttgccaaaaaaaaaaaaaaaaaaaaaacttggaaataacacttctcaaaaagatattgggtcaaagtctaaaactgaaaacgaaactagaggcattattctctaattcaaacaaagtttagggcttgggaagaaatattcacaaaaaggaagtttccgaaaattcttttatattattccccaagcaaaccattcaatatcattgattattgatataaaacccatataaaggtgtctctcatcatcctccattcccatacatcactttcctcgatctcactttctctctcttatcatcatctcctggtattctctctctctcatctccgtgatggtgctctcccacgccgtatcggagtcggacgtctccgtccactccacattcgcatcacgttacgtccgtacttcacttcctaggtacaaaaaatataacacaatcttgatcacattatacttctatattttcgataaaaatggagggctaaaaacgtagatatcaggttcaagatgccggaaaactcgattcctaaggaagcggcgtatcagatcatcaacgacgagctgatgcttgacgggaatccacggttgaacttagcctcctttgtgacgacatggatggagcctgagtgtgataaactcatcatgtcctccatcaacaagaactatgttgacatggacgagtaccccgtcaccaccgaacttcaggtatatatagttctaagtcatgactttttgaaaacgagatttaatcataactatatatatcggcttatgtatggagaaaaatgtttatagaatctttagattgtttttttccaaacgactttgtgatagaatgtggtcgagttatgataaactcaaatgtttgaatgacccggccattcatattctggatcgagattatagaccattattaatcagtatgattcataattaagatgctttgttattcaaaaagaaaacttttcttttaatctttttctatgtgtataagtatatatatatatatatatatatatatatatatatatatatatatatatatatgtatgccaacgttgttgattttcttgtatggttgtgttgatcgggtaatcgactttgggtgattttgaataatatagtattagagggtataatttaatactactttatttccgtttacgtagtacagtttgtttttgggggaggttggatctcggaaatactagccggtgacttatgagggtctttttaaagtcttaaggttgtcaataatttgcacaaaaaaaaaggttcttattaacaaaaaaaaaaaacttagtttcttaaaaatatttgatactgttattagtttgaatcattcattaataagatgctttatcatggaatctgatttccatgcgtatttaaatggacacctactatgttgactttttcaatggtgtgtgactgtgttgatcaaatttaggataatatggactatgctatagtaattagggggaatatttgtactaccttatttccgcaaataccatccattgtagttgagttattttgtgaggacttcctttaatcttaataattggtcctacagtactaatatgcgaattgatagctagatacttttaactaatgatatatttttattgggccataacggaaataaaaggaagacaatatgaaatatcggttatggtttgaaattattagatttctcgtgtttcaaattaaaaacttaaaaaatgacctaattttctagcatattttttttttttgccaactagtatctgatcgtaattatttacatcaaaagctaaaacatgataccatgttggattatagaatagtattgtttatgagtcttatgacaataggacttatctccacgacttagtgtgtgcattaatcttagttttgctttcacatctgtcacattgtttattgtccactaagaatattgtattaagcatcaatctcgatgtcagaaaatgattagtcaagtgggtttcactaatttattctttttgttttaatattaaaaaacagaaccgatgtgtgaacatgattgcacatctattcaatgcaccgttagaagaggcggagaccgccgtcggagtaggaaccgttggatcatcggaggccataatgttggccggtttggccttcaagcgtaaatggcagaacaagcgcaaagctgaaggcaaacccgtcgataaacccaacattgtcaccggagccaatgttcaagtaacgttttctaaataaaagatgcttactaaacataatctttttgatcaattttcttataacgattcaaatgtttaggtgtgttgggagaaattcgctaggtactttgaggttgaacttaaggaagtgaaattgagtgaaggatactatgtgatggaccctcaacaagctgttgatatggttgatgagaacaccatttgtgttgcggccattcttggttccactcttaatggagaattcgaagatgttaaactcttgaacgatctcttggtcgaaaagaacaaagaaaccgggtaattacttaatggattgtctacatgattacactatacgataaagaatatttaagttaattaaaacaactatgcatgtttttgatagatgggatacaccaatccacgtggatgcggcaagtggaggattcattgcaccgtttttgtatccggaattggaatgggactttagacttcccttggtgaagagtatcaatgtgagtggtcacaagtatggacttgtgtacgcagggattggttgggtgatctggagaaacaaagaggatttgcctgaggaactcatcttccatatcaattatcttggtgctgaccaacccacctttactctcaatttctccaaaggtaactaatatttttttaattattatttttctttgtagcttgtcttaatcttttgtgttcgacttttcattattagtcatgatctaaagtagtctaaccatcaaagtgatggagatcaaattgctttccattttaaaatacggaaacgacaccgttttttaattcgtagtagtgtagtaattgatcaatcactatgattagattaagcaattgtgggaaacttcacgtaaattatttccactttttgttttttccaatttgtttgactttagtttaagaaatcggtagtaaattataaaatcaaagggatgggaggtcaaatttgtttccatattaaaattggggaaaacataattaaacgttgtcgtattcaaaaagtcttctgtcaataaacgcaggttcaagtcaagtcattgctcaatactaccaacttatccgattgggccacgaggtaagtcagtccacgattatataaatttattaatcaagctaattaattagacattactttaacaataaaaatgtatcaaacagggttacagaaatgtgatggagaattgcagagagaatatgatcgtcctaagggaaggacttgagaagacagaaaggttcaacatcgtctcaaaggacgagggagtgccacttgtcgctttctccttgaaagatagcagctgtcacactgagttcgaaatctccgacatgcttcgcaggttagttagttgtcttaactaaaaagatttcaaatactcttttcttatttaaactttggttaaagattcataaaataagtagatatttaatgactatgtatatgtaattaattactctataaatatttgatatgtaggtatggatggatagtgccggcctacacaatgcctccaaatgcacaacacatcactgttcttcgtgtggttatcagagaagatttctcgagaacactcgctgagagacttgtgatcgatatagagaaagtgatgcgtgagctcgatgagcttccttcgagagtgattcacaaaatatcacttggacaagagaagagtgaatctaacagcgataacttgatggtcacggtgaagaagagcgatatcgacaagcagagagatatcatcactggctggaagaagtttgtcgccgacaggaagaagacgagtggtatctgctaatcgaaatatatttacttcaaatgtttgaagacttttattaataatgcataattgcattgatttggatatttgaatgtttcattcccctttatcgctgaaccaagtttcatttccctttattgctgaagtaagtttcatttccctttattactgaaccaagtttcatttgactttgatttgtaatatcttttgatattattattattgccgtatttttaaatacgtttatctgtttttttttttttgttccttgtgcatcatccattatacataggattaagagatctagtagaacctccttggatagcgcaatgttgtttaacgtaatagttgttgaaatgattactgaatgatcccaaattttggattagttcattattaaaaaatgaaaataattttgcaagattaactagtaaggtttgttttgcatataaatatgttgttaggattgtaaactcaaacgtgtaaaggtcgcataaatcgagatcacgatatcactcgtctctggcaaggtaggttgggaacgtatttgctctaaagctatagccatcttgtaaatagatagacatgtattctaaaatgtaaattttttaaaatataacaaactaattttaattttattctaagttttcttttctttttcttatgtggtatgagatctgtaccaaattgcgtaaatgtaagcatgataacaaataacaatgcacaaaatttaataaataaaaagcactgatatctttattaagaaagaaaaacttaaaactctagaagaataacatagtaaagcataataaaaagtgaaaaaaaaaacataacttaaaatgaaaagaaagaaagaaagaaactagctaagagaaatcagtacttctaattctaataaattcctaattaaaaccctaagctggagtgggagcagacggagtggatttagctttggtagagcaatgaagcttaaccacacagtcaaagaaagggttgtggtaggctccaaagacagtcttatcacaatcttcatccatcttctggatggaggcgcaacaatccaatccaatagctggtttgcgggtgaagaaagctttagcgatatccgccaaacatgtttttacatccttgcaatcggccaagcatttggttacaaccggtggtggatggaatggaatcgggtggaagccggctgggattggtgggagagcctttccggtggtggggaatggccaatgtggcttagggtaaaagtgagggtagaaaggattgtaatgccaccattcgagctcttcagtacgtaatggaaatgaatccacattttttgctgtgacttgagatgtgacacagcttgagaagagtatcatggcaacaa

SEQ ID NO: 715 - DNA, 81701 bp, Arabidopsis thaliana
gatcatttcccatttcttcacacttcaatttcagaataaacggttcctaaactgtaaacaagaaaacacattggcattaggttatgaaggaaaacagataccttgttgcatcaaacacattggcattaggttaagagaagggcaaaaacagctgtttctttttctctacagatggagacatatcgttcacagaagatacttgtgactatagttaagaaacttgaccaacattaaaatccattttcacacatacaaagtccttctctaactaacaagaagaatcattaaaacattctaggtatgatttctagggttagggtttcaaaatccctgctctaacagaacaaagtgcattttaatgtaaaacaacagaaagattctcatatcacaagattgaatgctattcaacacacaaaacctagaaaaaaaaatacgactctaaacaaaagattaaagatttgtgtaccacaagcttaagggtttttgattctttctttctgattcccgctaattcgactctgcgacggtctttaacaacgagaactgatttgatttcgaaattctcagagtgggataacgctaagaaagatgacaaagagtcgtctgaacatatatagttctgccttcgtcgaagcagaggaaacgcctgagacgctgctaatcgagccgtagtttccacgctacgcgtttgcttttattcttcaagataatatatagtattaattacagtatcttcagaaatgaaaacatatgtcttctattgtttatatgaggaaagaaaaattcgaataagttctagatattgaaaaatgttattacgataggatctgattccagtcaaattaatacacctaatccattacagattttactaccattttaaagtcacgtgacttttacataatctaaaatcaaaagagcgaaaaataaaacaagaggtcggtacggttcggtttagcattattagaaagtagaaaccaaaccaaactgaattggataacgttcattgatcagaataggtaataggtcatgtttctggtaatagctgacgtttctggtaaagtcttctgtagattcttgcaccttcgaactctgcgtggatctctcgttctgttcttatacccatcgggttttccgttaaccacccatcctctgtgtcaactgtgtccatgtgttgaagaacatttgattcctcgtccaactgatctctcatgtcttgagccacatccagcacatcggattgcacaaatatctgtgcacaaccagtaacaaagaaaatgtatatagttaagtttaaactgtaaaagaaccagtagtgttggtaggcagtaagcaaaacacttacttttccaccgggttttaggttttgaagaatggaattcaccaaaggcttttgaacaacacgtctcttttgatgacgtttcttgaaatgaggatccggacactgcatttttacacgtcaaaacaaataagttggattatcatcaccacctgaagaaagagccggtaaatatagctttctcggatgcttacaactttcttttatcacttaccaagattgagacaatctccaatggtccaggatagctcgatataagatgttcaaaagaaaccatggcgtttgcaaatatgaagtgtctgaaacccatccatcaaagaagttatcaacagagtatataacataggtgtattcaaaaaatctttcctaaggttttgggatgcagagattacacgtttgaaagtccgagctcattcacccaaaagttggcgcgcttgaccagctgcaaagaaatgtgacaaattaaacttcattaggccaaagataccgaaagatacatcagcttaagtagatgaatgatcagctggaaaacatcaaaacagtcaaaaggagatagatccttactttctgacgtatttccagccccaagtaatttcttgattcaacattcttattggcttgccataggagaaatctgccactacctaaaatataatgacgtagccacaggttagtagaagaatccaagttcaaaaaccaattacaaggcagagaggcaagaacggaaatcaaatgggaaacttttggcctttaaaagttgaaacacattcaagcatgaaagaggcgcaagaccaggaacgatataaaggagagctatttgactactcaaaattcaaattcagattccagggaattataccaattacgcaaccaaaagtctccaacaactagtgtataatgtaacttaactaagaaaacaggatctgcataagtatatatcaattttcagaagaagatataaatagatttgagttgagacaaagcataagtcccacaagtctaagcaagctcacaagttaccacttccaatatccaccataagaggaagtgatggatccttataaacttcatcccaaacaggaactggagctggtttctatcagaaagaagaacagtataaatcagttttagtgtttcacatatcatttcaaaagtcacaaactttgcaacatcatcaacttacagagaaagaggaactgagaggattaacatgctgtctgattcttacatgacccacttcctgcaaataaaacagagagaaacacaaattatactcaaccactaattagagatactgatagaccagagtctatgaagatgaaaagctatctacttggaacaaaaagagaaaagaacactaatcgaaacaaaaacaatacccagaaagcaaagactggaaaaggaaacaaatttagggtaagcaaaaacagagggagagagaagaaaggaggatacttcagatatcttatgattgaggttaagttctgcatactccaattccaccaattcattgcttctcagatccttaaaatcgacacaaactgaggtagacgctgacgaagacgcagaaacggcattaaatgctctaaagctgttacaatggcgagggattttgtgttccctcatgaagataaacggagatgatgctaaggagaacacccttttcgccaggagcaatggtgtagctgaagacgaagagcaagcttgacatagagaagccatttttgttagagaaacagaggaggattggattcaattccagaccataaaaatgttttcttttagtgttcttctcctgcttcttaaacccaatgaaggaagaagaaagctgtgatctcaatctagaaaacgttcaagagttttgtacttaatgtgataagaatcgaaataaatggggtgtttgtgtaaatacattaaaatgcttaagaacttgtggattttaaaaactccagctttctccgcttgagctcatcatagccactaaccaaaaagatggcctcggcgatggttacatcgctcaggctgaggccaaacttctccgcagccacgtcaccctcctcctcttcttccgccggaaatgtcaagtaccgacccgccgtaattctcccggtaaataatctccgtcctttgattgagacaactatggcggaaaatgtgtggttccaaaatttttttttattattttcactgaattttctgtttcttatagttttaagtgttttcctgcattttcctttagaaacatatttaaagtccaaaacttggtttttgtgttatatgattcaatggtgggtttagtgtcactatggctgctttgtggaattggtttattagggtttagggaataatacaggagactacaagaagctggaggtaacattgggtgaatacggtgttcctgctgtggttgcagctgtatcaaggcttgattggtttagaaatgcagccggtttggttgatccagcctactggcgtggcacgctccgccctcgtcctgttcttgattggtactgattgctcaatgaatgtatcacttgttttgtgttttgaattttttgactggtttcaaatgatgagtcttttatatggttgatcaggtacttgaatagaattgatgatgcagtccgtgaagccaatgagctagctcaaggtaaatctcacatttgatttgaagctttttgttcttggatcagacttagctgctagtttcagttgtgaatcgcggtaaccataaaactcggtagttttgcgtcatttataggtcaaggattgtgtttgattggacactcagctggaggatggcttgctcgagtttacatggaagaatacggaaactctgatatctccttgttgttgacacttggtacgcctcacttgtaggtaacatacatgtcgattacattttttagacctttcaagagatattgcttcgatgttttgaccatgtatggttttgtatcccgtttagaccaccaccgagaggacttccgggggttattgatcaaacaagaggtcttctctattatgtcgaagagaattgtgcaaaagctgtttacactcctgagctgaaatatgtctgtatcgccgggaggtaatgcttcttctagaaaccatatatgtgtggaacctctgtccaatctgaatttagtacttcatgtgtagatacattcgtggagctcgtttggttgacaatgcagatgcagatattgattctgatgtaactgttggaatcgacagtggagaagggatttcagaacttgctatagcaagcaacaagaagagtggtactttccgtgctcgttttgtagggcaaggatacaagcaagtatgtggaagagctgatgtgtggggtgatggagtagttcctgaggtttcagctcatcttgaaggtgcacttaatgttagcttcgacggtgtttaccattcacctgttggttcagacgatgaaaccagaccttggtatggctcaccggttattgtaaaggactggattcaccacctccttgagtgattttacaacactgattcgtttcattgtttctatcttttgactcgcaattcaaactctaatcacataatgtatttatatttctttcactattgaatgatccaattctatcaaaatgccatcaagaagagatttgagtaaaagctgctagatttcggagaatcactgctaaattgcaaacaaggtcaaaaagttttgattttgactctgtctctgtcacgcgtcattgaaaagttggaacctttgacttctgggtatcattttcatggttccaaggttttggagatactggatgatgatgatagatacctgcttgagctaaaatagtaagaaggacaagaattgtcgactttaactgcaattgatggaatctatgtggtagtagagctcagagacaatccatggcttctcttccttcttcttcttcttcttcttcttcaacagtgtggaaaacggacgttttcgtgagttttagaggagaagatgtgcgtaaaacattcgtgagccatctattctgcgagtttgatcggatggggattaaagctttcagagacgatttggatctacagagaggaaaatccatctcccctgagcttatagatgcgatcaaaggctccagatttgccattgttgtggtctctaggaactacgcagcttcaagctggtgcttagacgagctcttgaagatcatggaatgtaataaagatacgattgtacccattttctacgaggttgatccttcggatgtgagaagacagagaggaagtttcggtgaagatgttgagagtcacagtgacaaggagaaagtggggaaatggaaagaagctttgaagaaattagctgccatttctggtgaagattctcggaattggtaagtttctaaaacagtttagttggtgtatattcaaagttagtattaaagtgatgacttttgtatggtattggtaggagggatgactcaaagctgattaagaagattgttaaagacatttctgataaattggtttctacttcatgggatgattcaaaaggtttgattggaatgagttctcatatggactttctgcagtctatgatatctatagtggacaaggatgttcgaatgttggggatttggggaatgggtggagttgggaaaactacgattgccaaatacttatacaatcaactctcaggtcaatttcaagttcattgcttcatggagaatgtgaaggaagtctgtaacagatatggagttaggcgtttacaagtggagtttttatgcagaatgtttcaagagagagacaaagaagcgtggagttcggtttcttgttgcaatataataaaggaaaggttcaggcacaaaatggttttcattgttcttgacgatgtagatagatctgagcaactgaatgaattggtgaaggagactggttggtttggtccgggaagcagaatcatcgtgacaacacgggatagacatttgctactttcccatggaataaatttggtgtataaagtgaagtgtttacccaaaaaagaagctctccagctcttttgtaattatgctttcagagaagagattatacttccacatgggtttgaggagttatcggttcaagctgttaactatgcttctggtcttccactggctctaagagttttaggctccttcctttatcgaagaagccaaattgaatgggaaagtactcttgctaggcttaaaacttaccctcatagtgatatcatggaagttttgagagttagctacgacggattggatgagcaagagaaggctatttttctctatatatcatgtttttataacatgaagcaggttgattatgtcagaaaacttctggatctttgtggctatgctgctgaaatcggaataacgatacttaccgagaagtctttgatagttgaatcaaatggatgcgtaaagatacatgatttgcttgaacagatgggtagagagcttgttcgtcaacaagcagttaacaacccagcccaacggttactattatgggatcctgaagacatatgtcatttgctgtcagaaaattctgtaagttagagtgcatgtgcttctcttctcgttctatcttttaagaattttcatgtagatggttttgacttttgatagcttcttcttcatttctttagggaacacaacttgttgaaggaatctctctgaacctctctgaaatttctgaggtatttgctagtgatcgagcgttcgagggattgtctaatctcaaacttctcaacttctatgatctttcgtttgatggagagactagagtgcatctacctaatggcctcagttatctcccacgcaagcttcgttatctccgttgggatggataccctttaaagactatgccttcaagattttttcctgagtttcttgttgaactttgtatgagtaatagcaatcttgaaaaactttgggatgggatccaggtaatttctctataaaaactccagataagttttctttttgctatttgcgattggacgagaagactaaatacatctgatgtgaaaaatttcagcctctgaggaacttgaagaagatggatctttctcgctgtaaataccttgtcgaagttccagacctctcaaaagccacaaatctggaggaactaaacctttcctattgccaaagcttggttgaggttactccatctatcaagaacctaaagggactttcttgcttctacttgactaattgcatccaactcaaggacattccgattggaataattttgaagtcgcttgaaacagtgggaatgagtggatgctcaagcctaaagcattttccagaaatttcttggaatactagaagactctatctgagcagtacaaagatagaggaacttccatcatcaatcagccgtctctcttgtctggttaaattggatatgtcagattgtcagagactcaggactcttccaagctatctagggcacttggtctcactgaaatccctgaatttggacggttgcagacgtcttgagaacctcccagacacgttacagaatctaacatctcttgaaacgcttgaagtgtctggttgccttaatgtcaacgagttccctcgtgtttccacgagtatagaagttctgcgtatatctgagacatcaattgaagaaattcctgcaaggatctgtaatctctctcagcttaggtccttggatatctcagaaaacaaaagacttgcatcacttccggtaagcatttctgagctaagatcacttgaaaagctcaagctttctggatgttctgtactcgagagttttccactagaaatttgtcagacaatgagctgcttgaggtggtttgatttagataggactagcattaaagaactacctgaaaacattgggaatttagtagctcttgaggtgcttcaagccagtagaacagtgataaggcgagcaccatggtctattgcacgacttacccgtcttcaagttttagcgattgggaatagtttctttactccagaaggtttgttgcattctctttgtcctcccttatcaaggtttgatgacttgagagctctgagcctaagcaacatgaacatgacagagattcctaacagtattggtaacttatggaatctactagaactagatttgagtgggaacaattttgaattcatccccgcaagcatcaaacggctcaccaggttgaacagactgaatttaaacaattgccagagacttcaagcattgcccgatgagcttccacgaggtctcttgtatatctacatccatagctgcacatcactagtgagtatctcaggttgcttcaaccaatattgtctgcgaaagcttgtagctagcaactgttacaaattggatcaagcagcgcagattctcattcaccgtaacttgaagctagagtcagcaaaaccagaacactcttattttcctggaagtgacatacccacttgcttcaatcaccaagtcatgggtccttcgctgaatatacagttacctcagagtgaatcatcgtctgacattctgggattttctgcctgcatcatgattggagttgatggacagtacccgatgaacaatctgaagatacactgctcttgtatattaaaagatgctgatgcttgtgagctggttgttatggatgaggtgtggtatcctgatccaaaagctttcacaaacatgtattttggatcagatcaccttctcttattcagcagaacctgcacgtccatggaagcttacagcgaagccctgtttgaattctcagtcgaaaacacagaaggagattcctttagcccgcttggagaggttaaaaaatgtgcggtacaccttatatcactcaaagacatgatgcaagagttctctaatgactctgacaaaattcagagttctgatttggatcttccaaaggcatttgatgacgcaagaattttgaaaagaagagcatatgaaactgagttcttgcataaggaacaactaaatcccaagaggatcaagtttcttccagttcctttggctcgagagcgtcattccaaattacatcagcgaaatgtcatacgaaagtaaaaaaaattacttggtttgcttgtaaacataattattatatattgattgatcacatatattttgataacatcaacatatcatgaacttgatctttgaagaagcaagtacaagaaaacttccgctataagaagcaaaggtccaagtaacaagatttactatgatagagatagagagtgaacacaacgaacccgaggagataaattacaatctgaaacctcccggagacgcgatacaaaatccaattgtcgctacctcgactctacatgttgcactgctagaataaagaagccatctaatcttttctacctacaagggctgtgtacaaacaaattcttaccattccggatgatttaaggcgttcgattgtacttgagatgttgctcatagaattcaatcagctggtgtgggaaaaacaaattagaaaagctaataagaaacttccaaatgagtaagtgcagaaaaaaaaagctataaagataatcttacgagatgaggattgtgagccttgagaaatctgttgtccaccaatgcttccttcccatcagacctatgagagtaaccaaataagtacaattgtacaaatatgaaatcaaattacgagaaatgaccaaagagctaaagagacaaacctcagcgctaaaaaggtcaccaacacttcctggacattgtctgatacagatgctgtaaaactcattggtttaagtatcttcgtgatgtccaactcctcaatcttggttttctgagacaaattacaattttccatcacaccaggatattcattccccatccttgcaatcctaccaaaagagtctaatgtagtcaaatctggtgtcagattctgatctgtaggtgctgtgtggttgttacttgtggatccatcttgtttgaatcttttcacagaaccagacttcctccgcttagcacctatgaaacgactgttcttatcaagctccttaggataaaccttgagaaggccattgggtcttacattatcaccttcagaaccaatgcctcctccttgagaacatcctgcaccgttactattgttgactggtcctcgtagctcgttaagtgttggatcatattctttctcattgtcaatcaaacgaacttgtcgggccatcccaacactcccactgttggcttcaacttggttggatacataagcattcttcgcttccacatctctatttaatagactcgaaccgcttaggtctagtggatcaggaatgtcaggaaggctagagttgttgagagacgtagaagagtcagatttctcagtagcatcatgtgatgtagatgttaaacgttgcttcttcttcatctgagaatgaggacctgcatatttgcgcttccgtttcctaccaggctttcctggcttcaaactttgaaacatatgaaacaagaaagcaaatccatacattaaaccaagaaaatccatgaaacaatcaattcaaaagtatcacaaaacttttatataagattccatttacttaccttccctcaaaggcatctataacatcagcaatagactggagattctctaaaggctcccatgtgttggcagtttcaggccatccgcgcctttcacaaccgagtttataacttatgtcaatggaaaaacatatgtttaatcaagaacaacaaacttaaaaatgaaaccaagtaagattagaaaaactcaccatttaattagatactgaaccttgccctacaaatacaaaaaaaaaaacagtaccaaaatgcagaatcagaatcattcaatcaatcaaatccaagaagatatcaaacattaaagatcattttcttcctacaacatataacaaccacagaatcaaaactttggttcgttataaactactctgttacgatgattactaactactaaagcagccactttctcacaccaatgtgtaacctacgtttgatacttatcttaaacctagaaaacctaaaacctcaactaattatggttaacaaaaacaaaccacatttgctgagtgaagacgaaaaaaggagcttacttttcgaactctcttacgacgaatagcttcaatttcataaaacccttcatcaagctttggcctttcctcttgcccaccttctccttctccttcttcatcttcctcatcacctccatcatcttcatcctcgtcctcttcttcttcttcatctccatcctccgtaggcctatcatcaccaatctcgcgaagaatcgactctccacttccacctccacctccccctccgccgtcgtcactgccaaacccaccgtctccactaattttccggctttctccgactgtttccaccgccgtctccgcctcaccagcttcgttcaacacctggggtttcttcttaacagcaccacttgcccctttcatttcctgagtattcgagcctcccaaacctgaaggaggagggtgaatcaaggtaatcgcgttctcttctcttcttctcctttttagaaatcaaggattttggaggaagaagatgaagaaagattgaaactttttctctatttctgaggtttttgtttttgcaggaagaagacctgacctgacctcaaagaccagttttttcacttttttggattctcttttttttttttttttttaatatcacaataggaaaagttgaatacagcaaattcttaacgtttataatctaattagaagagattatttctaattactaatatgaaaataataaatactactgaagaaaatatgtgaaggtaaattaaatcgaaaaatatattaaactgaaaacattttctttaaattagaaataaaagaacatcgtgctcttgctccttttacaaggaaatcaactaggacattattacaacttaaaaaaaaatcaaaggagattgaaaaatcagaaaataagtctcataaactaagattctcactccaagtctccaagtgcactgcaaaggcagacaacttagttggatctcctaacatcatcatcaataattttcagcaatatctcatccaaaccaacagaaaagaaagtccttctccaagataaacttcatcgagattcagattctttcattccaaagtatagttatcttgatagtaactatgtgattactgctcgagttttagcctcaacttttggtgggctaaagttctattttcttcagtttagtgtgtttgttctatactttgtccaaccaaaacttgtttctttgtgattagtacttgtacactaaatgatgcatgttttgatcgctttgttaaatttgaattgttactataaaatttgcagttctttttttgtttaaacgttagaaaaataataattactattattatttaaaatggtgatatgaaagaagtaaaaaggaagaaaaaaaacattcattaggatcggttcataaatagggggaaaaatggaacgttttgacttcaacataaataaatgagtattttatttgatggtgagcttatgaaagtttgtaacgtttcctcgaaatatatatgagaatattttttttgtaaaaattcacgattacaagcactcaaacaaatggaatttttttccccacacacaaaatatacatccattaaaaaatcaagaaagaagttaaaatttcaaacctcccacaattttttttttgtttagaaagagtatatccgaagaacaagagaacaacctttttctctgataaaagaaaaagttcatccttcttaacctttttcaaagttatgagagttgcattaacctaataatgcaatctcaacaccgatacttcattcttagggaatgcaaaacacaaccacaatacaacataaattattctttctttttttataaagaatttcttaaaagatttctttaaattaacttagttgtatgttcactttctctcttcatctcttgtggagatagtagtcgattgtacagcaggtaaatttagagtccacgttttcatacgctcgtttgtcttcttaacctgtaattagataaaattatacatttaatatgacgaattttctaataaaaattttgagttatatattaaaagtaaattacctccaattcccagtcagttttgtaaataacataacacaatatcaacgtttggataccaactccagccaacattccggaccagagtccctgcatacaatatcatttattcaagttaaaattctaaaagttctaatgattgatcataatgaagtactggataccagttttcatatatatgatgtaccttaatcccaaaattgaaaacgtaaacaaggaggacacctaaaggaacaccaattgcataataagatgctaagttcactaatgctaccatactctgcatccctgctccaattgctacccctgtttatatatgttcaaacaaatttagtggttacaaattagtgaaatctaaaagtttatgttataatttatttatgtctaatataagggttttattttgtaaccagatagaatgggctggatgatgttgaagagtatagatatgctaaggacgatggagagatcagctactgcatccgaaactgcttggctatcagagaacaaatacgaaatctgaccgccaaacgctaggcaaagagcggaacatatcacaccgatcaccgctgataccacaagcaccacttttatcgagaatctcaccgcatccgcatcgccttttcccaattcattcgccactcgtacactacattttcggattcatagatagagaaacattcactttagtattaaacaaataatatatgtatacatcaaaaacaaaatactgtgaatgagagtacgtatatagttacaaaccatgctgcacccatcaagccaaagcatatgttcatctcccatgagtagatatattggctgcaaattttgaattaagtatttagttttcatatgtatatggaaaaaaaaacttcttcggatttaagtaataccatatggagaaagcggaaattgcgatattcgcatcctttgcatatccagacatcaagacaatgatgctcatataccagtactctaagctgtttgaggcaataaataaacaagagaagcaaaagaagagtcattagaaatttgtattagcctattagtagtggtccacgcttaataatcatgttttaatcccgcgaaaaaaattaacaaataaaagcaagttaccaaagcatgaagccggaggatatggataacttgagcatgggaataagatcaagaaaagcagcagtgctaaagccggtccaagtatgcgggcaccaccctccaaacacatatacaaactcggctatggccaccgaccatgagcttatattaagccctagaagcgcaccatggatccccatccccatcacgcttacgcaccaccacgtggccgcaatgtccaagaccaaggctagggtcgaaagaatgcctatgatggcgtttttcatctgcgcttggaggtacatttgcattgtcatggtgaacacgatgctgtagagataaggaatgacccatgggtaaatctcgtctactgtctcggagatcacaacgttttggcctaataaccggagaatgggacccgctaagacgatgaaagggacgaagagagttgcaataaaggtatctactatccaagaacgttgtaagtatatccccatcatgtggtattgttctgctccgtatgcttgtccacataacgtctctgtcgcacttgacatacctgcctgtaataataatattaccatgcaattcatattctctaccatataattggttatgagttgaaaatacaataaacactcattcattacattatatcagaaagaaaaaaaaatcattcattactttttcatatagctttctgcttaaatgttaaaaacagtgtgaaaccacaacattttactattagtaccaaaaagtctttagcgagaacaaaatatctatttttgtaatgaattttttttggacgaaaattatagtactattgttttaacatataatatatgatggatcgtaccataataccgtagatgaagcgaatgaaagtgctttgaaggagagcataagcagcgagacccgtttcactggagtggccaatgaaggcttgagccaccactacgcatccaaacgacataactctgaacaaagttgatggtaaagctattctccacatcttccttacttcactccaaatcttttttctcaagtagagactctctctcctttgttctgtctctgacccatttaacagtctctcttccatttctccaccacctccactcatttttcctctctctttgattttctctaagtaaataaaaaatacatgtagaattttaacttattactactgtaatagacatgccacaaagataacttgagcttaattcaaagtttcatccaggtttaagaaaaacaaagggtcgtcaagactactatgtaaatattaaacaccagtgagtgatcagagaagctaagtatatcctaaattcagcctaaatccaaaagcttaatttctcttgacaaaatcttcacggataagtcaccctaaatatgcatgtatatgtacatattttcttaaagaatttattgatgtatggaggtgattcacttacctgttaagctaggttcaaggggaaagagtcggagaaaccgaagaaccaacaaattaaatattagtaacccagaaatattcaaaaggaaaaagaaaagagggcaagagaaaataagtgtgatatgatcttttctctctctctttgagaatgtggtcgacttaaactacaacgcttggctatatatactgactgagagaaagagaaagagaaagagagaagagagaaaagaaaagggttaagtaggtctagacgtgtatattgggacaacgtaatagaaaagtgtatatatacactcatatgtggaaacattttagaaagtaaaagcgtcgttttgtttgtttaagggaattaacaacgtgcaatttttaaatactaagtgttacttctgattaattttaagtgaagtttcacgtcaattagagattaacaagttacgaatttattattgcgaatgattaacccttttttaatttatacttggaaagtatataaattgaaacttctattttgtatagtacatgatacatctatactatatttcgagataaatgtatgttatgatattgatcatcttttaatgaattatgcgtttcgttgcttatgaatatcactcatatgcaaaaatgatgtatgtaaacatcatgcaaaaatgatgtaatcatgtaagttagacacggaaaacgatatattttagaaaaacatcactactttctgttaaaaaatctctagttttatttcacctagtggaaaaatagttacgcccaaagaatttcgttgctgtaaattacaaagaaaaatacaaatctgtagtaaaaatacatacgtatatacagttgtggagggtgaattgtggaggtgttgttgtccacgactccacgtgccaaaaacaatcatttaatccatgcaaatgctatgcatccatcctcaaataaatcaaacttcagactttggagtaaatgagcatctaataagagacggaactctctcttcctttctctctctgacacaacctcaaacaaatcaaagtttcgactttcaagtgtcgtttaaccgagtaatagaaatactactactatagattatagatatgataaaaaaaatgttttagcttcttttatgtattcgtgttttactattttcaatttcatagttacaaactacgcaaacgacgtcccgtttcctcagaagaaactcagactcataactatcgatcggcgatgttttaaagacagacaccttcgacgactggataggaggacacgacggggacccatactagctacacgttatatgatttaattttgacaattcattcctaccagtccacgtttttattggatacttccatctgttttgttttcatttcaacgctttatatcactaatttactattacaaatccttaatcctacttttttccgtgatatacttattgagatatttagtttaattatatatttttgtttatttactatgtcacttatgactcatctatctaactttttggccagaggtataactaacatttgtcatcgtcaagaattggaaaaagaagtgaaaaaacaaggtattaaatggcaatatgagatgtatccaacaaaaaaatgaattttgtaagtttggcgcaggcatccatgtgaatgtacttagtaatactagtagtatcagaagaaccaccgtcattgtgttttgtatgttcttgatcacagtttcatcttcctatgcacttcgatataattttatattttaatatatattttctactttcgcttttgtaaaccaaattccctgctaaaaaaaaaaaaagtaataaccattttcttctattttcatgaaacataaatataactttctttctatagttttcatgaaaataaatggctcacctaaccactgacatgggggacgacggccttttgagctaatagcagaaagagtggtaattctgtaaattatttatgttcttttttcatatatcttgtagatagtaatctattaatcatttaatcttatgatttttcttcggaattttcatgatttctagtatgggtttggtttacgaagacttaaccggaattgaattgaattggagtgttgggaggttatctcatcggtttgatttaagtatgagactccgcataagacagaggatctcttggtaggaagctcgtgtttctgtgccatccagcgatgatttgatagtgaatttcccgacgataagattggttgagacgtagcgtatcattattctgaagtgcatgaactcataaactattgtatgttctttcaatatcgtgttgcgattctagttcctaaatcgaataacatgggaaatggatcaaacctagctcaggatttaatgaactcgtataacgattgtatccaaaagtctcttcgagagagtatagccggccaaattttagttctctatgtaaaatattaaatcaagatgatgatcagattataaaagaagaattcaatttctctatgtcattgttgtgttgtgtgaaactttgaccggtcagtattattgctaagattattaaattttgttgttaagagttattcaaaaagaataggcgaaaaatgagcagaagagatttgagatataattaacaacaactcattgtaaaagttaatgagaatcgaaagatcaattggtaacttggtggaagatggatcgagcatcgaagattggtgtgaatgtgtccactgtcgatattattagaatttattagtttcattgattgttatttattatgaaaatggtattatttcgttcgtgtcaataaaaagggctggacttagttaggtggtttcataatttcattgaagaaatgaccgagcatagctacgtagacaagtccttaagcacagcttcatatatctatgtcacctagttttttggtatcgcaaataaatatttgcgtctttaaatgtgattgcgatcaaatctatatttttgtcttcatataattgatattaaaccaaaaagtttaattatctgatactactagtatataactatatatatgtatggttcacaacactaatagaaaacgtttaagcaatatatgtatatacgtaaacaccgaatgacaaaggaaactcaaattttactttttggattttaatttttcaaaatcaaaacttgtcttaatgtcagaaatcagaatatattacaactcatagatagcggataaaactgttcttcatttgcgatagtgcagaatgctgagagaaaaagtgatagaaaaaatgttttgttggcaacacaaacatatattgattaatagtatagatttacaacaaattagtgtcagccttttctagaacgtttaagtcggccagtagattaattacttcctgtccgctatatcatgcaaatccaaatgaaaatgatttgattgatgttactctaactgtaagaaaaaagtgcattattgaaaacttcctttttctctgtacacaactacaatagccagaagcaatttgtaggtcataaaacattataatagatattttctttttggaaagtttaacctctttttctccttaattgttgggagtgcaattgggtatttaagaatgaagatgaaacttagattcaggaccattttgtgtagccactgacgacagtccttcgtacataatatttatgtttaagttgggtgtattataaatttatataattaattatgtatattgtataggtggagtaggaccaatttagtcgtcaaaagataatgtgcatgaatgatgacaagaatgcgatatttttggcatgaatcatgattaatcaatgatgtcaatcaagattacaaatttatacgaaatgatagtaaaaaggttcaaaagtctcttaattctattacaccaacaaaaaaaaagtctcttcattctacctcactaatatatgtttgttcggtttggattgtttttaagaggtccgagccgagatccgactaatttcttaatggatctaaaacatgatactaattttgactaactatgaaagagagaaatatcatctacaaaataaaaattactaaaagtttaagaaggtgttctaaatagtttagtacaatttattaaactcttgtgaaccttttctaaataaaatcttgtagtcttggtgttttcctaaatattgtatttttaaattaaaaacttaattttgtcatatttgaagatatttctctatacataaataaatatatctttcgagcatacacgaacattacatttctctggacaaatcaacattaggtttattcaattgtcgatttgacaaacgatgaaagaaaacgaaaccctacatatcttttaagcataagtgactctgtggttcatgatctctatttctggttcaacgaacgcaaaaggtattgcctgtacagaggtgtgaactaagacttgtcatataatttctttgactatcattctaagacgagacaggtttggtaaattttcggccaaaaggcaccaaaaaaagattaacgtatgtcccttaataattttgttgatcaatagtatggtttggcattaaattaaaaatataagaacaaaatgattgccagttttgtgaactaatagagttgccaatatgaaaaaccattaaaaatagcttactgcaactttttaaaattgaaaattgcaattaatatgtcaactactaatcaataacaatttttgtcctttgcattgcaattaacaatcaatctttgaaaagaaaaataaaaaactataaaaatgaagttaaaatgtttcctgtaataatgatactaattgacaatagctagcttttttccctccttgcgtttcacgtggcatatcccccacatggctcttttgaagcatagaattcttcttctaactcttgtcttggtttaacaaaaaaaatctggaaaagattctcctcgcaaactttgaaaatcataactgatacataaactctacttacttcttgacaacaaaacaattctgtaacatttgttagtcaacaactggatacaaatatattcggttcgcttctggttaacacgtttctccaaaaattgaaatctgataaccaaaaaccggaacagaaccgcaaatcaacatttgtacttgtacgttcacacaagacatgcattgtcctaggagactaaagatggaccggccgattacacctcgtatccgatccaaaaattatgtgatatattatcatcattgaggataaaatttactattgattgtttcacactttcactgtatgacactatttattctattacccggtttaatgcattatgcatggatcccaacgttactagaaatatccaaaaaataacaaaagaaagaagaaaaaaaaatccaatccaagatacccaacatacatggccctaacatttctttacacaaaatggacaactcctctttaagatatttaagtacccaaagaaccctaaccaaaagaagaaaacttggacaataatttggactcgtaggccatagtactcaaatacaatttactgtattgactttctgtttgttccaaacttccaattatcaacattttctctgaatcttccgaattttctagctgtgtatagagagatgaaaaaaaatcaattatggcattccctttcggattgaatacttaagaattcattaaaaatgtcgatctatattacttctagactctgtagaaatgatataacgtatcaataacaataacaacaataatggtaaaacagacctctccctcttttatctctgtatctctctcacacacacgcacacaaaactgctgagtcttgatcatcttcaatttcaagatgaagatgattcttcttctgcgcttccttgtgctgtggcttcttctccttcagcttcaaggggcttttctggtccaggtccagctgatactttcaccattgaaggacgtaaaagcctttcacctagcaagaaacctttcctgtattcttctagtactataccctcttcgtattccgcagagtcttctctcattattgcctcatgtagcttttttcacacaacaacgagaaaagcaaaaggataaaaaagagatgtcagctgttagggacttgaaaagaccaacaaacaaaaggatatctaccaactcattgtcatttaaacccaacttgcaaaagtaacaaccacatcttacatctaaagtctccaaaactttagcagattcatgcttaggactagacgcataagtggttatgtatttcaagctttgcgataaccaaaaggcatctaactgagataagtgatcctaaacctcaaagatttattgatcatttgcatcacaaaagtatcattcagcataatttgttccatccatctgatgtagctaactttcaaagtaacaaccatatctacgttctgctcaagattattccggcagccctatagcaacgaattatcctaacttccaaaacaactttgattttaaagatcacgtccatagttaaaaattaaaaccaccagcaagctgagcaacaaaaatacagttgtcgatctccggaaagaagaaaagatatcatagtaactaaccattggatcaaactgcttgccgactgtctccacatggataacaccaagtgatcccagaatttctacaaactgtttgtatatgctctgatagctattagtgactttctcttctccctcagtctccaccttaatttgggatttagctctctcgaaattatccaaaacagccaaaagattctctacaacctctccttgagcatttgaaacaaggtttagcctttccctctcagtcctcttcctgaagttgtcgaaatctgcactgattcttataagccgatccctctccaccgataactcattggataaagacgctactttatccgcaagcagaaatttttcatcttctatggactttaaagatgcttctatctcagcaatcttcccctcgttgttgtctgctaaagcttctttataggatttcagcaacgctgtgataacagctgcttcttcttcctcagcttcaccctcctcagcactggcattttcattctcgacatcaacagcaccatccgtctcctgctccatgatttcagaagtgaaacaaaaaatcagaaaaagagcaatccagtttacatagacgtttcctatctattcctgataaaagctgagacagaacacacactaacgacacaattttttaatgacctcctaaacaatcagattaacaccaaaaaagcttcagaacattctgtggcccccatacaagaatcacgaaatcaaaattcgatttggatagtacatacacaccatggtcttaaactactagtgaaactccttcattttgggaacacaccataccacaagaatatgaaatctgtcattcatcggatttggtatatcctaagaaacattagcattcaccatttgactcctgaatagactgaatacaatcctattcattgctctaattcatgtgaacgttccttcagagggtaatataatcaataaagcttaaaaatttaagcaaacaacaagcaattctaaattaccatatcccaaattcgaaaccctaatcaccgaactaacaatgaaataacccccaagaaagttgaacagaagtgagccgaaatcgaaaaacctgaacttcgggttcgttcgattccacctccgtctccgtcgtctcagcttctcccgaagcaaagggtacgaggtttagtaagcggagaggatagccgctagagacagaccggagagaagctcggcgagagagtgagacgctaacgtttcttcctccggcgaaagatacgcaaaagggcttaaagggtacagaaggagcatgaagaagagttggtgtgagatgtaaagacggcgttttgagtagaccggccatcgaagagttcggagaaagagaaggagagtggcggagagagataaggaagatagagagagagagggcaaacggttctactcttcctcgtcggatcttttgttttgtttcgtttttttaaccgttggatttacttttcgtttttactatgttgatcggaccgttgttgttcaacagagattacgtagggagtttttcaaccgtcggatttagattttcttgaaacttctacagttttgtgaatattttatataatacaataaaatctctgtaaattaatactcgagaaggctgttcgatgttctatgccaatgatctaactgattcctggtatgatgtctccaaactctttgtaagttgtcttccactcttatggttcaactctttttccaagtccacttcatcacgaatctcttcatcttctctagcgatgactacacttttcttcaagtgggagcaaatttatccaggaactgttgttctgacataagaatatttgaatgatttgtagttgtatcaatttcgccttgcctttcttttggatctgaatgtttcaaacattttcgacaataaaatatgtttttaccaatttgtatcagttttgttattgcagattcaaattgtatcatgatctcatgcatatcgttgttgaaaataacataataagacttgagatttgggaaatttttagaagcaattttgtgttattgactataactagttctacaatttgggcttaggctttatttacaaaagggtttccttaagcccaaagagatgtactatatagttaaatgtttgttttggtcaagtactagtactcaatatgttatagatgaaaagtaataagagaatatcagggtttgccggtttgggttgacaacaaagagataggagaccatccatgtttaatctattttctaagtccgcacacttagttttgtcagaagtagtgggtgcaacggaccttaatcctaaatcagaagtattaactacaaagtgactaaagttttaaactaattattaaatatcacccgttgttgaggctaacatatcataaaagatattcttcttcgaccattttactttttcattttccaatttctcaatatattattttagttaaaattttgtaagtagatgtttatcaaaaattctcaagtaaatatctagcatatgtttggaggtgacaatccatataagcttttaaaattgaatatcaaatagtttagttcaaatgtttagaattggaagctaaataaaggaagaatttcaaaagcatcttttcgaataccacttttcaaaaatattatatttctaattgtttattaaaagtactcctaagaatatgaggtttattcaaatatgtgtgtaactttattaaagtatacaaactacttttatatgtgtgtaaaaacttataaatattttataaatacagtataaaaataacttataaataccttgtaaaacaataccttgtaaaacatttttaaataccttctaaaatcttattaaaccatataaaatactttataaaacattagatcgaatctccaattagtagtttacaccaaaaactttatgaacttttgagatttaatgaagagtattttctaaaaataaacacctaaaaagtttccaatggtgattaacaaattgaactagctgaataaaatgagtactgataagttgaataaagataagctgaataataaaaaagagttggataaactagatgagatgaataagttagagaaaaataaaaggtaacctctatatgttttcaacagctaaacatatttcaatattaattagaaacagctaaacaacaggttgtattttattatattaattctaacgcatgcaacgcatgggtcttccacctgggtatatcatatagattatgagtctgtatcaaattggtcatcacgtcgattgagaaaaataaaaataaagtctctaatcatttagtttccttctttttatcgtcccgtaattctctatttgtttaacttgacaataaacttagatctcgtttttttacaatttttttttaaaaacaatagataaatatgtctaattttcttacaaaaaagtgtataagatattcccaaatagcctacatatagtatatattttgaatgaacgattccgcttaacactatcagtgaattttgggaactcaaaaaggattatgaccaagttttgggttcaaatcctaccctcagctagttttctcgtagtcaagtttgtctcaaattattcgtccaaaactcttcgcttacaaagaaagattacacaaacttaaaaaaatattcaaacgaacgagttctactgtggtatcaatcatacacataatgcgacgataagttaacaaatttatgcattccttagaaaataaaacagtctaacattttcaattgtcaacattttcggatgaattttcactttgtaaaaatatccaaaaatgggcaagtataactctgttaacaatgagacgcgataacgctgagatggcttcgattgaaattagattgttgaccaattcagaaatttaaactggatacaaatctcataaatttttataaacactatcaaccaatttaaatacgattaattaagataatattttaaaagaattatgatcgggggcggatactacaagatcagagttactaggacacgcgccccacactcttttttcatataatttaatattttcaaatacattaagccaaagccaatatggaaaataaaaaagtgtcctagtactaaaaataaaaacaatactttgaccaaaagtttgtattaaacgaaaatatacgccttaaaacctatttacccccaacccttacggcctccaaaatattaaacaaatcaacgcaaactgatctctgtttttcttttcttaatttgtttccattgttaatttttttggcttattatgagtcctaattcctaaattatcaaaatgtccacagtaggtaattgtatctataatctgtacttaatttatactaaaacttttgatgcaaaaacttctctaaataaattaaatcaattcctgtttttcatttgtccaaaattgggaaaaacgtagaataattttgtaggattttgtttcttataagaattacttttatgttaatattatatttttgattaaattatttataatatagtgcctgtgttaaaaaaatatacgttaggcatccgccagtgatcaaaatctctcatctaataaaaattaaaattaaacatttttattgtaaaataaaatccctaatcactttttataaaacccaaacaatcatttaactacatttaattataaatttaaactttaactattatttataaaccaaaaccgacataaatcttgtttaattatacactttaaacttcttttataaactcaaactcacatataacctcgtttaattactcctataagaaagaataattttctgagttttacacaacgactaagaaaataataaatgattcctttaattaattatatttttacttaagttttttaaaatataatctcaagttgctttttcctccaattatctttttctaatattaattatttattgtaaaagaaaatcaatatttttgataaaagaataaaacctcaaaaactattctttttgatataaatggagtataaaatatccataaccgttatttctaaacccaaacctatatataacctcatttaacctaaaatctaaattcaaattctttttttataaaatcagaccaatatttagcctcgtttaattgtaaaatctaaaccctattcctccctcgtaaactgataccgatatataatttttgtttataattattacattaaatcctagtttttctctaataaacacgaatcaacatcgttggtatattattttctgattggctagagaaaaacactggtgaataaattaatcaactaattcagtctccaatctccatgtaattaaaaaaaacaaaaaaaactagatcatctgagtataatttttaaaatctcagattagaaagcagttgtacaatagataaaaaagtacgtaaatagatatataattagagtttacagtttaaattatcgcatgttgtaagcacgatcttttaatcataatgtagaaattaactccatgtaaaatcaataacatagttatgcatgtaattaagagtttataaaaacctgtcttaagagatttctttctcaacagagagtcccttcttttctttatctatttatccctagctctctctaaagatcgctgtgatgattacttcgagtttctcagaaaaatgtacatcagttattaacggagctccaagttgggcggtcttctttctttttgacctcctcgactattttctttgtatcgttttcagattcctcgacgaagttatggaagaaaaatcagagtcttgtcattgtaataaccctcgagagaaaacacattttgcagaatacgagttcctttcggagactctctatcggaggagaaacgttttccgacaggccggttttctccggtttgcgaataaactccctgagataaccaagaaaataggtatcgttactttcctgagaaaatttctttttcctcatacaatgaacaaagtctctcatgaggttgcaaaccggtggtctgattgtggttgcaagacttgtgtttcttggatcaacactgataaacttaacgtaatcgtcaagcaaccttcaatatcaggtaattagtaatataagttaattagttaagttatgttctgttttaacatctcatttattttattttcattttaatcagatttgtcgataagcaacaaaccggtagagaacgttattttcgtacacggatttttggcatcttcatcgttttggaccaacacagtgttcaaatatctaccagagaccaccgagggaactaactacagattctttgctatcgatcttcttggatttggagacagcccgaaaccaagagccagtcagtattcgttgaaagaacatgtcgaaatgatcgaaaaatcggttattttaccaaataatttgacttcattccatgttgtcgcacactccatgggatgcatcattggaatagccttagctgcaaaattctccgacagcgtcaagtctgtcgcattagtagctcccgtgagttttctcttaaaaacaatttttttaaacacacaaatttaaacaaggtttgttctgcaatgattttgttttatcattttggttttatagccgtattttgctgattcaaaaggaggagcaagttgtgctgctcttgatgtggtcgctaagaagaaactttggccaccagcttcgtttttcacggcgatgatgtgttggtatgaacacattggccgtggcgtttgcttggtcttttgtaggcaccaccgtacatgggagaggatcatcaaaattgtaacttggagaaggtatgtataatagcgtttattgaaaaactattaaattaaagatggcaaaatgtttctttgtgtcattgtgtgtcaaattaatataacaagttttttgtattttttaacaaagatctctctgtttcatacatatatttttgtaaaaaccaacggataccaagttttagttaacactctgatatatatataaaaaaacactggtttcttctatgttcaggaaactaccgacagcgataatggattttacaaagcacacacatcaatcaggatggcatagcatgcacaatgtaatatgcggaggagcgaaattcacggataaacaccttgaaactttgataaaatccggtgttaaaatcaatgtgatgcaaggggataaagatgttgttgttcctattgattgtctatcgaacatgaaaggaaagttccctgcggttgaagtcgaggttatcgctgggactgatcatagtacggtcataatgagtaggagagaggtctttgctgcaaaccttgtaagtttgtgggctacttccgaaaagaaacaaaaggtatagtggcaagtgcccaaaacatgaaaacttattagtcagtttttgacaaactaagatatgaatgttgaagagtaaacaaagtcttggtacgatttgcaagatttttttttttttttttttttcaattcgcaagatttgatgtagaagattgttacatcttgttattgtatactctgaaaccacatatttgaattagctattttctcaccatttctgttgcttacgacttgtagcattggtgatggttaagacttaatttagagtatacgagaatttgaagttttaaacgctttcgttttgagggaagatctttagcacatgtaggcccaaacgttgcagtgtagttttgtggtgttaatgcttcgtggatcgctattgagcgagtttgggagttaatgataaccttcacaatgcatcttttatttaccaccagaggtatcttttaagtcttaatgaggcaattggtggattgattgatttatgaattatgagttttatttaaatagatttcttgtacataatttcattttttgatataaaaaattggtgcagtgtggataaagtaaatgtgacgtgatactttgcacggtcattgatagacaaatttttttttttcttcgaacatactaatattatttcaaatacttaggaacataaccgaggtttctcacggttaatatttgggactaaccaaatagaaggactacaatctaacacagcatgataaataggaaaagaagaaaaagctttcgatgccaataaatctgcacaccggtttgcttctcttcgttggaaccgaaatgaaggtttgaggaaccgtcgggttgtgccgtgaatgtcatcaatatagctgcttaaacgcggccacatctccggttcatttaacgccttcaccaaaacctgtgaatcagtttcaaacactacctcggtaacgccaagattgtcaagacaacgcattgcccaagttagggccgttgcttctgcttcgagactagaaaccagtgaggggtatgctttagaaccaacccatttcgctgctccagttgcatctctcaatatccaaccaacaccacatctatcactctcagccttccatgctgcatcaacgttgcatttgtatgttccaggtgaaggaggttgccaagttacaggggttgggctttgctgaggagatttgggtgaaatgacaggcttgtctacccattccttctgatccattatagctctttccaaaacctgctgggcatcctcatgttggttgttaaaacagacattgttcctagctttccatagtctccatattaaccaaggccagatctcctttctcttatgaacttcttcctcttggtcgttttctttaactagcccgttagcaaagttcgtgtagatggactctgatggctgaggataaaacataaaggagagaggagagagcgcccaccagcctagcaaacgaacagtgaaagagaacatggttgacagtctcatcatgagaaccacatcttgggcattctccagccttggttaatctcttcttagtcatattggagccgacagctaaacaattagataaaccacgccaaagaaagttcttgatttttggagaggtattagctttccataaagcctggaaaatggaatgaaggtttggatttaacacttcttccgaaattttcttcttgaagcatttctgccacacacaatatccagacttcacggaataatcaccattatggttataaatccaagagaatcttgtcttccccggtcgaaaactcggtcgaacttggcctatgagatggatatcctcttgtacgaagatggattttactgcggtccagttccattcatccgagtcaaagtcctttatcatggagatatgtaaggtataaggattgagaccaggctgcactcgtggtggtcgtggaggcttacttggtaaccacggatcaaaggcaattctcagagtatgaccatccccaaactccttcctcattccttcttgcataagcatcttcgcctcataaatactcctccatgcaaaggagggtcgggaaccaagagatgcttcgaggggggactttgatggaaaatatcttgcttcgaagattctagccattagggattctggtttatttgccattctccacaattgtttacctagcattgctaagttaaaaccttcaacatctcgaaatcctaagcccccttctgccttaggttcagtaagcttgtcccatgctttccaatggattccttttccagtcgcttgatttttccaccaaaagttggaaaagagagagacaagctttgtacaaagagtctttggcaaaaggaaacaagacatagtgtaggttgggagtgccatagctactgctttgatcatcacttctttaccaccttgagacaggaatttggaactccaagagttgattttttccgcaactttctcttccaaaaatcttaaggtttcaatcttagatccaatgaaagcttctgggagaccgagatataaccctgtgccgccttctttagtgattccagtgatctctttgatcaaattcctagtctctgtttcaactttgtggccgaaaacaatgcttgatttcgagaagctcaccttttggccagaaactctactatattcctgaagaatctgattgatcacatcaacttcttgtttctcagccttgcaaaaaaacagtgtatcatcggcaaacaaaaggtgcgagactcttggagctgttgcagctacttgaactcctgttattctattttctctttcagccaccttgaagctatttgccaggacttctgcacataaaataaacacaaagggcgataaagtcattgatagacaatttagaatggcaagatggttaatggatacgcactctatatacatcgactacaacgataatttaactcgtcatgaaaaggaatcagcaaaatgattcaaagaatggttgatttgtttttcctttagcaatgtctaaacaaacagttgcacgtgatgtacaaatgcttttttcgataaattgtacattttattcaaaaaaaaaaatgtttaaaagaattcttgacctaatttcaacttggtttggtctttggacttctcttcgtgttggtcttatggcccaatcaggttgtttggtaggcttctattgtatttatttatatatgtgatattttctataatccatcaaatcacgattcgattgaatgatttataattaactttcaactcttcttaaatttaattaagataaacttttaagacccaaaacaacaattaaaaaaagaaaatccaaattctatcagttttcaccaatattagaatcactcataattaaaatatgtatgttaaaatgtcccacatcaaaaatgacaatggatattcccctcttctaccaaaaaataaaaataaaaataaaaatgacaatggatataactgatcatgaacaacatagccttttgaaaaagacaaatggatgtctttatctcctaggttctctagagattctgattttattcccacgattacgaactttttctccaaagtaaacaatcaagccatgattttgtcttccgcaaaaaaaaatttctacgaatcaagtttgccaaaacaagattggaagaaagatgcgatatttttatgaagtggaggtggaactgccgcaaacatgattgatttgatcgttatgatttaaacgatttctacgatacatgttttgaacatgttctccggagataatccattatccagatttcaccactaaaacggtgcattagtggaattcaagaaagcaaataagaaaaagatgaagagtcattcaaagattaccctaggtctagttgtacatatctgtcaatgtcttcgaccaccaacacagaaccattgcctacattaagcataagcttccttatatctcagccgatgtgttctctacgtaaggcaagtaaatatctaaaaaaaaatctttatgttttgcttcaaattttatatcagtgaagttgctactatttatttttgtaaatcatatcattaacaacatcatctattttgagagagataaatgaatatctttcactccggatcctttaaaaactctaaaaaaaattcacattgacgaaccgtttctaaaaatataccatctagtcttcatacaccggattttgtcttccacttagatctttatctttaacttaagagttaagagcacattatcacttagaagaagacgaaagaccttttataaaagaaaacttcccagacaccttttataaaatttgtagacacgactttctattggttcagttttaaataaaaatttaaaaatttattatataatttaaatatacaaaaataataatattatatttccactcttaaccggtaatgatactctaagcaatgactataaaatacatggatgatggatcctatgtgggattactacactcttaaacatcctggtaattaatcctatttatctttaatcataattcatttttactgtatttcctttaaaatatattaaaccatacattttaacgatatttttagagaggacaaaacaatgataatgccgttgtatagtcgatttctagctaccatccttacaacttacaaggtatttaaatatgaatacataaatttacctataaatagatatgtgtttgtcatttttttacataaatccaaactcacgattttctgaagttgcatttaaatttagagatttgattaatctccggagaacatccatctaaattgcatttcaagcttaaaatctaaagtgaatattctgatgataaataaacaaacaggacgccacaatgttaactcataaaaagaattgcaattccggtttcctcaatcctcctcttccagtttctccatcatacttctccaactctaacctcttccttttgagaaccttaaccaaaccctcgagcgccacatcaggatcctcatttttcattagctcctctgcaacttgagctggagtcaacacttctccttttatcaaacgctcgatttccgggtaaagatggtgagggtcatcgtgagacaagcccaagtagttagatgccaaagtcttgaatacatcaaaacaacaatgtcccatgtgaatatgcatatccatacgtcctggcctaagcaatgccggatcgagcctctccttgtgggttgtggtgaagattacaatgcgttcatctccacagctcgaccataacccatctatgcaagttaagagccctgacaatgtcaacattgatgatccctattcacataggatccaagtattggttgcaagcatttcatgatgatttataaattaatactagtttttaatgaaaataaagaccaaaccttagtatcatcttgagtcttaggttgcaaccttgtatgcaaatccacggcgcaatctatatcttctactaaaagaatggagctgttggtagtaccgagaagtaatctccttagatcagcgtcctccctcacgcttgcaagctggagatcatagatatcaaacttgaggtagttagcaatggctgcaactaggctagtcttcccagtcccaggtggtccatacagcaagtaaccccttttccaaggtttcccaactcttttgtaaaaatctttccttctgatgaaccggtcaagatctcccatcacagaccgctttagctcttcgttcatagccatggtgtcaaatgttgacgggtgctcgaggttcacggattgccattttagatacatacaacagtaggagtacatcttgaggattttcctctcgttgttgatcacctttgccttgctctccacgtaaggtatataagaattcaagaccaactctgtgtgtttcttttcaaagctaagctcaacgcactcccgatcggggtttagcttaaaatgttccccaaaataatgaaccatattgctcttattgctgtcaacacaaaaccgccacttgacctcaatgccttggtagatatccgagacaacctctcctacgctgaagtgtatattgacgtttttctcactgcggtctctagagatccttagcctttccgcgttgtggttgaccttggtagaaatataaacctgagcagccccgtagagctcgttatacatcccattcttgatatggtcatcgatgatgagcgtgagagtcgatggagtagagtgcaagaaagaattgagataagagatcatgtagttttgtaacggaggtggaattgtcatctcaagaaatggtttgatcatcatgacgtatcccgtcaatgatgcgtaggctgagacaaacggtgcaagcgaaggaagatttctaagagaaaacatcgctgatgatttgaaacgcaccaaatgtaccaaaaacactcaaagtagaagaggttgttgttaatacatgtgtggggagtagctaatcatttatcttcaataatatttgtggtaatgtaaatatgaagtcatatatgatatatggattatcttcacaaagaaaacgaagttccattttctgtccttagtagttgacaacccctatctaatttacatatgttattaattaaatttggatttttcaataccaatgtcattaatatcttattttataattgataagatcacatgcgtgtcaaaataatgctgtaattataattacaatttttttgtggattcaacacatatatcataaaatgtttgagaacataagtttaataaaattaagatttccttgaaagaattaaaagttttctttatgataatatataatggaaagaagtacataactaaaaaatattctttaaattatcacttttgaggttttgtttttaaaaaggtactactaactatctaaactttaaaatgataattaaaaagttttggcaattgtaaaaaaaaaaattaaataaaatacgatagtattaaaatacaacatatcaaatttttatacaataaaacttagagttagagacgacctctaatgagtttattattttaaaactctaaaatcatatattattatattatatcatatatatatatatatattaatttatgataataataataataataataataataataacaataataataataataataataataggatcatatatttacattaaagttctgaaaatttcttgttttattattttatcgaattttgccaatttattggtttgttcgatttaatcccttataattcatcatttaacaatatcatcttttgatagagacaaatgaatatctttcagtcctatttctctaaaatcatatattataatattatatcaattatatatatgtatatatatttatataaattaatttatgataataataatgatatgatcatatatttacataaattagatacaatacggtattaatcccttatgatgagagaacgctatgacgaaaaaaggttttccaaaagtgagaccagaagaaagtgaatacaatttatgaatagttgcactaccacaatcaagattgttttcatcgtcgtgacgtaggcaattactttggtgcatgatttgaacattttctttggaggaggaatcttcatctttagtttcttcgatttcgagagagagaatagaagattaaagtctcggagaaaaatgatgtgtttgcgcaattggggaaaaacaatttgagaaaaattagtaaataacattcttttaaatgcgaagttattacatgtgtgtcatccaccagatttacggtatttttttatccactttttatttttaaatgggatattttaataaatttttcaataaaatattaaattaaaataagtttattttacggaccgacaggaaagacaagtttggttatgatcatgccttgaaaaactattgctcactatcaacggttctgtcttggtgattgaagacatagacagaacagacatggaggaactgaagtaatctattatatctttgaatggctccctcttatttttacttatttgtagtattccactattgtagcgattaatgatatcaggagacgagattatctctggctggagttctaaactgtattgatggtatatgatcatcttgtggtgaagaaaggatcataatcttcatcacaaataacaaggatgatatagatgattctctccttagaccttgatgtatggatctccatatatattcacatgggacattgctgttttgatggattattcataatgttggcgtatacctacttaggcctctttcatgacaatgatgccccacacctgtctctacccggacctcgaaggcttggtgaggaagaatttaatatcaaataaaattgatgaagttgacaaagacttgtgactaatgtacttgaagcaagttttagaaagttgtgctgattttccacaaacatcgatttgttgtttactaaaaacttaagaaagttatgtcatactaactttgtcttgtcgccatttaataaaattagattattcaaaattttcatgtgtaaaacaaatcttcatcaggtctcctcaatgtcgagtgattatcttcctttacctcttcaatttccttcatcatcttcctacatttcgtcccccagacctcttcttattcctcttgctctatggaaccctggcagaaccatcaccaacctcgatctcgggagccattcgggcatcacattagcatattcgctagcaactagttcctccttgtcctcaacttgagccggagtcaacactgctaattcagcgtcagctattgcctcctctccctctttcagtttcttcatcttagattcatcatcacacttctttggctctaacctcttcctcttgagaaccttaaccaaaccctcaagcgccgcatcagcatcttcatccttcattagttcctcagcgacttgagccggagtcaacacgtgtccatcaatcaaatgctttatatccggacagagagggtgagtatcatcattttcgtcagacaggcctaaatagttagacgccaatgtcttaaatccctgaaaactacaatgtcccatgtaaatgtgcatatccatacggcctggtctgagcaatgccggatccagcttctccttgttgttagtcgtaaatattataatacgttcgtttccacaacttgaccataacccatcaatgcaatttaaaagtcctgataacgtcaatggttttgatacctattcacataaaaaaatgtttaagatcggctcatgtattgtttgtacgaaaaataatgatataaaactcaaaactaaatccatcgtggagaccaaacctggacagcacctagcggttggctcgtttcggttggaggttgcaaccttgtaggcaaatccacggagcagtctatatcttctataagaagaatcgagctgttattagtggcaagaagcaagcttcgtagatgggcgtctccctgaacgcttgcgagctggagatcatagatatcaaacttgaggtagttagccatagctgccactagactagacttcccagtccctggtggaccgtacaacaagtaacccctcttccaagctttcccaactcttttgtagaaatcttttcttccgacgaaccgatcaagatcttcaatcatagaacgcttgagatcgtcgttcatagccatcgtgtcgaatgttgaagggtgcttgaagttcacggattgccatgtttgagccatgtgcgagtagcaatgcatttttaggattctacgcttgttgttgacttcctttgccttgctctccacgtagggtatataggagttcacgaccaagtctctgtgtttcttgtcgaagctcagctccaaagattctcgttgaatgtttccctgatagctttgtccatactcttcaaccatagtattattcttgtttctagcaagaaacctccacttgagcttaatgccattgtagacatcggagacaacctctccatcgctaaggtataacttgactttcttctccgcagggtctctagccataattagcctgacagaatttggacttatcttggtggagagataagcctgagcagctgcgtaaagctcgtcgggaatatacatcgaggacatttgatcgatggtaagcgtgagagtcgatgaacgagagccagcgaaggacttgagataagagaaaacgaagttttgaactggacgtggaataattgtgttaatcattggcttgattatcatgacgtatcccatcattgatgcgtaagtagagaacatagatgcaggagaagggatatctctagagaacaccatcgtttttgagattaggtttggtcgctccttttcaaagctgttgcgtctgaggctttaggttaaactaaattttatttatgtagacaattaaacgtattgagattagggtttggtgtctctttttcaatgttgttgcgtcggatcagggcttttacttcttctttttttcggtaattatcagggcttttagttaaaatttattttatttatatagttgtccttttatttcaaattcttttctttttctggttaagtagtttattttcccttgcgataaaagaaataatatttcctttttatatacggtaaaatctctataattaaattatattctggtatatatctatttgcagttgtaaatctctgactatttaaaatatattatttaattaccaaaaaaaatattatttattatagtagtgtaattgaaaaaatacaaattgaaacataaccttaaatatgaagtagaaaaaacatgtgaagtaaaaccaaagctagaactcaaaaactaaaactagaaaaacgatgtgaagtaccaaatcttatcgaaacccccatttgtaagattctcaagtgaaaacatagattgttcatgtctcctcagtgttggatattctcttatcttcatcttcttagattcatcatcacaattctccgactctgacctctttcttttgagaaccttaaccaaaccctcaagcgccatatcagcatcttcatttttcattagttcctcggcgacttgagccggagtcaacacttatccatcaatcaaacgtttgatgtccgggtagagacggtgagggtcatcactgtcgtgaggcatgcctaagtagttagatgccaatattttaaatccctcaaaactgcaatgtcccaagtaaatgtgcatatccatacagcctggtctgagcaatgcgggatcgagcacctccttgttattagtcgtgaatattactatgcgttcatctccgcaactagaccataacccatcaatgcagtttaaaagtcctgataatgtcaatggtgttgatccctattcatacaaaacttgtttaggatccatgtacacaaaacaaattagataacattaaaccattgtgaagaccaaaccttgggagcaccaagggtcgtggttgcaggttgcaaccttgtaggcaaatccacggaacaatctatatcttctacaagaagaatcgagctgttattagtggcgagaagcaagcttcgtagttgggcgtctccctgaacgtttgcgagctggagatcatagatatcaaacttgaggtagttagccatagctgccactagactagacttcccggtccctggtggcccgtacaaaaagtaactcctcttccaagcttttccaactctcttgtagtaatcttttcttttgatgaaccgatcaagatcttccataacagaactcttgagtttaggcgtcatagccattgtgtggaatgtcgaagggtgctcgaatttgacagattgccacctaagtgtatagctagagtaggagtgcatcttgatgattctcctctcttccttgatcacctttgctttcctctccacgtaagctatataggatttcaccaccaagtctttgtgtttcttgtcgaagcttagctcgaagcattgccaattgacgatcgcttcctctgtctcttcacctacaaccgtggttttcttgtttctgccttctaaataccgccacttgagctcaatgcctttatagacatcggagacaacctctccttggctgaggtgtaagttgacgttcttattgttagggtctctagtcatccttagcttcgatgcatcggggcttatcttgcttgagagataagcttgagctgacaaaaagagctcgttttttcttggaaatcccgttcctatcagtcccgttgatcatgtcattgatcacaagcgtgagagtcgatgaacgagagccgacgaaagacttgatgtaagagaaaacgaagttctgtatcggtcgtggaattatcgtgtgaatcattggtttgatcatcatgatgtatcccgctagtgacgcataggtagagaacattgttgcaggagaagggagatctttagagaacaccattgttttcgacttttagggtttggtttctcttttggtaaattgggtttattatatagagatttgtattgggagataattctctctctttattcatctttttcatcatttgggccacaaaggccagcccattaggctaataacgcaaagtacgtatcaagctattacgcagtttgggatattcattaccacataaataaaagaagatatcaacacttaaagattttactcttctcaaaagtctctgtaacaaggcaagagactctccactctatatgctttattttttctttggttcttcctttatataggtagagtataacatacttggtagttggtaatgtacctccaaagactatctcaatatatagtttcttactttaaggaaaaataaagttccatatctcttaatgggtcttacaatggttcacaaccctagaaaataaacatacaagaaatttcttttaaaaaacacttaaagagttgtaattagcctcttatacgtctatttttgtttgcttcctcataatcttatttgaactaattaatggattatgtccaaaacaatacaagcttcttaaatcttttgctgttcttcctcggagaaccctcagtatcactctttagtctcatctcctccatctccagtctactctctttctgcttcatcatcaccggattcgattccttagattttagcctcattttctctaaaacattcaccaaaccctctagcgccacgtcagcatcctcactcttcatcagctcctctgctacttgtgccggcgtcattacttccccgtcaatcaaacgctcaatctccggaaatagacggtgtggcatcgcagcatcactcaaacccaagtagttagaagctaaagtcttgaatccttgaaaagagcaatgtcccatgtaaatgtgcatatccatacgtcctggtctaagcaatgccgggtcaagcctatctttatggtttgttgtgaatattataatccgctcgtctccacagcttgaccatagtccgtctatgaaattcagcagccccgataacgtcaatggtccctaaacacacattttcatagaaaacaaaaaaaaatacaattttaaatatactaaaattctctatactaatcagagtcagtcttgttacactaaattaaaatttggttgatacggattttggtttggttcgatttggtaaatttggttcaattggccaatcctaaaccaaaaccaatcatagtagaaatctaacctgagactcgccacggttcttgccttcaacaggctgctcaattctgttgggtaaatccactgcacaatcgatatcttctatgacaagaatcgaccggttacgtgtagctagtaagagcctccttagatcagagtcacgcatcacactcgcaagctgaagatcataaacatcaaacttgaggtaattagccatggctgcaacaagactagacttccccgtacccggtggaccgtacaacaagtaacccctcttccaagctttccctactctcttgtaaaactctttccttcttatgaaccgatcaagatcctcgatgacgtcacgtttgagatcatcttccatagccattgtctcaaaggtcgaagggtgttcaagaataactgattcccatctaagactgttgagagaatgcagcatcaagattcttctctcgtctcttatctctttagctttactctcgatgtaaggcacataagagttcaatatcaaatctttatgtttcttgtcgaaactcagctcgaagtactcgcttttaccgtcatcgtccataccacctcttcttcctcctcctcctcctcttcctcctactcctccgccgcctcctttcttgtctccaccgtcagtaacaaacctccatactagctgcacatcttcgtacacatcgttgacgatttctccgtcgctgagatacaagttgacatgtttatccttatggcctttacttattctgagcctgactgcatcaggactgatcttggtggagagataagtctgagcagctcggtagatctcgttgttcatacccatgttgtcgtcatcgatggttagcgtcaaagtggaggaagaagaacggaagaagagagaccggagagtcctgtagatgaaatcttggaggggagctgggattagctcgtgagccattgatcttatcatcatcatgtaacccgccattgatgcgtaagctgtgaaaaccgaagtaggtgaaggaagatccttagagaaaaacatcgtaatatctctctgtttttgctctgttttctcactgtgttatatgtagatggagagagtgaaagtgagaggtgaaagagatatataaagaagaagagaagaaccttaaggaagaaggtttcatttggggttagaagacattattagtcacacaatgtcttaatacaatcttttgttgtctttattcaatggatgtgtttgttttttccacaatattattagaaaaatctgagaattggaaaagaaataatagaaaaagtaagaaagaagacaaaagaaactcatggaaaatttccacgtctctttccacgaagagcatgtccattcattttccatttttatctaatatgaacagtcttatttaatagttattgcttgaccaatgaagactcgaaaaacattcatgtttccaacttttatattatgcagttgttgtgtggcaattttgttgttttgttctcttcgtcttgataacgttgtagagatactaacccattatttaaccatttggatcagtgacgtttttagatacaagattttattttaactatggtattacttgaaacgtttattgcttgacagaaaaaacaaatggtttttggattatgtttgttgaagtgggagatgacttgtacaatacacacttaacgtaaatagccattatatatactcaaaactagttttgcttttctgaaactcgattaccaaaagaacccaaaatattattgtcttttaaatcatgtccacaagaacagaacctattacactgacactattgtctacaaaaccaaatttggaagttttagtagatgtgttaatgtaagtaagttcgggtgttacagtcactatttatggttagaaaataacttttaactttggtatatctatgagatatttgatgattgaccataaaagaccaaaagcaaaaagattccgctagattgtcgcgatgtggcatgtgggggctgaggcaattgcgtgttgtgattcaacaagtgtagaaatgtgaaaaaggagaaagtacgtgtcagaagatcattcgatgattcgactcattaaccaagaaaataagtgtactatgagtcatggattcatcgtttcgttcattttggaccctggcgttattttaaatcaaaatgctttgctttaaacaaatattgaaaccactcaaactcgcatcgttcaccaatacttcaaaactgaatttaacaatacattttaatccaaatataaaatacgtaggtaagttttttgtttcttagtcaaaaaaacgtcttaatcttaaaagctgaaatggaactcttttttttcttttcttaatgatcagttgaattcatcttctcattttcgaactgcttaacaaaaaatcgaggaaccaatagtacaagatcttcgaattaataatcttgaatcttatccgattacaattttgaaaatgctggaacttacaatatttttagttagttgaaggacggaatatacggttccatagttttgaacgaacattattaaacatttttttgtttgtcttttgacggttatatagattatttaattatttcctcgttaactttttcattatgtacatttttcaaatatatatatatatatatatatttgcatttttttactagtatctcatttcacaacgtcagtatgaatatgatggtcaaggaaagcactttataaagatgaggatagaaaatagaggaaacaaacttttacttctgcatgtataatactaaagttgccaaattcataaaaatattaaccaaaacatcagaaagcatttttttatgattaaacaaaaaagaaattggaaaagagcaagccgacttaaaaaaagctgtcttagaaaattataaatttgttaatcaatctaccaataatattatattttcaatcatccttttcagttttgcttttaaaaagtggattgatgatgattcacgtatagactagtagccaaaaattgatagcaacataccaaaacacatagggtaggtcatgtcagtatgtcgccactcactatcaagcatcaaagtgtttgcaccaaaccggtataggtgaaccaaaatgtctaaccaattcgtaaaccaatcaatggaaactttcaagtgggctaacaaacacacaacagaaatacaactctcactcagttaagacacaactctcgtagttgggattgtaactaaattattatgagttccgtttcagagcaaccaaaagaagatattcagatcagaactggaattgcatctccggagagtatcccagagcttcaaggtttgcagccatggccttgttcattggcggtggtccgcatcttaggatctgcaatttaaacatgaaccatacttagatcgacacaccatcttaaaccatatgctcctcaccaaaaatgaattgtttatcaatgttacattctcttgcagtgttcttgattttgctttgaaacactgacactcatcgattatagaatttagaaattgtgatgattggttatgttcaagatcaagaacagaggagggtatacctgaatatcagatgcaggtgcagggcaatgagtctgaatcatttcctttgatacaaatccaacaccaccatcccatacttccggaggctaatattgtcatagacgatatacaaaaacaacaagaacaaaaggtatcagaaagagttctttttttaggtatttacatttgagaaacgcaaaaaaagttgaatgttgtggctaacctggttcaaaacatagaagattttaaattgttcagggtaattggtagtaagaccctccaattcttcctgaaaaaaaaaagtattgattcacttaacatttagtgtttgaaattagtctatgaaaacacaatacttgttctcgactcaaaagaaacagtaggtgaaaggctttttaccttcaagagaatgtcgtcgtatgtgacgttggcgtaaatgagatgcacctttgtcttgtctgttgggttttctagaattgctctggccaccttcacaattaagaaatataacgcgtttaaaacatatacattggcttcaaaaacgatatcaaacgcaaatgtatcagacatacttggaacatgggagtgatgcctgaacctccagcaagcattccaaatgccctaaactgacctggttgatacttgaacctaccctgacaagtaaagggtaataaaacaaaaaaagttttgagattcaaaaaaagtatagaataacaatgttgcttgtgtaagatcaagtaagcaagacatctaacttaaaggtacctttggtccctttacggcaagatggtctccaacacgcatctccctgaaatgatgagacatccgtccttgcggatacatctatttggcagcatttttcgattgaattagggagaaggaacacccgaattcaaaaaccaagtcaagttgagaaaatgtatttaagcatataccttaatgacaagttcgaaacgtccaacgtcagagtctaacgtagtcggggtgtatggcttaataacatcctctccttgaccatcctttcccctattgagaaagtcacgatactcatcacaacacatccatggaaactcactaattgaatctcaacacaaaacctaacctaaactctctacaataatgcatgttcacagccattttggataggtttcagaatctagcaactggcaggagtggcgattggcgaacaaaacacagagaggataataagaagtacgaggaccaaacctgcaactgatgtgttgtccaatgggaagacccaacacagaagtagaagttgggagttcaaaaacgaacttggccacattgtgactaagctgatgtctcttaacaagcttgaactccttgaaattctctggatccaaacacactataaaaccaacaataaaaacacaagatttactcaaatcttcaagtagatcagctgaaacaaggttcaatttttcattgtctgttgactaatccaacctaccaaacagaaacttttgcctcaatctatccaaagttcatgatttggattgaattccagaaaagacaaattgaatgaaatagagatcgaacctctgcgtttcttggaggatgtaagaaaataagcagcaccagcaccaacggcgacgaaagcaacgaagacacccaaaagaatctgacgatctagggttcggagaaactcggtatccatggcttctcttaacccaaatgaaaggaagaagaaaagtataaaactagcttaagaattgtaaaagggaaaaaatggggattggtggaaaaaatcagagctttgaattggagttgtctctttcccttgtaatctccgccattaaaatgagggtatgggatctggtagacctaccactttcacgttgtatagtttgcctcttttgcaacacattattattccattaacatatttgttacatttttgaccaatttttttttcttagtataatttttctaaagaaaaaaatatcttcgttttttcaattacaatttgtgttacagccttttttcaatcactcacccaccagaaatgtcaaatcatatattcatttttttgtgaaaaaatttgcaactatgtacattcaaggatgatagtatggttggtggttggtgaattatgtgaccggtagactcactttttagttctgactggtgcaatttgtagtcttaaaaagtgggaagggaaaatgaaaattttccacataatttacttcaattttgtctttgattggtgataacaaaataggatatagagtaaaggttaattatgatgaggaaaaaaacaaactccaacttatactagcagtcaaaagtatatttcttacagtaaattacatagactctttcaaatccattggcttgttagactagtatgtgtggttatttaatgtgttttaaagtttgactatgaaatttatgctgatgtcagttggtggcacatggtttaaacttctaatatacaaggtttggttcgataagtggactccatataggcgtccattagatggctcattaacaatagacttgatcttacaatcggactcaaacatgtagtcagtcgacatcgactacagtggctcctacctataaagtttgaaaaaactaaccagactctttaacatgaacaccaaatgctctccaatttctcagcaaactcttctcctcttccgcttatcatactatcatgatcagcaccagtaatgatatcaacttccaccgccggaaaagtcctcttcatgttgccagagcaatgtgaaggaacgatttggtcacagtcgccttgcatcaagtgaatcttaacgccagactttattagggtttcaagatgttcatcagcgactttggagccaccacatatcacattgtgcatactatgccatgcagagtgatgtgtgtgccttgttatgtccttgatcttccaatgaatctccctaaacaaaatcgaaaaacctttattgaaaaatatttgatagctttaaaaactgaaacaatcacccaaaccggttcaaatgtttttaccttttacctatacatagcttgattagccactcccatatcttatgatgcttgcagattatgaaacatacgcatctaccaatatgttcataccaagacatcaccgctgtcccaaacgcaagcggtggccacaaccgctttctagcgattcggttcaagaccgatccttctaccgatgaaggaaaataaggctgcattgataaagaaaaaaaacacaacaacataagttcataatcgaatctctttaaaattagattgatgattagaaagcaaactaatctctcaccggtgcaacaagagtaacggatttaacaatgttggaatgtttagcagccaaagcaagagcaattaagcaacccattgaatgtgcaaccacatgaaaagaatctaattggtatggcttaatgacagatctctctatcgtatccacatgatctttcaatgtatagagactatcccttggcttaggactctccccgaatcccaaaagatcgatcgcgaggagcctataatcatctttttgaatgtgttcaaatacagtttctgtccaaaaatgtgatgaccccataaaaccgtgtatgaatattacattctcggacggttcttgaacagagtactctgtttcttcaaaatgaaacatcaaaagcaattctaagtaaagaacattattaactaatcataatgcaaagatttaatagaatattaaaatgttataattaatctattaacctcgagaagtagaatctttgaccacgacgtgaagattcccatcttcgttcttagtccatgacttgcaagatttgcatccacaatctgaccatcgattcactgactcttgatgaatcttagattttctcagtttccgggaaagcttggatttgaattctctcgcgaatcccagaaaccacattccccggaaaatgtttctcctcccgaataaagtctccgacgacaactcattttcgtcggtggtttgactttgaggagccgccgccgtgcagtaacaacctgttgagttttcttccaaaatctcatcgacgaactcgtaaacgacacagagaatcgcgtcgaggaggtccaagaaaaagaagacgataaaagatagagcggcgtgaatcgctgtcccgaattttctcgggaaagacatagaagcggagagaatctagaccgtgggagaaattgagatgagtggttaagccacgtcgcatgagagaagtttcgaatttattaccaaagtttagatgcatgcactacaattatgttatatgttttttttcttttggtcggaaaatcttacggatatgttactattaagtaaaaaggcccgaaggctttcccaggcccaaaataggggagcctgatttacccgcagatatcataaacgacgtcgttctaaatcttgcctctcgttctaaatcttgcctctaacgacgtgttttcggttttgcttataactctccttttggagcttgctgatatatcttcaatctttaatattttgcattactttctcaattctttactgcctcaccaagtaacgatctcttttcattcacaacatgtttcatcactttgtgttacgtttatattcacaacattctgtctgtatatatatttgtgttgtttcttttaatcaaggcgagaccaaagcttattcacattatggaacttcaaattcaacagcgaaagcaagctgtgaaggacattaagatgtttgtgtgcattaactttattatattaatggtatcagtatcatccatccaagattcttcaaaagcttgttgtggtaacgtttgatgtattatagcaatgttgattttgttgtgtgcaggaggagagaagaaacacagcgacttctaaaggatgccgtcggtaaagatggagaataaagtttctacacattgtgtatatagaagttgaattaaagaaatacaaaaatcgtatggtaatattactccgaaaaaatgttatgctacatggtcatttatctcctttaccagtgggatcagagttggtgatatgaggatttctctggtgtcgttgagaagttaaacgccgttccaagggagttttcctcttgctgacaacaaacctattcactcctttcctcatcggcattatcgacgggaaatcttcgtctgggatctcactcagctctgatatgttcttaatctcagccactctcttaaaccatctctctgcttttgcttcctctgacatgtccaacaagtctgactccttcactaacgaaccctccaagctctttccatttctgatcttcactgccactgtatcagatttgttgattgaaggttctcttggttcttgttgtactacctgagaaacgttttctgtcgccggagctggaagagtatctattgattccttgggttgtttctctttggcgaagtagtcaggtgggaaagggacaaaggggacaaagtctgaatcttctggcctcttgtatgctggagaagtcagtgaacggtctttcttcctactcactacaaaccgattctctccttttcgcataggcattttctcaggagaaatctcttgcggtattgcgctttccaagtctgaaacattgtgcagttcggtgacccgtttgaaccacctcgcaggttcctctgatttgtgatcttccttttcaaggcgatctgtttctttgccagagtgatttgcatctgacttgtcctcttgatagacattttgattgccgcctgagaaaccatccacttggatgttgtcaatcagacctatctgtgtttcctccttaggtttcttggcaaacatatccgaaggtaatggcacgaaaggaacaaaatcggtgtttattccctgagaagattcaaaccttctggaagatacattcttgtcatcagaacgagaagtcaaagaggatgaagaaccaagaatctcattcaagctcctagttgttttacttcccaaagcattatcgtcgctccttttcgagtttccatctgtagctactctgttctcagtattagccaaccttctctcaagaggtggcttcctcgtgctaacaacatatctattcactcctttcctcaaaggcataatctctgggaaatcttcatctgtatcaacactgttcgcatcagaaccaccctgtgctactttactaagccacctctgtgctttcttttcgttttcgaccagtcttctctcaagttcagggtcacttgaataatcagagttggctgaattgagtgaagagtccctgggtcgcttgcagtcacatcttaagcaagctacattcctcccgtaattatagaaatcacatctgataagtgaaacaaccaagaaagaaaggaaaggttaacctcatcattcctcatcgcattagtcataaagtagcagagagaaaaaatcagtttcttactgaggacactcccattcactaccagtaagctgtctctttggtcttgcttcatcacactggaagcatttgacatttctcgcaaagttcatgccactgcacctgtttcaacaaattcccacatcatatatatagattccctaaacgacaagatgatgaaacaaagacaattacaccatactgacttcttagctctaaaaataagatctttcgaccacaatactagtgtaatagtcagaagtatacttgttcaagctcagatccagaagatttttttttatggtatccttatatctaggcctacttatatctttccatagaagaatggtaaccaaaaggccataggagatttacaccaaaaagctactgagaatccaacaaattcatacctcgagcaaatccagtcaccacgtttcatctcaacgttattctgaaaagacctgactccttgtccatctctatctgagtactgattttgcatcgtgtcatgaacattcgactcaggaggacgcaagctcatcttcgctatctgactcaagaggcttcgaaccgatgactccataatctctttgttatgttgtttgctctcctcagaagaagcaacatccacaacataactcaaaataagcctcatcaaatcaactgtactcgccttctccatatccatcaactaatgtaaaacacaaaagatcataactttgaggcacaaatcaccattgaaccaagtttagacataacctagcattcaccaataaaagactaagcatttgccagaagatagaacttaccttaccaatgccctgaagaccacttcttaggtaaaggctcatccttttaagtgaatctggacctgtcttgaataaaaatggctttccattctccaccagcacttcaacgtctctcctcgaaagcattctaataaacactaacatcatcagatattcagattgagaatcaatccaaaaagagaaagagaaaaaattgcagattacttactcaagcagttctggtcgttcacgagctagagctaagcaagcaagagctggacggagaagttcatcaggaaaaccgggaaagaattcactttctaaaccagaaatcgaaccggaatctgagaagtaaccagctttggagagagattggagtagctctgtccattcaggtagctgctggttgtgataagaaggaacaaaatctgcggcggagacacggacttggtgattgtagaatcgtcctataggaaacgtggggataagcggcggcaatgacacgagtggacggaaagaacatagattggttgaggcaacggacgaaggaggaaacgcacggcggtggaaacggcggagattggctatgcggctgatgtagagaccacggagtagaaagagaggaggaggatgaggagagaagagggagatgagtctggtggagttgttcatcgttgctcgtcgtcactggttttatttttaccggcgagaattatttcagtgatgtttaaggaaaaaaaaaggattaataaatcgcaaaataattgcaaaatgaagaaaaaaataagcccatattggctaacataggcccataattctgtgtgctactacttgggcttgccattatgaatgtttggtaactttggtaaataatgtatttcattcaaatgggatgtctcttaaagaaaaagtaaatggtttcgtactaataatggaattaacccaagtaacgaactgatagtaatctaatctaagagatgttttaaagataagcgtaagttttatgttgaaatcttcagtttatacaatataaaaaggagtttgcagattcggtatttatcaaattgcacgtcgatttgacatcaattttcgtgacttgaaaagttgaagtgtacattgtacaatgtcatacgcatgcatacatttcttttgacttaaagccgctataactttaaaagatttatagtcatacatttctccgttattgaattttcacttacttaacaaacctcgattatagttatacttctacatatgttcgtaataagtgatgtttacttgtttagagatttcaattcacatacgttatttaatttctaacttttgtttttcttaaattaataagtttatatgttacaacttacaactttcgaaaataatagatgatatagactatttttacatatactatagaaaaaagctatgtcaaggatctaaaatagttatatttattatgtattagtacttcttggtttcagaacttatacaattacaatatataataaaacctaagaaataaaaattaactaaaaaataatacgttatgaatatagttttatataaacgaaagaaacgaaaattaaaacatcagtggaactaaaaaggagagaataatatttgtgttctcttgaacgtgggagtcactgtgagttaaagttgggtgtggattagttgccgatcactgccgtcaacttttgactaatgtttattctgattaacacttttacatacactaagctatttataatgtaataactaatttctttgtttagatctatgtggagtaaaatattggtgagtacgtagacaattaactgccttgataatgacttcaatctaagtccgtaaggtataacctcattaattcccctagaaatgtattttatcataattaattactatttatactttgatgtgacatgtttagttctatgccacaagtgcaatggacgggctaacaactttgacatgatttgtaattaaaattcaattttaataaagagactttatgtcattacatcatgagataaagccctaaattcctcaaattagttaaagtgtcttctttaaaactaatcaagaagttttaaagaaactttttctatgttaatgtaattagtgtgacttatctcatgaatcatgattatccgaacattattttagcgcttggagtttcgaagttaccttttctcgccaccttttgttttctgggtctattgaaagattgtctcaaattttaaaaggataagaaaaacacaattccattaactttaatcgtacaagtgagagtgttagaaattgtggttaaacaatgatcaataaccactaaccatttcgtaaaattcaccgacgactttatcaaatgacgaacatgatccgatggatccacgaactaccgaaagagaagtaacctcagaactatgtagaaaaagcaatcctattattcattcgaactaattcaatatgcagctagttttttggtctaacgacttcttatcgtaccatttttcatctcttatcatttttaccatattcaaccataccaccatttttatcactattttgtacagttacaaagctcttaccgtcttgcgctattaatcggaccattaaacaacttcacataaaattttatattagacgtttgaatttaagtcgaagttttgataatcttaaatgtaacccctaaaatacagtcgatagtatttgatgaaacaactccctcattaaaaatcgattacttttataaaatagctgtaaaataaatggcaacccaaacgaaacaaaaaatatctatcccccgaaacatattacatatactccacatctttcatatatgtttgtttatcggtatgtctttaatattatctcttcttaccccaaaattatacaacaatctttcaaattacagaccactttcatggtcgttggaaaaaaataattcttccatagtcgagaatatgatttgcaaaaatgttattaaataataatcattcaaagtatcttaataaaaaaacaaaagaaaagtggaattggtccataacggttcggggaacttttctatgaaccggaaactgaaattcgtgaggacggtacacgtgttaggtaagaacacgatccgctcgtgtgtaacagccaatgatgtcgtcattccacgtcggtacaagactttttttttgtcgtcaacagaagatttcaaaattaacgaaaccgttcccataaccgaaactcacataaaaacaagacacaataaataaaaaactttaggtacttttctgtcgtttctttggtttctaacgtctattcgtgttatatttgttttattcttcatttattattgttgaatttaattctagttcgagttcagttacatgatttctctctttaatctctagtattttaatccatcaaaattatgtggttgcatactcgatcgagtttagtacaattactaaaatatgtagctttgtttagtcatatcaagactatagtaagttgttacgcatgaaagataattattacattcaaacgaatgaccactcaattcttatatcaaaaagatacaaaaaactaaagtctacaacttataggttcaatgggagcataaatagtccatatcattgaataataatggtcttcaatagagttggttgttcaattattatttttggtttataagaaatgaattgaacttttgtttgtcaccattcacattttcttctcttttttgtacttttagttttcctaaaaattaaaaaaactatgttcccttcgtacctaaaacttactttaaaataaccaatttgatgatagttttttttaaaaaacttcaacaaagattatatatttcatcctgaaacaaaaattacagcaaaatttaaatttaaactagtagcaaaaaatataggatgtgcatatgttttctgtttgccacgtctgttttccattaaatgtacgcacaacattgtttgagttcaattaactatttaagtaataaacaaaaacaatgcttgaatttcactgaatatagtatataagtaaaaatgtatacaccccaaacgacgtcgaacccatcgttcaaaagatattgaagtacttgaactagttgttgagctaatcatcatattactttataatttaactacacaaaacgagttctttgaaagatgcgaatatatatatacacacttatacgttatggagagaacagaaagctcataaaagcaatttatttctctccctttaagatcttttcttgctttgtgtccgaaacagacaaaaattgattctgttgttttttcccataattaactcacacacacacacttaacgtacgtgcaatatctgtatgtgtgcatagtatatactatagccacacgagcggttcaaaaatgttttttggagtttccgagactgttgagactgtggggcctatggtcatcgaaccctcccacacgcacgagcgggtctcgttttgcatgcatctacactacacgtacccaccgacttttccaaatcccttacttttgcacgtgtagagagagagagctttgtactgaaagtatctcattattcgaaatttttcgtgtaagagtaaaaactaaatcgcaacgtacgtgaaggaaaacgtgaaccttgaatatttaatgttttcgtgcggtttcattttaactatttaattaacacaatattagtacaataacaagcagctcttatgaagatagtgatgaaaaattgttatagatctatcttggaattttaatgatcgaatttcgattttgtacgaccaccatcgaggcatcgactataaatatagttaaaatgtggttgctgaaaaaaaaaaaaaaatgataaataaaatgaaaccgcacgtaattgtataaaaccattagcatgggattattaggccacaatttggtaattaacacttgtaattcatttgaatatgcttttacaaaactttcccttcaatttcttttggtgtgtgaataaacagctatcaattttgtttttcatgtacattaaataaccactctgcactcatcatcattttctaaaatattcttctatatatattaactagcttgcaaataaatgtaaataaaaatataaatttcaataattttttttagagaatctctctttcctcttccaccatataaacagtgaaaagccattcaagtgctctctccctctatctctcttctatttttagtttctcttcccttaatccctaaacccagaaacatgaatccaaatctccttgagaaagatctaagaggtaaggaaactacaaatgggtcaataagatacaaagaagcaaacaacttcagatctctaccaaactcacacactgctgcttgtaaaacttcactcaacaacccctctatctctagaaaccatcctcacaacaaatcagcctcagtcttggagtcggaagatgaacatgggaacgagagaggtgaaaacgaaaagagtttaagaatgaggggcaaaagtggaattaacacaaaagtatgctcacgaggacactggagaccaacagaagatgctaaactcaaggagcttgttgcccagtttggtccccaaaactggaacttgatttctaaccaccttcttggtagatcaggtacatttattttacttaaaattcttattacttaattatttccttcacttttgttactccaaattccgcaaatttaactatttttatgtagaagaaaaataagtaaatatatttaaaaactttggtgagttgagtttccaaagttattaggcattttcgtaattgtgtttggatttttttaaaaatagtttttacaagttagactaagttgtataaggcataatgacataatgcttgatagtaactaatttttataatgtgagggacacttctttgactacaggcaagagttgtagattgagatggtttaaccaactagacccaaggattaacaagagagccttcacggaggaagaagagtttaggctgttagcagctcatcgagcctatggcaacaagtgggctttgatctctcgtctctttccaggtcgtaccgataacgctgtcaagaaccattggcacgtcatcatggctcgacggactagagaaagccaaagacaacgtcaacagcctcctccgacgttgtcaagagacgctgaaatgacggtttcgtcctcttgccgctacaatcaaggtaagttcatcaatgaagaagatgacgacgacgatgtgtcagctgtctctacttgtacgacggagctctctctcactccgccttcttcagcttaccagcctcgcttctttaattacgatagtacccttgcatcaggtaacattttatttatttgcttaaatattatgtttactatgttttttttttttctctattgaaaatatattattttcatgacccaagacattaaaagtatagaaacttggaatgttttttttcgttttcggctttcttgagaagtgttttcgtgaatctaactataatgatctcggtcggttggtcgagatcgtattgcaatctttattgggtgtatcgttgatcatgatcggtttatactttaaccggtacttccaaatatcatttgtggtctaaatttagcttattagattccagtcttgttaatttttgaatgttcaaagcatataaaatgataatttaggccgacatgttgtataaccgacgacgagtgaccacttcctacactttttcatatacatggcaataattataaatttgaatgactagaaaagaaagaaactgtttttacatcgtaagagtacctataggcataataatataaggaggtgaagtactattgtcacgttactatttcaatataacaaaatttcacgtgggtgctgagaacttatttttctaattttgcaggcaaagatggtcagtgtgtgcagagagcagaagtaaatggcatatatggtaaaaagatggaccatcaaaatcaccacacaatctcagtcagtgaaagaaaggtggagatgaagatgaggagtggctattactactttgattttcttggagttggagcttcctgattaattagttgcagagctagggttcaatgctgaggaattgtgagataagaaatggctttagtttcttctatttttcctggttaattaggcatgtttgtttaacatcttaatttgggttttggaagaagtaagcggtatgagggaaaactgaaaacaaaaacaaaacctagaagtaaaataaaaagttgaatatataatcaacctcttttctgtagaattagaataagtgttcataaaatattgcaattttccttactcacacacgcaaatttaacatagattatgaaacaatagcagtaactaaaaccagcgagttatttttgttggtaaattacaagctttgatcataaacctattgcattttatagtgcattacatgaaggatgttatctgctatttttggaatgtcacatatataaataattcaggaatttctaagtaaataatcaacgtgggaaatgagttcttgtttaaatttaaaatctcaattactcggctcggctcggatccctattatcggataccagctacattgttaagttgggcctaggactacaaaagaaacccatatatagacgtacctttcatttacaaagggtccaaaaagctcacatagaagtgggcttactcgtttcttgtcgtaattttgaacttaaccctacccttctttctctgttcaaaaaaaaaaaaaaaaaaaaccctacccttctttcattattatatcaagttcacaaaattgacatccccaagaagaaaaaatggtaactagcgatctgtgtcgagtactgtatttgtactagtgtactttacaaattgctattcatatatagaaatatacgcactttgttagtgatatgattatgattcgcatttaaatcattatatttgatttttctgtttaaaaaaaaaatcataatcatattacttacacactttacttttggctctctcattccgtcattcatttagttctttttgttcgtttaattgttcacttggttagttaagaaattaaaaatgttcacttgataagatatgttaaatgttatcctctaggataaacagaaataataatcctcgatcgagaatggtataaagtaccttaatacctttcatccattggataaatagattagatcagctatgtactaagatgatctatttacatcgaaaaatcaagatttttgtacataccagtttaattttttggattatctttaaatatatcaagtccgagggacatcttttttccacaaactagatctctaattaagatttggctgtggaaaaaaaaaatattaagatttggcttgttttgatagataaggtttgtgttcaggcgagcaagaatcgacaagaaagcaaaatatctgacgagtccaacatttatttaatctttttattattacttatttgtaatctaattatacacgatagacacgaaatcaatagaggtaaaaaagaaaacaatcgaccgtatatgttcccacataaaacagccagttcatgtctgtctcggtacctgtcgatgacaaaaggaaaacaaataaaaacagattcttaattagggaataattagagcattttaattcttaaaactgctagttcactaattactgataatattgaaaaatgaaaaccctaacgagaaatggtttaacatcattttatatatccaccgtctattcttttttcttctttttttgagcaaagacaccgtctattcatttgccaagagagaatataaattcccaaggtctcttcgaccaatgaactcaatattttacaaaattactcaaaagtggagttattggttcttgtgtttttggctatattctttatttttaaaaataaataatatatactacatatttatatttatcaaaacttggaccaaataaaaaaggtcacatatatacatccatatatatgagctgcatcaatccgtaaagcttagttaaatcacaaaacttcagttacagatattaatttctacaaaaacgatattcatttattacatgcataaaccgacaaacatcaaattgatttatattttattatattttctgcagaaatatttttatgttatagttccagagagtgagatgggttcttgaggttaatttctgcagacattaggacttgactatttattaggcttaagaccattttctacacactttaacatactaatttaataggaaatacacataatatcttatggtattttatttacaaatataactatggtttgttgggtcaaacaatggtaaaaataatgaatttaatcatgagaaaatcgttttcggatgaacaaaaaaaaagttttaaacagaaaataggtgtggaaatcattaatgaaaatattaaccatgagcattttgttatcgtgtataaattaacaataaaaagtgaattatatattattagttaccaggaaataagtttgtccatgttgtaaagaatgcatcaagaaaccaaactcatcagtgggaagaggaagaccagaggaatgaagtaacaccgaatcatcaccgaacattgttttcatgtctattgctccttttgttacttccataggaactccgtttataaacaccgtcataaacccttctggaaaaaaagaaaagaacaatagatacaagaacaaaaatagagatttgagaattagctttcaacatacaaagttagcctaacataaaaatttggttttaaaccctcatagaaaaaatggttggctctttctttttcactttcaaaattttatttatataaaaattactcatccaaatatttatagtttaaatggtttgaaaaatgttgatttagttggaaagtatcccggtttaagatctaaaaactcaatgtgtattacggtgttaaaaaaaaatatgagccatgcagatgaatgaatgattcaccttgttcgtattgggagttggagttttgatcagatgggtttaaaactgatgcagcatttgagctatgatgctgctgctgatgattatgatcagattcatggccatacattttgaagagattctccataccattgttgttctcacacccaccacttgaagaagagaggccgaggaaaaaggaagggatttgagatgacgacgatccattaaggaagtaattagctgataagttgctacaacttccaaaccccaaatcaatctcgttgttgctgcaaggatattgatgcatgctcatggccgtcatgtgctggtggtcttcagctcctatggaggtggcggctgcggtggtggctgctaaaagctgccggtgtctccggcgagatcttgaccgtcggttttgaaaccagtagaagacgtttgcgtctcccacagcaccgaatttctcaagcatctttcttatcctcaccgtttcatcttttggtgggttaacagtaccactgttgaagatggattcgagtatcaagatttgctccggtttaggtgaccaacgtgcccggactggttcggtggaagtggaggatgggctatgtgaagcaccttcttgattcatttgctatcaagattcttgtttttttttcttcttttggttggattatggattttaagaaaaagagaaaggagatgttgtggttacttgagggaagatttatgtaatatgtattgaatatatacagaagagagattctcaatgagttcttttttgttttccttaaatattaagttacactattttagtgctctcacttagaattaaatattatataggacacggtcgaatatgttaacacgtattccgagaggcagagggttaaaaactgttcttgtatatcatttgattgtataacaaaactaacaagaaatgcttccaccattgcattattggaccaactcacaaacaaaccctggttaacgtttttctcagttttgaatttacaatacaacttttatctgtgttctcggattgataatattcacaccccaaaaaatgtataaaatttgcaaattcgtatagcaaaatatgattatacatgcaattgtgaaaacaccggttattatttgtcttgctttctgctgtagatatgatcaagatgtttagcaagttattcataaatttatctttattaaatagcaaataattgtacaaacctcgggcgatctggttgctttttagatataaatgtggacaatagattatcgacgtcatgcaacagagttacagaggccaaaaagattttgtttgtcaagtagaacttgtctttgattgagattttgattgatatgacaagtttgggaatacctcatgcacatatataacaacattagccgatcaaaaatctatgtacgtactacgtagagtcatttttaaatatttaactcgaaaaaatcatgtaataattaatataatagaatttatttaaatatatcatagttgagcgagaatttataaactaacaataaaaatgacaagaaatagatacttaggattttgtttcacctttgaatttagtgttccaagttacgtttgcgttgtatctgaccaatgaccaatgaaaagtactttactagtatatccacgagaattacttattagttcaaggtggtacagcaatcaatatatctttagtccattacattttagaattcgtttgcgtttattttagaatacaaattaaatactggattaaaatggaacttaagtatcctgatcacgtcgctatatgatcggatagaccttattttagctggtgtatatttaaatccattaaaatattatacgataatttttcagaagaaagataaaacagctaaaattttatagaactttttcgttacgagcagatgtaaaaataataaaatctaacgttgtatctgtttcatgattaaagcatcattgtcttcttcttttttaactcaaatcattgtctttttaacgtgttttaaactattaaatccaaaactcgaattaaagaagaaaataaaaattgtaagctatgtcacgaatcaactctataaaaattgatttgataaaatgatttatactccttttttgacaataacatttaacgtttgattttagagtacaatattaataatatttattttttaactaccgccttttatttgataataaagctgtccgtgtaccgtatgtgtacgtattggttagtgtgcatgtacgtatgcaaatataatatacgttaaaagttttaagagtgttgaaagatacaagaggcgacaatctgtttctttcagatgcattctggttttttgacgatttatgttaattgcttagctgtttcaatttttttttaattctctaaaaaagttcaagtatctgtatatttaattttcatacttttttttattttagtaagatcttatatcttactaaaagtacatatgtcatgtgtgttaatgttgttattgtgtgtttacatcaatattcaaacatgcatataatatatgctgatattaacaaaaaaaaaacaagttttctttgtacctttactttatcttgttttttttttttttttttttcacatggcaaccttttaaaataataaccatcaagttatccggcgtgttttttttttttttttcaaaattctctaatcttaaattgttagtgatatttttggttaagaatctctaatgaatttttttttatccgtgaataggtactggtagtctaatcttgatctacaacaacctaatcggatactcataaattagacctaccactcttaatatatacacacttttactgaaatttttataatatttgttttgctaggttttagaattcccttttagaattcatgcccatgaggaaacagccaaactactactagcagtagtgtgaactaatcatcccgtgacttctttaaaataaaaggaatcaaaacagctaaataacttacgtctgctgcacagctgtttttttttttctttttttcttacatcatgcatatattgtaagcggtaaaagattatgcaattatttaaaaacacatttttatattaccgagtgcgactgatttgatacaactgggtattacttgtcttttataacttctctagctccttgtccttttttcttccttttttatgttacgttctattgaatttcttaagggccattgtaaccatacacagacaaattatacgatctctatccacttcccatcatccaaaaccacaatcccaaaattgcttttgggacgttggagacttgaagtaaaacccaatatatacatattacatatattgatgcacttaaatcttttataactaactacggttaatcgattagtttttttttctgaacacgtgttaatcgaatagttatgagccaaaatccctatattttctcgttgaatttttttttgtcttcatgtcaagtggaatcgaattaggaagctcaataacgttataatgtttggaggatccgaaaactcgccactggtccaaaactcacttagtaatggacctatatatatgttttgttaaactaaacagataaattgatatattaaaatcctcaaaaacggagtatcatataataaaataatacttattagattcatatataagacgtctaggattaaaatacaaatgagtctctagctactctgcagttaatatcttgcccacaatacgtcatgacgtattagaaaataaaaaattgacattggtaaaagtcttatagtaagaataaagtagacccctagggatcaggcagaaactgtacgaggattcacaaaagttacctttaagccactctctttgtggtcctgaagaccaaaatcttgtaagattttgagacttctttcttcagaaatctttcttatgtggtcctgctctgtaacatgtacggtacggactctcccattatatacctgcatgatgttactaagacataccctttattataatatgtatgagaagatgtgttggacatatgtagtgtgtaaataatcactaaaggttctgcgtttgtattaaacaatatttattctttagcaatacaattaaccattaataaccagaagaaaaactaatgctactgcagaacggcaagcataaccgtgacaagtgcatttgatcacttttcgtgtgctttcgtgaaaataaatttaaaatctttaaaatctcaaactgtattcgattctatgcaaaacttgtagtataaaatagcttaaatggttatatatatatatatatatatgcatcattatgttgcataaagaatatatagagcagtgtatatatgaacatataattaacaaaaaaaagattttatatatgaacatataattaacaaaaaaaagatttcaatcaacattgtaagttagtttacacaaatagagctgatgcatatgaagcaagttttgttgatttggccggtgaatctgcagagcactcataggggcactaaaagtaactagaaagaagacaaaattaatataggggaaatagagaacacatatgtcattataattttgatatgcatgcatcctgacaatacacatgacgatcgcttttctttttactctatctgaatatagggaagtatacacattttactcattatctaatatttatagtcaaaagccaaattttttattcacttctcactccacttttgcacacaatccttaattaatccattttattgtacggacaaatatttgatagagtgacctatcacctagatatttatctcacccacaaacataatattgtgtgcaaaaaaaaaaggccggttctttttttatcgaaggacgattttctagcattttttcaccaggtttatcgtaagttaatcatgaggctattattccaatgatttttttaggttttcaggtattccacaaacataatattgtgtgcaaaaaaaaaggccggttctttctttatcgaaggacggttttctagcattttttcatcaggtttatcgaaattaagttaatcatgaggctattattccaatgatttttttaggttttcaggtattccacaaacataatattgtgtgcaaaaaaaaaggccggttctttctttatcgaaggacggttttctaacattttttcaccaggtttatcgaaattaagttaatcatgaggctattattccaatgatttttttaggttttcaggtattccacaaacataatattgtgtgcaaaatgatttatcatattttgtaagaaaataggtgctttttggggtgcaaagtgtgatatatacattaaactttggccaggccaattacaagagaagtcaaagactcctttgcttgagaataggctaaacgattatagctacggtctacggagagtgaaagtgaatgaaattacatcaagaaaataggtgctaacatttaatatatgtataactagaaaataaattttggcgacgtacaaatttgtagatgtatgcgagtcttcagctaaaaatgcttactaaaaggtgttggacagtaaagaggccccattaaaagctgggatgctttacttagttataacttagcccatctcaaagcccatattactattattatccttttttttgttgtcgtcaaagcccatattattatactcaccaaaaatgcatgaatatgtttgtgtttttcttttttgacagcaggatatgttttctttttaatttattttgataatagatttcttttctaattacttagattatatgtcatgctgaaaatttaatccagctaagtctataagagtagagttgtagttaactagggatagaatatgcatatttttgtttaaattttactttatttatttatttatacttagttcgtttttgcttatagagtgacaattttatgaaaaacaatattcatatatatatatatatgattaaccatgataaagatacatatcaatatttcaatatcacaaattatttgtaaacttaagatacatccaccaaatgcagaccaacaatataatatatagtaatctttctcgaaaatcgaaaccatccaatttaagaaaagccttatttatgcaagaaaaccccaaccaaaaccaaaaatgaattagtaaaaatataaagaagatttgaaatatattgtatcaaatgtaatattatatccacgcttctgtagttcattagttgaatctcctgcagttccttctgatctcaccgttacgaccagtaagcacatcaactgctcccatcttcaccattgctctaacgaactgacgcttgaagaaggcgttgttattagcataccgagccacaatcccacgagtctgtgggtcggatgcgaggcgttggtcaacttgcaacactcctctccttttacggatttgcttgaagaactggttgtcgaatctcaatggactcgactggtctagtgccgccgtcgcgctatttctgcatgtgttccttaggctacatacattcacaacagaataagaaaaacatttaggatatatattaatgagacaaaataagaacatggaactaatttcgcttaggtctaaggatcggatcaaatatgtttaactttagaaaaaattggttttaagcttgtttttttttttaacattttgaaattatcattaattaatgataaaactgttttttttttcctgtaaataatgttcaatatggagaataatattttaaaaataaaataaagttgaatatttttgaaatatagaaaactatacatatatattttgttaatgactaaatattccaaaaaaagttataaaatccgaatgtaatttataaaaaaaattgctaatcgaaagataaaattaatttttgactctagtggtggcgtatgattgaaccatgaccggtttaaaattacctggtaaccaaagcggggtccatggacgggtccggtcgtccagttccttggaagctagtgattctgtcactaaagagaccacaatttccttgaccaacagtgtgtgcacccaaaagagctactgcatcgaacgtgttcatccctttgttcgtgaataaactcacggctccagagacggagatcgttggacccggtaaggttacatcaagattgtttgagaccctaccgtcacgccttcccgtggggatgctgtagcttgggcctccggctaaggccaccgagtcacgtgtggccaatgtgacgatgtcagcacatgagactgtggaagggcatgcagcttctagctgagccttgatccggtctatcaggtcaaattccctgacgcttccgtttggtccagcagttttctcggaattggttgaatcaatgaggagagaagcgtcacagccctatccgaacataaaaatattaaaataagatgatatagacaaaatgatatgaaaattcgcttaagaccaatcattactattttagatcatttcatatatttacaatttttgtttagtttgtgattaaatatatcctacttaaaataaaaaataatagtaatatattaatatcctatttaaattgaaaattgaaaattttagaaggataataacatttaaattcactttgcacctccattatttttggaccagtctagctagcacacaaacatttttcagataaatctaaaatatcacatattcaactaaatattgaacaccttgaaaagaaactcgtattgtcaaattttaatatatgattgataataagaaaatattataaaacttattattcataatatatattattatcatttttaaatacaaggtatgtaagaaaattcaaaaaattgattgaaattacaaactataatagttaagccgctttgagcaacatgactttgttggaaaagttgaacaatatatattagatccttaccttaacgaaacagtcgtggaaatgcatacggagcaaagcggcggtaacggttggggtaacaccaaaccgttggcgcaccagattgcgtacgatagtctcggcttgagggcatgattgactataaaacccgactctcagttgagcaaatgcgatcggaaaaataaagaaaagcacaagaagagatgaaaacttggcacccttcatcattttttggggttggaagttttcttctatgtattggtttataacttcttgtggaaagggttgtgagtcatttaagatcaaccataaggtatatatatatatataaagccaaccttcgaaatataatttagagcctaaaagattaatacacctcatatacatgccgaatacatgcgaaagtcaaaggttatattatttgtttagataattaagcttagaaacgtttgcaaaggcgtgcgagcgactttgtaacattccttgccatgttgtaaatttaataatttatattacaatgtatatgatatgctgaaaatttgatccagctaagtcgataatagtagaattgtaattaatgttcatcgtaatctatttcgatttcatattcttggcaacttcgattctgaaagaaatgtaaaagtaaatttaatgaaatagtaatgatttaaaacggggtttctctaaaaccacttgggtctaaaatatatattttggacttttattgattgacaagactttcatatgattgagaatgttttgaaggacttaagaaaaaaaaaaggatttaaattttaggcgttatctttaaatgtatatgtttcacttaatattagttaaggtcacatgtacaacaaccacatataattgcacataacaacttattagttgaggcaatattttaattttactagtataaactattattctgaatttgtttttcattaagacaaataaccaattaagtatacctcaatatgtggacattgcaacaattgctccattactccttatgtagtcatctatccagactccagaggttcgataactgattactttagtcgtcaaattatctatccatgaatagtgaagacttaaaactactgatttaatttgttaatccgtcatgcctaatgatgatcgacaaaaaataaaagaagttggtacatatatactatagtcttgactctagctagggtcctgatttcttaatcgtaaattttaagacacaatttagttacgatttttattttggatgaattgaaagtagtgctaaaattattgtgtgatgactagtcgccgtaactacatttttattatcgaagttttgtaagatcagttaataaaatttagtgttgttcatcgtaaaagtaaagcgaaaacatttgaacaagatatgtgtagcgataattttcagttaattaaaaaagtaagcatgcatgaacagtagacagattttgcaatcctcatatttacaagtacagttatttttccaaatataaacttgaaatttatctacacttagattccaaatttcttaacacttttttttttatgttacatatctttatcatctttatcatttttcaaaatttcgacaaaatttacgtagagatataaataggagaaaaagactaaaaataacaagaaaatcaacttataacctaacacaaacagtaaaaaatacaagcgggaacccaaacgaactttgaagtttcgaaatttacgtgatttcctcaccttcaaatttgtttgaaccatcattattacggaagttcaaaaattcttaacattaaaaaaaaaaaaaaaaatcgtaattgaactccaaaagaatatgtaacactaatacccgaaaaatgatttgatatattattatgagtactctacaattaataaatcattttcaatttttttggaacgttcacaagagatgtttgaaaaacatttgggaatgatatccaaaaagtcaaaagttcaaaaaatcaaaagcggacgaaggaaagtttgttacttgaggaaagcgaggatgaggtttgggaatattattttgacgctttcattatatcattttaaaaattacgtctaagtcggtttcgtggcgagttgtgtaaagaagctggcacaacactaatgatttggttgatttgcttgtaagttgtaataatgtgacattttcttcccttacattatacttgcattgattatattagaatatcacgtaccgtttatgcatattattttagaaaattaagacatatataacacaatagtttttgttatagtatcctcgtcgtaccacaatctatatttaaacacgcataaaacgaatttttaacattttttttctagtcgaatttaagtcttacattttaatttcttaacattttgaagcaatttcaaacatttaaattggtctttaccatgctacagaaaaagtttcacaactccttcctctcaatcaagatcctcacaaaatgatgtggcttatagtgtccttaacaataatccatttgctgccttcaaatctagaattaattcaggtctagaatctgtttgtgatgtagcttagagagttagagatcttgagaaggatgaccaataaaggcagctcaaaaggttcaagagatgtaatatactcatgtcggtggacgcagaaaccatggtcgtggagggcctggaggctgaggcaatcgtggaccattcaattaaggatctctagtgagtatatatggaggctatttcttctttagctcctccctagtttcttgagcttttgatgtttttaaaagctagcaacttgtatgcttatgcttatctctcaaatttattttgcattttctgtgacctttcatgtaatctctttgcattaaaaaaacaaaaaagattttatctatcaaaaagaagaggggttagttttattaggaaagaagaggaactcatgtggacaatatctcctaatgaaatactgagataaaagattaaagataattatttaatctaactacgaaactaaacacctcctaaagtgagaaaacttgaataacgttcacacatgtataatgaagacaattaacccttgttaaaattttatatttactatagtgccattttcatctaaatttagcaatggaaaaacttaaataatacagaaataaaacttgactgtttattgtaatgccattctctctttcactgcagagaaaaccaatcgtgaatgttgcatcacttgcatttagagcctgaccttgagcattaatttgaaagctatatccatttagagccttaattatcttcgtctacatatgtacaacactaattacatgcatacatgaacttggacaaaaaattaataacatacatgcacacatgactacaaattgttatgttaatgtagtaacgagtcaaaaaaaaaaaaatacattaatggaacgaagttacacagattaatcaatttcagattaatacatgattttgatttggaaagttgtatataatataataataatacatgacgccaaaaatacaaatatcacaacgaaatgatgtaggatgtgaaacttgtgtaccaagaaacgtaatacgaggaaacactggggaaagagagagagcgatagagacttaaatcaatttcaaatcgaaattatagagacttttaagaactacccataacaacaaacaacggccttttgcttatcacgtgaagatttcaagaaccaagaccaaaaagatctctctccttttcccttgcctctgtctatataaattcattctctctttcttcgtctctttctttctctgtcttcactttaactctctcggttcttctccttcatctctcgctctcttcgactctttgacttttcgtcaccgtttccgccgcaagaaaaccgtgactcaccttcgtcttcctcaaccgtgacgtgcgtgacccaccttcgtctttctcaatggttcttactctacttcttcttcttcttcttcttccccgatcggcattagcgtcgtgtctccacattcttcatcttatctttttgcttttttgcaggaaatcgaacaacaaccagtaactcctcccgccgcacagcaacagcaacagcaaccgcaacagcaaacactatccggaagattcttcagatgcctcttcacttgtatcttctacacgcaactaaccctaatctcgatctttgtgatccttctcacgctacgaggtctcgtctgcaccaaatcaccaaacttccatcccaagaaatggtacactcctctgttatcctctgttgctgtctccggagtcctctctatagcctggaactgcttcttcgtctgcaacatacgagccacagtcaaagcaacgttctggttcacaccgttattcacaatctccgtggggctcttcctaattctcctcgacaaatccaatcccgtcgttctatggataggtgcacttcttgtcttctatagcatcgtcaccgcagtgtatggttcgcttcacgtcacgaacaggcatgaattcaccttccagacgatgtcaaccgccacagggatattacccgcaagaaccagagcaatagcagttgtatcagtgatcataagcgtcttttactctgatttcttggttgctggaatcggtggagctactgctacaggaacacgtcttgatattcttttcatctccatcatcgtgataaaccttgcctggacaatgcaggttatcaaaaacgtacaagaagtcgcgatttcgaaagccatatatgtatactttagccgtgatgatctcatgaatgcatgtgatgctcttggcgtcactctgaaaaagcagctcgggagtgtttgtattggttcaacacttgttccacttattgtactctttaggggaacgattcggtgttgtaatcgggacatttatgcaagtaccccaggctgcaactggattgccaatcatatcattttgggtggaaatagatatggatttgttcacgtgggagctcacaacaaagggttaaggcaagcgtctagtgatacctggaggaggtttagaacaatccctgaatttgagcagttgattgattttgacatcaccagctccatctgtttctttagcgccatgggaattggtgcaatcgctgcattaactgcaggagtatgggagcttctgatcgataaggatcactactttgagctgactatctatgctttcatcatcggatactttgtggtaagatcttcttatcaaaatgcaggaagagaatcaaaaatggttgtactgtgtaaccttatgtacctgtttttgttggtatgttttcaggggagagtttcttctgcgtggctacaagcttgtgtgatgggttactatgtagcttattctgaagatccacagaacgataggtttgatgacacgattccacaacgtatcgagcgacaaaaaatcgaaaaggcaaaaagagaagtcgaggataatagagtgcaggaagatgatgacgttccaacacacgtgtagagagctcacatacggatggtatccacttagttgagaaaaatactttcgtttcttttcgttttttcacaacactgaggctttttcaagcttatagactctatagattgtagatcatttagctttatatgcaaaaaatgcagctagagaagaaaatgtacatacaaagtgagatgagaatgattcagttctgattcctttccctgctttattttcttgctctttgatccgttttatgtatctgattgcataaaatagttaaaagagagcagtaaaagagatagagaatcatggtttagtcacagccacttaggaaaccattttatataacaacagaaaatgaatagtctgggacaagattgtgcatagtttagctagagattacatcagtacaagaacacaaatctatgtatggaactcaaaaaagtaggcttttacaataagatcagagctagaaaaagtggcgaataggtaaaacagaaccatgagtgcaaacaagtgaaacacggagtcatcagtgtcctacgtgaccacgcccaccacaaagtttgcacataatattaccacttccaccacaacctaaaacagtagcaacaaatggttaagatgaaggtaatttgcatagaacaagtagagcatgtaggataagagaggcttacctaagcaacggactttaacaatgatgccttgactctccataatggaatctacatatagaccagttccagaacaagtggaacaaagcaatgcacctttagcttcacaacaagtgcaacgctgattatcaccaatctctctctctgacatggataatccaactggctcctcgattatttcctctggtattggtttatcataacagaacattgactcaagactgcttctttgcctgtgcacgtctctttttaaacatgactcagcctaagaatccaaagattattctcaacttagcaaataatgtttcatccaaaccaggagaaataagcttcactttttttttttttcactttctcagtcaccctaatgtatagatgtttcccggaaaatccaaacatggaaaacaagttctgagttgtgcaatcatactcaacatttgaagtcatagcataaacatatatctgtcactaattatagttactaacgctaacagatcataatcatcatcatcatcatgagacaagtctatgaaagtacactggaatggggaaaataactcaacttttgcagaaaagtttctattttgccacaacttaagcaacaatacaacttcacaggattcggagttttggaagcaacatataaatgttgtatactgatactcactattgctagtactcacaagtcacaatcatcatcaacattaaacaagtcaggacaagtggatttgtatgattcagatttccattggaaaactagctttaaaattccaacaagtgacttaatttcagatgcagaaatttgaataacaagacactgatacgattctaaacaaaaatccagctgaaaatgatataaatcgaagcagagggagaaagtggaaaaagagatttaaccttgatagatgaagaaggaggaagagagcacaatcttaagcgggaactgaatccaggggaagcaatccgatgtccgccaacagaactcgatttaaccggaaatgtagccggaaaagcaaaatctaaagcggaattcattatcggctacaatggaattatgaaattgagacgaaactactgagaatcgaaagatggaaaattcgaaatcgaaaagagattggagaaggtaggtgataactttggagggatcgccgttcatatgtctcagttttcgttgaggtcccataaccggactataccggtaagatatccgggtatctaaaccgagcccataaacatcaaaaaggatgggacgtgacagtaatcaataaatttgaattggacaaatggatccataaaaaagattatgggccaactttatcataatgaatgcccatcatcaattatttttgggacatctttttggagtcagcctcttgtctaaaggtggacgtcggctaaaagtgttcacttttaagatatttcagctccaattaaaaagagtgtttttaaaaaaacaatcagacactagtctacaactttatatgttaaggcataagtttaaatgatagctaacaatatatagattaaaggatttgttggtttgatgttagatagtatctgatctccatgagtaaacgaagatttttatatcaactagaaaaggtaaaaacaaatatcaccgtcgaaggggacgtacacgtacgtgctgattcttgtgttaatggatcgcttctactcacttagctctcaagcaatgaataacatcacaaaataaatgcaaagatgtaaacaaaagtaaagaaaaacaaaacgcgtttgaagaccgcgttgctctaaatgactcggtacttttttaatatttgcaattcacactcgtaataagtcctcttatctttatattttgttcgattttatttgaaaaattccctaaatatttttacaaaaatcgtgtcctaaatcctaatccttcgaccgactttctcgttttagtagtaaaagtcgaccacacttttttttcttttctttattcagtcgacctcattatacaattatctttgtgtgactgtgtggagtatactattagtttcctcattattaactttatcttgtcacactatactttccttttatattagcttcttctacttgtttctttctgtcttttctttttgggaactttctctttatgatcgtggctgtctcaatctatttggaaattcaatatccatgtatacttatttcttaaaatacgttcgaattaagatgtttcagcttatataaaggaagtaattttgagctaatagaaagccaaattattgaattaattttctcttaattacatttcaagttattctgccttgtgtaaactggaagtaacagaataaaggcggtggttgtggtttatactcaattaccaataactatttcacaactaataaaattagattaaaatgactgttatagattagagttttacttgttggaataaacaaacatcaattcagtactgaccacatcctttaaattagtttcttatatgtaagttaaccttaaaccggtaactgattacgaaccaaaccggaatatttatattattttttccatagttagtggcttaaggaatcagcactaaatactaaatattgctgggtcagctccttatagtaatatttaatttgtggaaaaagcttctaaatttatgtatcctttcgctaaccctccctccttcgtcttcctattcttcgcatacgtaatggaaagagaaaatgacgcacagttcatcgtgaagccgacacataagccatttccaaaacccaaatcaccctaaccccaaaacggcaatgacaaagtgacaaacttttttcagattctttatataaaaaaatagtattcctcaatcctctgtttttttttgtctctgacgtttgtcttcgtcaggtcttgttaaagtgtttgttttgtgtgtttgtgggtgttttcttcgcttcgtctcctttaaaagcttcgtttcgaaattcgatcccttttttgctttttcatcttccagatattaaaaaaggtcagtgctttatctttctctttccgcgtatagttcgtgtttatctaatctgttttcttcatgatctgttcttatggagtaaacccatttatagattctcaacaataaacccaaatatcttctttttcaatttgactctctgataaaaaaccaaactttatctgtttcttcgtttgctctgttctgatttgtttcttttcgttttttgttgagtttccaggtcttagctgattgatgggattttcattttcttcaaaccgttttggttacttgacagtcacattccttctcgttatctcttgtcttctgttgggtttcttcacgaatcctgttgattcaagtgctctaagacctaaatcagagcatgattgtagtgccctgaagcactttcatgactacaaatcaaagtgtgcttacctgaaatcgattgatc

SEQ ID NO: 716 - DNA, 40548 bp, Arabidopsis thaliana
catgtgctagtcaaggtttcttcgattacctctcttttctctactgtaatttcgaaggtttcccaattttgggtcagtttcttctcttcctctggttgcttctcttgttctatctattgggtcatacggcctctgagtacttttgttcatctcttgaaagtctctcaaagctgcttaatttgtcaccaactgttgctggtgttactcttttgtcgcttggtaatggtgctcctgatttgtttgcaagtttggtctctttcatgggagaatctaaaggtacttatgatgttggtctcaacactgttgtgggaggttctggttttgttacctgtgttgttgttgggatcattagcatttcgttgcataagagacgtgtgaggattgagagagctgcgtttataagagacatttgcttcttctgtgctgctattggttctttggctttgattttggtctatggaaagatcaatttctggggtgctcttgggttttgttcattgtatgctgtttatgttgcctttgtggttctctcttggagatttggtggagatcaaggtgctgaatctgatcttgagtcaatccataagcgtggtagtcttagtgaaccaatcttgcagagagacggtcttgaggaaattgaagatggtgttgttaatggagagcatcagattgttgatgatgatgatgatcaccagagatattattactggaaaagattggtcatttgggctatcactctgcctctcaacttgccaaggatattaacaattcctgtagtgagtgaagacaaatggtctaaaccattagctgttgcctcggtcacatttgccccggttctgttgtcgtttttatggaactggaagcggaaaccgacgagttttgaggcgggggttgtttatctcatcgggtgtttgatcggtatagctcttggtttcattgcaggagccacgacgaagaaattaaccccaccaaagaaatggttgttgccttggttagcaggagggtttgtaatgagcatgacatggagttacatatcagcacaagagctagttgcgcttttgacctcactaggatacattttcggtgtaagcccttcgatcttaggcttaacggtcctcgcttggggtaattcaattggagatctaataaccaacttgacaatggcgctacacgatgggaacgaaggagctcaagtggctgtatcgggatgttacgccggtccgatcttcaatacattgtttgctctcgggatatcgcttgtgggatgtgcatgggaggcttatccgttgagcattgtgattaagacagatcctcgtttgttggagagtcttggatttctggtcgcaggactggtatggtcgttcttggttctgtttagtaaccgtatgaggcttggtggtgtgatgggcatagggcttttggttatttacttggcttcattgtctctaagaattatgcaaaccgttggagatgctcactaactttgatttcaactcatagtcgttttacataacatgggtttgtataatcttcttcaagtaaaaggaatcgattttgtaatgtatagatatatatatatgtataactttatgtagattgtaacgtagatttttcataatatgatacaatttcggtttcgtggaggaaatatacaaatctattgtaaatgtatgatttgaaatcattctaattcaagttgaaacaagaaaaatcaaaaagtcgtttaaaataaggttcgaaaccaccaatattgatctgaagattactagtttcaatgatatcgcacaacatgcatagcttagaataatttttagagtaatggagttcaaattgagtagctggttttttgataggtgtcagattctcgactagtcaacaatctctgctcatacattcaagtaaacacatacatattatactccatgcagtataaggataatgtaaaaaaaaaccatctcatattagataaattatctaagataatattttttttgttttcaaaaatctctacgttaattgtattttcttctgccaatatatttgtttattttcaattgtgtatttagttcccagtgttgtgggagttgtttgaagcgacaacgcttgtctctttttgccaatttgcaatgaactcaagataagatgtgttttttattcctaatctcatcatgactcgtgtgcataataatttggcacatttttcttgtctgcaaattgtttccttggaaataggataactccaatttttggccattttctaataattcaaaatgcaatgggacactttgcatccgttaccacaattgtttagggatttaaacatatatgataaatttggccgtagttgatacattccggttaatttcacctaattgaaaccttttttaaaaaaattaatcagatttttttttcttccaaatttggaatattaaggttgagcacttgagctaagctaaaccaaaaaacaaccaaacatcaaaatcaatgatatcatacgttatttattattcaaaacatcaaaatctaattaactagaagatcataaagcgtctcattcgaccaaataatcaaatgaacaattagatcagatcataaagcgtaatctctttattatttataaataatcaaatttattattttatttgattatagtcataaattaactagaagatcataaagcgtaattgatcatatttattattttacctatcagatcagactatacatgaaatttagtagctaatattcaggactagaaaatcttcagatgtttaagaatcttgatcggtaagtttataagttcaagaaaatgacatccttatatcataacgaagataagattcatttaaataatcaaatgaacaattactgtgaattccaattagaccgcatattagtattaatgatgtcgtatctatttacaatccatgaacaatgaacctagaacaacaatccaaagcttttttaattttagtgaggtactaagtgagtttgacagaaaatgagtgttcagcaacaaaacaaatttagccatccctctcgatagtaattcaactatgcacaaagtatcttttcatttaaggaataaattaagacccacaaatttgacctatttgcaatttttttctttaagaattaactactattacaaaaacaaataaaacaaaatttacattactataaaattcaccggtcggtatcaaggactccgaaaactctagccaacctcaaggacaagaaacagaggtaaatagcgagtaagcccccaccgacaagcttatcaagtctcatcttcttctttggcattatcacaagtgcccaaagcaagcctaccattaagaaccctagtgtctcaagcaacgaattgtcactaggaatgatgtagaccccggggtattcggccaacgaggagatgacaagtggcacacctagtccaattaccgtgttgaatagcgggcctgcgtagcatccggaaagtgctatctgagcaccatcgttgcctccgtgaaacgccacggtcacattcgcgataagatcgcctagagaatttccccaagctaggacggttagtcctagcacggatgggcttataccaaagatattacctaaggatattaacaatgagactagctcttgtgctatcatgtatgtccatgtcacactcatcgtgaagcctcctagaagccaaactaatgagaatttcttcggcggatgtgatttttctgtcgtcaagtaagctaagataccgacgattagcccgatagatccggatattatgtacaagattaggtttctttgtgacccgctgtaatgagaacagtaaagttcggttagtagaacaggagcgatggccgtggaaaccacagcgcaaggctttgaccatttttcttcgcaaacgacgggaattgtgagccgcctggggagatatagaggtagtccaattatgctcactagcaccgagaagcaagatcggtgcctttttggagaatcttcaaacacaatcttgaattcttgagttgttttctctggcaaagccagcttctcctctgctatatagcctagcaacgaaacacccatctcggccaaatcttctctgctacgaagaatctgatcggacatacgtttcttgcggtcaaagaaatgtgaaaccgataaaaaccctacatagaggagataaatggagagataacagagagcgacccaaatggttactttgcctatgaagatgatcaaaccgagacagcaaagagcgacaagaagaaaaaccacgtcgcggataaagctatttctgtcgatagcgacatctctagatccaatcaacacacaaatcgtcccaacaacgaagctagagacgaagaacgcaccgcctaaaatagagttgagcccaaaatcgccattattcgatcttgtgaaggagacaacacttgagaacaaatcaggcgcaccgttgccaagagagagaagcgtgactccagccattgtaggagacagcttcaaaaccttagataagctgtctaaagaaggacagaagtaactcgcggccgtgtctccgagcaagtagaacagaacaaacaaccaggcggataaaactagatggcccaaaacaggggattgtccgaagatgcagaagaaaatcttgagatagtctatgtaaccttgtgggccacattttgattgagatcttatgtaagaacacttggaacggtggtcgtcaaggctggcgagtcctccgctgcagctgtcactgtcaccgccggcaaaggaatttaaggtttggatggatccggagggaggaggagtttgtgaagcgaaatggagaaagatgagaaagatgaagaagatgttgatgaggagagaaagagattgagagccgagacgtgaggagaagagacttgccattcaaggaagcaaatgggtatgaagtggaacaataatgaggtgtgttaggttttctgatataataatgagaaaattgtagtttttttttttttgtgtggaagttttgaattgttaatatttcggaaaataaaagattcctttttatttcatgcggatgtgggtaggggaaagtattgtctttttatgcgaaatatattaagtgggggaggttatattcaattattcacacaaggaggaaaaatcgaagttgataaagtgtttttaaagaactctatatctactattattggttttacgagatattcatgttactacaatttgtatgtagtgtttttatttttctatggtccaacttggagtccaattttctagtgtaatcgtcgcgaggcatgcaaatcacacgtgtcatgatatttgtgacaataacaaggagttgaggattaatgtagttcataatgttgctattatagttaatattcgatgaaaagtagtcagcataaagtattaatagaaaaaaaccataactatcaaagtgagtgagattgtgttgcaatggtgttcgtataatggttgaattaatcaccaacttaggtcattcattgctttcccgaaaaaacaatactacttaataattttttacggccatcaaaatctggacattgcctaatgttttaggcctaaaaagaaattgattatttatatattatgtatggttatatatcagttatcaaatatggacatgtgattgataaaattaataaaactaggattcgaaaaaattgaaaatggagaaaactccaaacctgaaggtcgattgatgtgattaagaagtattttggctgagtagaccactttgcaacgcaatctcaaccgatcacgacttttcaaacatagtcgtcatatccacattcttatgatttgcttgtaatttttatattgcatcgttaaagaatacacatgagaatttaataaatgatgcaaacaaaaattaaagatcattaatttgataaaattttggaccgccatcttttattttttagtgaaaaaaccgccggctactttgtattcatcatgatttgagatagttgaaaatacgttataagtctttattccaatattcatgacaagtagttattccttttgtattcttaggagttatgtcatttactctatattgacacaacgttactttgtagtcagataaatatttatgcaacgtaaccgatatttctattgaaaactgttaacattttttaacatgaaattattatacatttctattaaataataatcgatcgtttttcataaaggaaaagcttgttttacgtatcttttaaaattttctagataatatataaatatttccgaccaagatcaatttcctttaattaaggtccgaaataaaaatattgataaacaaaaaaagtatccaaaagattcctggtatattcatttagctggcatggctagtgcagtacaaaatacaaactctaattccaagaaaacaaaataacgcaataatgcaaagtgcaaacggacgagagcaatcgattcatatatggttctcttctcgatgtaatgcaatcacatgactaaaactggctcaaattaggcctttatacaagacacttacctgtaaatagactaatatttgtttatataaaaccatcaaataatattgtaaacaaatatatatatatatatgtatgtatgtgttatatatatgtatgtatgtgttatatcgtgtataactatttaatttgtttaattcacttgttcgattgtatcttcttcttaaacttaaatcatcttttggttatatgtgtgtgtctaataactatgtaatctttctttcaattctaataaaataaaacaagatgttaaaaaaaaaaaaactatttaactatccatggttgatgactcgtacttaagacaaataatcaaatttcgtgattctaaaaatgaatgaaattgattgatatataagtgggattagaaaaaaaagagtcagataagtgttatctcgcggttataatttcaacggtgctaagataaggataaggtttgcgaaactatatactaatgcaacaatgggtaccgtaggtttgtgatacctaatttgatctaaccaacagaatctcttcgtactagtgtaatcgagtggctgagctgttgatatagagatacgtagtactattattgtaaataaagaacccaaagaatcaaatttgtcgacaacaaaataaggggtgataatccgatgcacgtggatttggtgaatgtattggataatgctagtcacgtagaagaaagtaatcttattttgggccataattttagtaaatgtttttgagtctacgtaaagaagagtaattttcatggcaatcgcaattttcgctgacaattgattattttgatataatgtgaaattggttaggttggtgatagtagctagtttgaagcctaacttaggcttgttattgaggtataatacattattaaccataagtattagacaggttttggacaaatatatttattggtcgctttggcagcattgaaaaaccctaaaagccactagaatggatgtcttcgaatgtcagttcacataaatgttcgctagcttaattttattttcttttttaaaagagaggaagcaatgataacataaacatttttatagtgttttttttgaaacaaaaagttagttttcttcctcaaattcgataactaaattacaccataaatgagaatatgtttttagttaagtagttaaatccatttgattctaccttttttaccagagtttgactctactaagtcgtgttacttcgcataataaggattgactatgaatcgtgtcttgtttataaaaaaaagaaaaaaaaaattacacaacaaagttaagaaaattcaaatttattaatttaataagcatactttgaatataaataaatcctaaaactcaaactaataaaaaaagtatttttttgtgtagtattaaaagatgcagaatccgaaataatgtattttattgtagaagtgattcaaaagaccttatctcgtagtcacttgtagcattattggtttaaggttaaagaaaacatttaaaactctgtatacatcatacatgacatctttacaaattgcaaaatatacatttttaatcagctactctattcttaaattcctttaattaacgaggttatacagttcgatacgtttaagcaacaaaaagttcgatgccactaataatttaatttttgttctcttcttatcttatagattgttgcagcctgcaggcttgcagcataacgagttacataactatatacaaaggcccaatagacacctcaaaggcccaataaaaaagcccaggaaaaacgaaaacgaagatatgaagttcttctctaatccgaagcaagaggctcaaactcactttcacttgcacaaagataaggaaaccatgtctgtgtcagcgatctttggtaccggaatcgtcaccgttgctgcttctccggttctccgccaatttcaagttccaaaattgggtaatggaggaggattagggatggtgatagagtgttcgtcgaggccacagaagaaatcgacggctcatcacaggaagacgaggccgaagaagactcagccttgggacattaagagaaagcctactgtttacgctcctcttcctcctcttccggcggaatggagtccgttcactctcgcttctgacgacggtggtgctgccactgctgcgggagatttggtttcaggcgctgcctagttggtatgagttatctgctgatttggttgtaatctagtttgagaacttttgttgttgtttactgtgttttcagttttctgatgtttgttgttgggtttgtttgtgtttgattggtgaatgaatggaccaaatttgcgatttataaagcttcaacctttctcctctgtttttgagtttaaaggtctcaactttatagtttatagctctcgtcattgtcatctatgttgcttctctataattgcttttttccttttgggtctcattaatttctgcaagtagtaattgaattgggatgacaagagtttaagtttgatatgtgaaaatgaaagcacaatggtatctgttttgtggcggttgatgctggagttgttgtcaaatgctctgtttgctgccatagcaatgggaatgtagcttctaaagagtacggtatagtataccgcattattggaattttaaaatttccctttagattggattcaggtgaaacggcaatgtgctctgctcaccatagtgcaacacttggtctaaacactctattgtagatttttaagccaagtgatctaaagtgtgtttgatgaagagtttcagcaaaaacatttttagaaatgtttatatcagttatgggttgatcactctgattcttgaatctatcttgtatcggtctagtcccaggagaaatttagaagatcgatttatcttgcattgcatgtttatggagtcaattccaagatcaacatcaatggctatacatttcataaagcacgcatacagagtacatcccgttgaacccattaaaccctgacaccttaaaagcttaagtcaaatcatctggagaaatacacaatgaagatacaaatacagagagttcgaaagaataaatagtgtgaaaacagaggcaatctatgagtttaacacaaaagagtggaaccaaaaccagttttttgggaagaatgagcttcacttgggatgttagtgctagagttttcaatgtaagtctgccactggccctttggagattcattaccttttgcttgatccttgaaacaaccattagcacttggagttttgttgatttttactttaccttttacatcatcattccttggggatggaactctgttctcttcaggttcaaacacaaaactgaaaccggatttcaaaacttcaagcgtagcttccccaccagtaccagttctcacactaaactcaagggatgctttggtcggagcacatttaggaccaccttggcctttaacaagttttatgaagtctaagcagttggtgtagccaataaagacatgatctgattcaactgtttcttcttggttgtcttgttcaatcaaacttccaaccttccaagtaatgctgctggaagagccctctccgttattttgctcacaagagaacttgactatcaagttggcatgacttttacagttcttgaatgagacaacaacacatagggctatcccagaaagcctattgtgattccagtgaggaggtaattcaaactccaccatagatccaattgcatcgtgactaaaccatgaaggcatttcacatccaggaaagctagtgcagaacaaaatctcaggaacacaactctgcaaagttatacaaaggggatataccattaacctcaattccactacgcaaaagaaaactctcaagggagaggaatagagatacctcatcgcatcgtttaagcgcactagcaagcaaatgacacttcctttcagcatatactacaatttcctcctttgcagcttgttccaattcattgcagttagtgaaaatgaacgaggaattgacatgcttcatcggtatagaacataccagcggttttgcaactgtcttcagtgagctacaaccatgaacgtttaaatactgaagatttggtggaagctgtggaacatgtgtaagattcttacaatacttcaaatgaagccattgaagttgagaaaatttattgaggagatctggaaggcggctgatcttttcattcttgtttaagcataaacgacgcacggagagtatcttcggcatatcttttatagctgtctcatccagaagcaagatctctaagcggctcatgtttccccaagtttctggaaactcattgagctttgaacaaccagagaggataagttcttcaagagctttcagctgaccaagactgtcagggagccttttcagcttcttgcagcctttcatgttcaacataacaagtctttggagtctcccaatgtcacaaggaagttcctttattgcagttccatccaagtatagtgcttccagcttatctgaaataacctgaaaggttttaaattttgagcagccactgaggatgagagttttcaaagagatcaactgaatctctggaagagacttgagacttgtgcatcctctcaggttcaagaaaacaagaaacttcatattttccatatccacatgcatctctttcaatgccgtgcaaccttcaagatttagctcttgaagattttgagcttttcctaaccctgccaaagtgttcaacttctttgagtgatttaagtttacccattttaattttggtgcatcctggggcaatgaacaacaatcattacaaagagtcagacaacaccctaagttggaccaataaaagagaaagcaactagtgtattgttacaaaccttgttatcttcccaaactcgttcaatctcgctataaggaagcttaaggtcaaccaaattacccgggttgaaatcttgtggaacttcttttaacgggaatttcagccagtggagatatcgcacctcattcaacggtagcaggagtccttcggggaagtttaatttaatgtcactttcacattcttgaggacaatgagtgctgtagattttgagatatcttagatccctcatcatggcaaaagcatggcgatagaagcaccattttcttgtaatatcagacaagtcaaggaaaatagacctgatattagaacctccctgttgaccaatggcaaataacaatacaaattacaaatgaatctagacaaccttgaaagtatcatgcatatcatctatgcaagaaggtaagtcaatgtaagctgataaaatcacattttcaaaacgtgaataactggtgtgatcattcattgtattggatcctataggtcatggtttcactaaagaaactgtaaatataaaagcaaacatatgttaaaaaacaaacagttttagtgttaccttgtttttgtccagcacagcaattatggtgtgatggtgccacaacctatgccgcccctttctatctgtagcagtagcttctcgaccaagttccttggagagcatatacaatgtatcatgcatatctactttgccagcataaatattaatcatgaacttgttcacgagatcttccaatatattactagggccatctgaatccaataaactcgctacgtaattctcatcttgcgacctgaagcaagctatgtcaagaagtgcatctttttctttttgactcagtgctttataactcccttcccagaccctttgaagcatcttgcaaatgctttgtccaggtggactgttatggtgttgatccaatgcatttagttttaagccccagtgactctcatctttccccaaaagctccttacccaacatctggagagctagtggatttcctttagtataatgcacgaaatctttcgacaacttggggaaatttccttgcccggggccgggagcagctccttcgttaccatcaaatgcgtaacgtataaaatgttttatggcatctttgtcgcttaatggagggacttcgtaagtatcattgaccaaactttgtatcatcaatgacttgtcgcttgtagtaatgagaatcttgcttcctttcttaatccagttgcgttcgccaagaagagcatcaacttggtccttgttactgacattgtcaagaataacaaggactttggtctcgagtaactgatctttgtaagcttcatgagcagcttgtacggactcgatgttggcattctcaactttcaataaaccttgcaagaatttcgtggccaagtaatttaacccgtcttcctctgaagcttcatggatatcacggattaacacgtgtctcaggaatctatcattccacttctcatatagcatcgtagcgagagtggttttacctataccgggcatcccaacaacaccgatggtacgagttgtttcgtccgacccaaaacgtaacttttcttctagttgcttaattcggagctcgattccccaaaaggtttcatgacgtttctggtgtctttggggcggtagtgcagaacatttagaaggaggaccctctgaacgtctatttagtatttctttaacctttcggataattatattgatgacttcgtcctcatcgctgctaacactaattgagtgagatgacataatcatagctttttatagatcaataagtaatagaaggagttgtttaccttttctcatccaacacgatgccggttaaaaatggaacatattgtaaagcttccttccattctttcttcgtcttcttgtcagtagacttcaccagctccctgaacttatccccgaagtctcccttcaattctttaacagtgacgggctgtaccttgtagaagattggaatcaccacgagctccttttgttccgttctttctttcatcttcgcaagctccttcaaacaccattttgactccgtgtaccttggagagaaaatggctagcgcgatcctcgaaccttctattctttcgagcagaacactcaactcttggcccatctcttcatctgtgtctatgaaggcattgatccctttcctttttaagcccttctccagatgactgacgaagttcttgcgcagttcgactccacggaaattaatgaacacttgatcttggggtgtctcaccgtccgttttcacccaggaggaggagcttgtcatttctatctggctttagtgctctcaaaactgaaagactcgaaattagcctctgttctgccatcgactttaggactatctcaaaggataagtcaatggaactttcaaattcaataactaattttttctgtatcaaaagaacaaaaaagattttaaatgaaatattgataacaaagtaatagttcatggtattacaagtaactattatggatggtagtatgctaattacaaatcttttaacactcaagtttttagtaaacaatacagtattattatagttctaatcttttagtggctatttttttttttcttttccgaaaacggatgaatagtgagacagaagacaatttcattactcataatagaaaacaactcgggataggataaataattctcaaatttttgttaatctccttctacgatccgagagaccgagaccaatctttgttaatactttatgacatggcgtaaaacattgtttttaccgaaaaattaaactagagaacacatggatgcaacctacttaaaccattaaccaaatacgtggttaaaaattcttaaactttctttataaattcagtctaagtaaaataacatatttaattttgaataaaataattggttcactcgggtatacagaatagtacacaaaaactgtaagaaaagttaagaataacgttttaaatattacatttgtgattagtaattgttaaagcattacctcatatagcagcacaacgatacataattatcatttttgaccagcattaactatgcaaatacgaccgcacatctataaagaaaaaaagtatatacgacaacgctctatcgaatatagtgtacaaattaaactgggtggttcacctaacctagctagttgaatatattttaaattgtgtgtaatggttgtgttcacctaaccaaactatgaacaattcgatggttatatattttattcatacacatagattttagtctatagatgctgtattttttttatttttatttttttccattcatattatgatcactaaatgacactatttctctcttctttgtatatactagatatggttttaactttttgattaagatattaacaaatttggatttcttcaatataattagtaattatattatatataatattaaaatcatctaatagtatgatatactaatttggtttcacaatatttgatgttgtaggtttttcatacaaattaaaaaaaggagaaattttacattttttaattaatattttgtttgtttaataatatcaattctacttctttcttctctattagtcatgaataaaaataataataatattgattcaaaaaatcaatctctgtggaataagaaaaaaacccacatcattaatctttgtagaagagaaaaagtatttcattattatattcataaatatacatgatatattattgaaaattgtactacatttctcttctttaggttttgtgaaaaaccctcaaaatagccaatatatataaaagcatctccaatgcatacttttcttttttctatattttagaaacaactctattttagaagaaatataattaatgttgctgcaatgtattttttaaaaatagagtttcctctaaaataaaaaaaatggaaattactttatatataaagtaaaaagtaaaaactaagagttatttattttaaagaaaattctattttacagttatacattaaaaaaaatatctttaaaatagaaaaaaataaaagtgcacattagagatgctattaaaatagacgtatgtaaatctcgtggacgattccgtgcatcattgactttaccaacccatttgtgctctacctagggaagaaatctatttaacgattggtaatttggtatcactaccatttattattaggtccacccgttactatttctacaatttggtcccctcgtctcatctttataggccctccaccaattaatgccctcggacgtttctttgattcttaatgactataaactcgcctttggaattttcaaaatctttaagtgaacaaaacatctgtcatacgcaagtggatgctggaattgtgataaagtatggtttagtcagaaatcaaaattaatacacaacaactgtagatgctaccacgggccacggctaatcctacaactccaaaatccaatataagtcgtcgaactttaatagcaaatttttatgtcatcgaaccaataacgagattagctacaagattatacaacgtcaaaatacttcaatccctttaatttttgaggtgaatcttgctatttttgtttgtaaaattttgttatatatgtaactgatgccatacatgcattgactagttttaagggatgcaaaattctatagaaatggttgcggtttgtcacgacccttttgttgggatgtatcatgacagttgcgtggcttccgctgggccatttcactggagcaggtgaatgtgctttagtgaagggcatggatgactcaggttggaggaattattttggagttagacagaacaatttgggtagagtttgagtctttattactaattgaggatcaaacacagatgaggagattaggccattcctgcacaaactggtcgtgatttaaagtcaatcacctaataagctcaaagcaggacaaaactagttggagatggtcgatggtagaaaagttggtcggataatattgagattgtcgaccgatgcacgatcttttgaaaacaagcccatgacagattgctgtaaaaaaatgatggttgaataggaagatgtaaaattactaaaatagagacaatacaaatgatttacaaaaaaacatcaaaactaatctgtaaagaaaaaaacacacacaccaaaattatatttttcttttaagcaccaagaatccgacataagtttttgtttgtctattagtttattatatgtagtttattagtttattatttagataaaaaattattccttaaaaaaaaaaccataaaaacgggattgttaccgtataacgaaattacaaaatctagatgtggttccaagttctaaccattaggttcaacatcccaaagatcagttgatagactggtgattccactagaaaagttgacaaaaggggcaattggtagaaacaatagagactttaactcggtttttttcaaatgttcaaagtttgatttaattattcaaccacttttttttaaaaaaaaatctaataatgaaaaccttctgtttttttttttaaagtcaatccccaatattatctatgttaatatttttgaaatacatatttgttgttttaattgagtcgttttctaatttttgcacctaaacattcaatcgaatcttttcttaaagttcgataatatatgaaaacaaattaaacttcaatattaatatataagacgatataccgcagaaaaaatattaaaactaacaatcaaaaaattatataatttaaacacaaaataaaacaatacaacgtaaaatttaaaaaatttagtaacccaaactcgaatcttttagtagtattaaaagaattacacatatttttctcaccaaaattatcttttaattttttaattatattctacttattaccaactataattatttccaagtagtcgttagtaagttacttacttattagttattacatgttttgattattctaattttaattgtcaaacacattagaatatttttaaactctagaaatattattttaaacactttagttttgaattttaccattgcatttgaacaacttgtttcaatattattaaataagaaatctcaaatattaatatacgaaaaggagagaaaataaaatagtattggcatattctgggaaaccttcaatttctttttgtgtgttaagaatagatagatgagagtgatgatttggagaaagagagatggaaccaccagctgctcgtgtaacgccgtcgattaaggccgactgtagtcacagcgtcaacatcatctgcgaggaaacagtactgcactcccttgtcagccacctctcggccgctttacgccgggaaggcatatctgtgtttgtggatgcgtgcggattgcaggaaaccaagttcttctccattaaacagaatcagccgttgacagatggggctagggttttggtggtggttatttccgacgaggtggagttctacgatccttggtttcctaagttcttaaaggttatccagggttggcaaaacaacggccacgtggtggttccagtcttctacggcgtcgattcgttgacccgagtttacgggtgggccaatagttggctggaggccgaaaaattaaccagccaccaatcaaagttcgtatacattatacttttttcttttgtcaaaaacaagtaaatgtactaatcatataaaccgctagacttatatcatatgtgtatatataattaggcaatcaaattttgaataatccaagtgaaactcagataattttggagttatgtgatgaactaaagacacctttacattttcattgctggaattgttgttaagagattactttgtgtatatgcattgatttgaaatttttttggttaaatttttagtttgttgttcaattaaaagactttagttgaaataaaacatatttgaagtgattgttgaataatagagggtagttgtttttcctttcttgggcaggatcttaagcaataatgtactcacggactccgaactagtggaagagatcgtcagagatgtttatgggaagctttatcctgcagaacgagttggaatttacgcgaggctactagagatagaaaagttgctttacaagcaacatagggacatccgaagcataggaatttggggtatgcctggcataggcaagacgacgcttgctaaagcagtctttaatcacatgtccactgattatgatgcttcttgcttcatcgagaactttgatgaagcttttcataaggagggactccaccgtttgctcaaagaaagaattggtaaaattctaaaggatgagtttgacatagaaagttcgtatattatgagaccgaccctccatagggacaaattatacgataaaaggattcttgttgttttagatgatgtgcgcgattcccttgctgcagagtccttccttaaaaggcttgattggtttggttccggaagccttataatcataacctccgttgataaacaagtgtttgccttttgtcagatcaatcaaatatacacggttcaaggtttaaatgtgcacgaggctctgcagcttttctcccaaagcgtatttggaataaacgagccagagcagaatgacaggaaactgtcaatgaaggtgattgactatgttaatggaaacccgttagctctcagcatttacggccgagagctaatggggaagaagtcagaaatggagactgcattcttcgagctcaagcattgtcctcccttaaagattcaggatgtgctaaaaaacgcttatagtgcacttagcgacaatgagaagaacattgttttggacattgcttttttcttcaagggagaaactgtcaattatgtgatgcagctgcttgaggaatctcattactttccacgtcttgcaatagatgttcttgtggacaagtgtgtgttaactatctcagaaaacacagtgcaaatgaataatttgatccaagacacctgccaagaaatcttcaatggagaaattgagacctgcaccagaatgtgggaaccttccagaatcagatatctgctagaatatgatgaacttgaaggaagtggagaaaccaaagcaatgcctaaatctggtctggtctgtcaaattctactatatgcattacctgagttgttctattaaggcgagcctaacttattgatctatcaatttctcttgttctctcaggtcgctgaacacatcgaaagcatattcctggacacttcaaacgtgaaatttgatgtcaaacacgatgcattcaagaatatgtttaatctcaaattcctaaagatatacaattcatgctctaaatatatttctggactcaattttccaaagggcctcgattctctgccttatgagctaaggctcctccactgggagaactaccctttgcaatccttgcctcaagattttgactttggacaccttgttaagctcagtatgccttacagccagcttcataaactcgggacaagagtcaaggtaggctgactaagtctgggtatttatctgcaacttcgcttataacattactgtttcattcattttcaattttttatattttcaggaccttgtgatgttaaagaggctcattctttctcattctttacagctagttgaatgtgacatactaatatatgctcaaaatatcgagctaattgatcttcaaggctgtacaggattgcaaagatttccagacacgagtcaattacagaatctccgggtagtaaatctctcaggttgcacagagatcaaatgtttctcaggggttccaccaaatattgaggaattacatctccaaggaactcgtataagggaaataccaatattcaatgcgacccatccccccaaggttaagctggaccggaaaaagctttggaatcttctagaaaacttctcggatgttgagcatatcgatttggagtgtgtaacaaatctagctacagttacctcaaataatcatgttatgggcaagcttgtctgcttgaatatgaaatattgttccaatttgcgaggccttcctgacatggtcagtttagaatctctcaaagttctttatctgtcgggctgttcagagcttgagaaaattatgggtttcccgagaaacttgaaaaaactatatgttggtggaaccgccatacgagaattgccacagcttcccaacagtctagaattcctgaatgctcatggttgtaagcatctgaagtcaattaatttggattttgagcagcttcctaggcacttcatcttcagtaattgttatagattttcttcacaagtgatcgctgagttcgtagagaaaggtcttgtagcaagtttagcaagagcaaaacaagaggttttttacctttctctcgctctctatcgcacgttcatttattctcatgcacacagcacacaggttaactaattaattttggcctttgcttgaacaggaactcatcaaagcacctgaagtcatcatctgtattcctatggacacacggcagagatcctcctttcgcttgcaagcaggtcgaaatgcaatgacagacttagttccgtggatgcaaaaacctatctcaggcttttctatgtcagttgtagtatcatttcaagatgattaccacaatgatgtaggtcttcgcattaggtgtgtaggtacatggaagacctggaacaaccagcctgatagaatagttgagagattttttcaatgttgggctcctaccgaagctccaaaagttgtagcggatcacatttttgtcttgtatgataccaaaatgcatcctagtgatagtgaagaaaaccacatcagtatgtgggctcatgaagtcaaatttgaattccacacagtgagtggggaaaacaatcctctaggtgctagttgcaaggtgactgaatgtggtgtcgaggtaattacagctgcaacaggtgatactagtgttagtggaattataagagaaagtgaaactataactattatcgagaaggaggatactattattgatgaggaggatactcctcttttgtccagaaagccagaggaaacgaatcgttctcgttcatctagcgaattacagaagctttctagtacgtcaagtaaggtaagatctaagggaaatgtgttttggaagtggttaggttgttttcccctgcagccaaaaaacttgagatctagaagtaggcgcacaacagcgttagaagaagcgttagaagaagcattaaaagaaagagaaaaattagaggacaccagagagttacaaatagcattaatagagtcaaagaagataaaaaaaataaagcaagcagacgaaagggatcaaataaagcacgcagacgaaagggaacaaagaaagcattccaaagatcatgaggaagaagaaatagagtcaaatgagaaagaagaaagaaggcattccaaagattatgtgatagaagaattagtgttaaaggggaaaggtaaaagaaagcaactggatgatgataaagccgacgaaaaggaacaaataaagcattccaaagatcatgtggaagaagaagtgaatcctcctcttaggtaacgcttttatgtgcttctgtaagtgtgtataaggaattcttggattttacgtttacttgctcagatcatatctattttacttgtagcaaatgcaaggattgcaaatctgcaattgaagatggaatatctatcaatgcctacggttctgtttggcatcctcaatgtttctgttgccttcgttgtcgggagcctattgctatgaacgaggtttttaaccatataaataccagcttgaaattgattgctactttaatgtgattactgcttgactcttgtacattttgttttctgatgcaaaacatatataactcgttagatttcagacttaagaggaatgtatcacaaaccttgctacaaggagctccgtcatccgaattgctatgtctgcgaaaaaaaggtaagtatattctcatgagttgggttttggacaatgaaactacaaaagaattggtcgtagtgtatgtaaaatgtaatagtatattatttctttcagattcctcgtactgcggaaggtttaaagtaccatgagcatccgttctggatggaaacatactgcccttctcatgatggtgatggaactcccaaatgttgtagctgtgaaagattagaggtccttaattatagttctttgactagattagatgaatattgaaacagagaaaccttctggtttgacttgttatagttctgtgcagcattgcggaacacagtatgtaatgcttgcagattttcgatggctatgtcgagaatgtatggacagcgcgattatggattctgatgaatgccaacctttgcactttgaaatccgtgaattctttgagggcttacacatgaagattgaggaagaatttcctgtttatttggtggagaaaaatgctctgaataaagctgagaaggaagagaagattgtgagtacatttcccaaactaaaacttcctgatttctctatctctctctctcactctcttcgtatgtctcaggacaaacagggggatcagtgtctgatggtagtcagaggtatttgcctatctgaagagcagattgtcacaagtgtaagacattaactaagatcaaaatgatacttaaaaagattgaaaatagaatggattttaactctattccacgtatacaggtctcacaaggagtaaggaggatgttgaataagcagatactagatacggttacagagtctcaaagggttgttcgcaagtgcgaggtcactgcaattctcatcttatatgggcttcctaggtactctacctcatcatcttctttctaaatactctcttgcgccaactggctcaatcaaatctatgttcacacaggttactcacaggatatatcttggcccatgagatgatgcatgcttatcttagactcaatggtatgtaagagtcaaatatgtaatactccatttgtacccccatttgaggagagttctcaaagtcctttggtttgatcacaggttacaggaatcttaacatggttcttgaagaaggattatgccaagtgttaggctacatgtggttggagtgtcagacatacgtttttgatactgccacaatagcttcttcttcttcttcttcccgcactcctctatctacaaccacatcaaagaaagttgacccatctgattttgagaagaggctggtaaatttctgcaagcatcagatagaaacagatgagtcaccattcttcggtgacgggttcaggaaagttaacaaaatgatggcctcaaataatcacagccttaaggataccctgaaagagatcatcagcatttccaagactccacaatattcaaagttatgatagccagccatatgttataccagtaatgcacgttttcattctttggtgtgaacacagtttcttcttgctctattgctcttgttctcatgttttaagagtttctccttcgttttgcagccatagaaactttaaacaatcttgcctgttgtacaaatgtatttttcgctggaatgaattcttgctgtgataaaactgaaggattccttagctcttgatccacttctagcgtcgtatcacaaaagcacattaggtattattgttatttgaatgtatcattgttggaggtatatagagtggctcaagtctcccaaatataacgaagctaaaatgtttgttatagtgcttttagtattggaatatctttatctctgttcaacatttacactatacagttatcaccgataataatatttgactgtttcaatcgcattgattctacacttcaaattcactgtttttcatagcttccacttccacccttccaccatttgtgctatatagaggcctgggggttcggttatatcggtttaatcgggttttcggttttttcggatttttaaaattttgccgaattggatcgaacaaaaattattcggttcggttctcggttttttcggttcggttatggactaaaaattgtgttccaaattgaactgaataattgttatttttcggtttattaggttaaccgaaaataattttcatattatagctatacataacaaacaatccaagacaatttacaagccaccatcattgtcggagctctaccatcatcgtcaacgcacaaccaccatcgcataatcttctcgtcgaaaaaaataaaataaaagaaataaataaatcgctgacataaaagaaaaataattcaaatgagaagatcaagtgatcgaggaagaagcattcacctaagacctggagtaaataaatcaagagtgtatacaatgatatagagagaagccactagatccaaaattcttaagaaaagaggtggaagaagaagaaaaaacaaatgggaacagatttaaatttagggtttttctttttatactgtataaaataattgtgggctgtaacatatattgggccaaacgaaaataattagtattatgggccaacaaacaaaagtttaaatgaaagcccatatataataaaatcaattagggtttttaatcttaaacatggcggccgaccttcttcttcttccttaagacaatacataatgacagaagcaaactggggaagatgaagatggagtggtgaagaacaaaaccgaataaccgttcggttcagaggtgccgaaccgaaccgacccgtaaaccgaaatcttcgaaagaaattgccgatcggtttgctactgttccaaacctcggtgccgaaaaccgaaacagtcggttttttcggttcggttttctcggtttattccgaatgatataccaatcctggtttaaattgaagggctgaataaaccaaatatttcataggcccatgaaagcccaatagaaattactgtgacatgtttatgagattttcgcgtggcttattgttgagttataacgtttcggcttcccgacctcaaccgtcttctgctcctccgccccgccacagtttcttagggttcttccgcattgtttctccgaattgcaatcccctcattctccacaatgtaagtttcgtttattttgtcttcaatttcttctggattttgtcaatttatgtttcctttgttctctctttcagaatcatcgagtctcttgttttaggttttatccgattctgatttgtatacctgtcaacttcatttgttaatctgtgtgctgatttagcttcctaactctgttgatcgatttggggaattagctctttttcttttcgtggtgaatactaatgatgcaaagctttgaatctgatccatgtatttttttatatgctgcagaaacagatagctaatataattgagtttggatactcgcaagtgaaaatatgtcggtcacagcgggagtgagtgaatctgcaattgctgtaagggagaaactaaaaggtggtattggacagactaaagtgcgaaggtattggccaggaaaagctccggagtgggctgaggaagctgaagaagatgatgatgttaggatgcagaaggtttctgttttggatagagcttttccaaagaatgatgatttgggtgttgctaggaaggatgatccaaggctgcgccgtttagctaagactaaagttgaaaaccgtgacgaagttagagctgatcatcggcggataagacaggctgagattatttatacggaagaagaagaatcgaggaatcaagagaatagagacgaggacgatgatgaagatgccttggaagagagaagaagaagaattagagagaaaaatcttagaagagcgcaagaggaggctgctttacttcctttagaagaagaagatgagatacaagaggaagaagaggaggaggaggagtctgagtacgagactgattcggaagatgatatgcctggtattgccatgattaagcctgtttttgtaccgaaagctgagagagatacaattgcagagcgagagaggcttgaggctgaagaagaagctcttgaagaattagcaaagagaaaattggagcaaagaaaattagagacaaagcaaatagtggttgaggaagttaggaaagatgaagagatacggaagaacattctattggaggaagcaaatattggagatgtggaaactgatgatgaactcaatgaagctgaggagtatgaagtttggaagacaagagagattggtaggatcaagagagaaagagatgcaagggaagctatgctgagagagagggaagaaatagagaagttgaggaatatgacagagcaggagaggagagattgggagaggaagaatccgaaacctttgtcagctcaaccgaaaaagaaatggaactttatgcagaaatattaccacaagggtgccttcttccaggcagatcctgatgatgaggcaggttctgctggaaccgatggtatatttcagcgcgacttctctgctccaactggagaagataggttggacaaatcgattctccccaaagttatgcaagtcaagcactttggtcgtagtggaagaactaaatggactcaccttgtcaatgaggacacaacagattggagtaacccgtaagttttctgatttcagcgtttcttttcttgcgttttgttaggcacagactcgtttaggtctctgaaatatgattaatagcttatgagtagaaacattaagatgagaactgaaataaatcagtgcatgcaaatgtgaacccgggtagtgttgggagattcttgcatctgtttttctcgtttcatgagagctgcagattttgatatttttacttaacataaaatgaatgattgtgcaggtggacttccaatgatcctctacgtgaaaaatacaacaagaaaatggcaggcatggatgctcctatcgcaaaaccaaaagggagcaagaagatgaaagattgggagtcttaaaccgcaccaacatttagtttgctttttaaaaaaaatccaaaacgatacagaagtgttatgtggtagtaaaaaacatcgtaacatcttactcagttatgtcttgagtcctctaaatcgtagtaattaaaaatattgctttgtggaagacatctagtcttttgtatcgggatcaattatgcatcaatcaaagctgtctgcttgtattacgaaagcatagttagttacatatttccatggcaggaggtggttgatgggattttttttggcagaactgatttgagtttcaatagacaattctatggctagaatcgcttattatataacattctgaatacagtgatgcttgccaatctagattagtatttgtaagaatggaatctatattttataagactgcaaaagactgttaaactaacactatcttttacacttcgatatcattattaactggaatttaaatttaaattctggagaagtttgcaccaaaaaaaaaaaaaaaaatctggtgaagctaatttggttagataacaaatttcagaaaatacaaacaaaagtaaaagtggcaataatatgcaaaattagaatgaatttaaataattctgccgaaagtaaaatggtacaacagatacgaaagctgtaaagaagccgacaacaacatacacattagcccactctgcttcttcttcttcttcgctcgccatctttttttttgattagtcaaccattttcttctctctccaatttcaacctctgtaaggtacgtctccgactttccatggcttccccacgtctcgtcgtcccctctcttaattttgcgtttcatttcgttttggttgatcttttttttgaatttgattttatatctccgtgatctgattgctcctacctggttagtgacttcacaaaacatagatttttgtttattgttttggtttcattcgatttctggatttgatccttgatctgatttcaaaattattcactttctggcctcgttgagccttagatccaattctttctattatatcggagacaacatttaatccttgatatcttaatattgtgttgcgatcttaagtttttgattttgaattgaattagactcatcttgttgtttttctcaaatcttaaatacgataaaaactaacttcatcatttgattctgatttttcgtaattcttaatacagagacgacctggaaaaatataaaaagagatgattagtgatcggtcggagttcagagttcagattcggagattattcatgattatgatcagaacgtcgtacaaatggatttgcaatcatccctttcttctcggcttcgttgcgtttttgtattatctgcatagatattgtcctcttttgtttgctcccttagtgactgcgtctcctgttttggtgtgtactttcgtcttgcttggtaccattttgagttttggagagccaaacattcctgaaatcgaaaaggatccagagattttccacgaggctgcacctcttagaactgaggtttcgagggatgctaatgttactgttgttgatagaggaggagatgagagttttaccgtagagagtttcgtcggggcggagaaagttgtgcttgaggatggaaatgatgatgctgaaagattagtggatagccaattcagtgaggttgaggacgatggccggccatttgattataggcctttagttgatgagactcttgatgagattaaacgggatactcatgtaagatttgaggagaaagcatttattttggatgtggaaaagaagggagacagagaagatgagaaactgattgaaaatgacgggacgggtgcagagcagtcgaggacaaatggatctttatatgaaaggatggatgatcagatggatgtttctccagtttcaccttggagaccaatgaggcatgaagaggatgaggatgatgatgcggaccgtgatgactccttagattctgggtctgatggtgcagaaagttcttcacctgatgcttctatgacagacatcattcccatgcttgacgagcttcacccgcttttactctcagaagctcctactcgtggtattgtagatggtgaaggatctgatgcagcttcagaggggccacataggagtagtagtgatgaaggaatggagtctgatggtgacagtgaaagtcatggagaagaaggcgataacgagaatgaagatgaggaagaggatgaagaagaagaagatgaggaagagaaacaggaaaagaaggaagataaggacgacgaaagtaaatctgcaatcaaatggacagaggctgaccaaagaaatgttatggatctaggaagtcttgaacttgaaagaaaccagcggttggagaatcttattgccaggagaagggctcgtcacaatatgagactaatggcagaaagaaatcttattgattttgatagtgctgatattccctttaatatgccgccaatctcaactgcaaggcataatccatttgatgtttcatatgattcgtatgatgatatgcctatccctggttctgccccgtccattatgtttgcgaggagaaatccatttgaccttccatatgagccaaatgaagaaaagccagacctcaaaggtgacggttttcaggaagagttctcttctcaacaaccaaaggatccaatgttcagaagacatgaaagtttcagtgtaggcccatcaatgcttggaggtcctagacatgataggctacgacctttctttgtgttagaaagattagccaatgagggaacgagctattatccatttgaaaggcagctcagtgaagttagtgaatcaaaagttagttctattcctgatactgaatctgtgtgcacagtcctggaggatgacgaaaagaaggtggatgaaaataatgctgaccgagaaaccaaaattgctaaagttgatatggtttctgacaatgatgaagaaaataaccattcggcttctgaccacgatgaagaaaatagtcattcagcttctgaccatgatgaagaaaaaagccattcgtccgaggattccgatttcgatgaacaagctgatagcaaaaaacttcaccatgatgtggctgagatagtactaggaagtggtgaaacacaccatgagcaatcggacatgatggaaggagaaacttctgataagggaaaacttgatgaagtcagtgatagtgattcatctttatcagagaaagaagaaaagatacgtgatatcagtgaagatgaagcaatgttaatttcagaacaagtagttgatcttcatgaagaattaggggcgtcttcactgccttcttttggagaattagaaatcaatatggctagaggggtggaggatgattatcaccatgatgaagctcgtgctgaagaatctttcattactgcgcatccgtcacttgacgagtcagccatacatgttctttgtggtttgggggacggtgatcacgaggaacctgtttacgattcgagtcctccctcaggcagtagattcccatcattttcttccgtatcgtctgattacaaaccagatctacctgaaaagaatggggaagaaatagaagaaaatgaagagaaagaacgtgaagtttattctgaaagtataggtcctgaggaaattcattctacttctaatgagactgaaacaaggacaagcgaagtaggagagaatagcatgcatgttacaggagaggcaagccttgtcatgagggagcattcgacaccactggaagaatcacctgatgtggtgcatgacatagctgaaacttcagtaaacaagtcagtagttgaagagataatgtacgaggaagaggaagctcaaaaacaaaaagatgaagtcagtcctcaaacattcaatgctgacatcccaatagatagttatgccagtttgtcttctggagcagttgagtatgttgagacgcattcatttaatgacgaagatgttgcacagttggaacaagaaccagttcactcattagttcatgatgctgaggaagaaactcacaacgaccaaacaatggatattgaagtagactctgtaaatgctagtgcccaaaatgtgggatctgaagaaacaagtccatctgaatcagatagagaactgacatggtcagataaatctgtggtagaacaatcatctcttgaacctggtgacgatcaagtaagtcatgaaacttatcttctctaatagatgcacaatatcacagttactttaacatactatcttatgctgctctcatctacgtttgagatagtctatgtgatatactcaacatcacaatctacaaactattggaaggaatatacggaatcaatttctttattgatacatgtgctacaacatatcttctatatatgtcacgtttctaatctgataatggtacatcatctaaatttgtggtttcttaaatagaactggaaatagtaacaggtcgatacctatgtttggacttctttattctttatacaatttgttaagcgggagatctgtttcttatcgctatgttgcgttattgcaggtaccaactcgtgcaggtcctgtgagtgtcgtcttttcccgcaacatcacttttcacgagtatcacgatgctcctgaagatacaaccgagttatcttgtttgacgtctgatacatcctcttctccaacagaatctcccgagtacacgacacctatggttggtgaaggctcaagggcagagtttttccaagaggatatttatgaggagctagaccatgtggtggagcgattagagcagcttacagacttgcatgcaatatctcaaagtcctcctgaaattatcaccgaagaggcagacgagataaaagagattgatgaaggattgttgtctgaacttgactcgattggagacttcaatgttaaggaagttgtgacagatactgaacctgggccatcttcgatagaaaatgctatgaaccaggctgttgtagagagcatggaaaagcaaccaaagtcaccacaatcagatagtaggtctggagaaatcatgtgtgcagttgaaaccaaaccatcggagtcttcagttgacgaaagttctattgatgaaacaaacgttataacaacatccgatgttttacctgtcgtagctcgatcactggaagaatttccgcaaccttctgaaccaaaagaggggatttcaatggagataatctctgaaagcgtgatgattcccacagaagctactggtcctggtaatgtaacagtaattgatgaagttgtgaccgaggaaacgaaagctgagaccaccgagaaagaagaagaaggagaagaagaggaggaaagtaaaccaaaagagataacaaaatctgatgttttacttgtcgaaactcgagcactggaagaatttcccaaaccttctgaactaaaaaaagggatggcaatggaagtaatctctgaaggagtggtaatccccacaaaagctgctggtcctagtaatgtaacactaagtgatgaggttgtgactgagaaagcaaaagctgagaccactgcaagcaacactgatgcaaatgtccagagtcctgagtccaaagaaactccagagaattcggtggaaactattgcagagcaaaaaggaaagtaggagaagaagacgaagtccaacccttcaagctcgagttcaagctcaagctctagttcgagtgactcagattgaaaattaaagggtaatacatcatctcaaactcaagtaaatatatctttgttaaagggtaatgataggcacttctgggttttgttttttttcatctgtgtcctctgttttaaaaggggcaagaagtagccgctaatcatatttttataccaagttttctccttcctttgtattggttttcttgtgtgtttgtgtttccttttctcttctttcttcagctttcatatttatcgatttgattgatttgtatctcttgaaaccagagaggttttctcagggttttggattgtgtctttaaatacttttctcgcatcttttttggggggtttgttatttgtattggacctgagaaatgggaaaggtactgccgtttggatttttctatgaacattgtaatataatggactcgatcgaagatggtaacaccgttcagattacaaatagtttttggtggttcatatttagttgtaaatctcttattaacatgaagcattgcctctctttttttttttggtaaaagatgaacttgtgtttgagattttatgtaaataaagtatccaagtatattcatataaatcaccaacttttgattcaaagcataatgtgtgtgtatacagtttttattgtttcacatgtctaaaagcatgcctttccatagtttaatcataaagttttataagccagcaataagaatacttttggatcttgtgattcgtgtatcatatgattaccaaactcaagatgccaaaaaaggttggtaaacaagtattttattgatccaataatttgttatactaatacacatacgatttagttcaataattcctaaagaaaagtttttttgtttgtttttcatttggattgttaaagtattcaattctttatgtcgtacaacaagtaaatagaaagaaaaaaatagagtgcgagtttcactttcaataaatgcttgtgtgattatctttatttgtgtacatactagatctacatccaccgacaaaccagtgtcgaggaagcatatgcaactgtcctgcagatttaaagtctcatgtaattaaatgttgttcaatttgtttgttgtgtgattaccagtttgatgtatagttaaagttaccaagtaataaaatcatcaaacatacatatagtactaattttttgtttatcacataaacattttgttgactttttggtgttgtttgcaatagcatcttcttgataaattcctagtgaactcaaaattgacctacaccagttccatacaaatagaaagatactccaaaactagttgtggaagtggttgaatataattttatattccaaacttagaaaattcatgttaaattccgcaaaagagcttataacgtagtttatgcacgatatggttaaacttcctcagttgctatagagttaaaaaaaaacaaatattttgaaattggtaactagtacgtgaaattttttaatgcagactgaaagaacaaaataaaacttaaaatatgtttacaaaaaaatattctttcatgatttacgcaaaccaaaagttacatttaaggttaggaaagaaaaaatgacctaggaaattaaaacaatgaggttcgttgataaaggtcaagaatcaaagtttggtagccaaattaccagcaaacaaaaaaagattaagaccattaatccatcgcgtatactcattgtcttatgaatcttaaacaataatattatattatatacagtaggtccataatttatgtttctttacctactctatttaccaaaaacatacatagtttttatctgacttacacaagtgtactaatggccagacaagattgttacttgttcaagtaaaattgtgttaccagatattcaactttctatatatacatatagatttgacaactattcgactttctatatttaactgaaagagttgtatcactgaaatttggagtattgttccctgtaaataattcgatttgtttccaaaacgctatggaacaggccttgattttgatactctttcgtgctgacacttgaaacggcgtcgtatcaataatagaagaaaaccttactgtggaaataatcaaattgtgaatctccaccaacctcaatgggtcccattgccacccactaatctccccacgtacaccaactccccttcacgttttaatctcttaatatacttttattataagttaattaaatgatttcaaccttagtaatactaaccattaattattcatttctaatctccaatattttttttgaaaaacctttctgttcagatattttcgtcaattaatcaagatctcattcataaattaaaaaaaaaaacaaaattcaagctaaaaatacatacccaacaaaaattccttaaaaaaattacttatggggcatctggtaatttaattttcctataaaagatggcaatattaattcagtttttttttttaatttaccaatatgatactttaattatatttcttacttgttagctctactaatgcacacatacttatttctacgaatataagaaaaaaatactgaactcaaacaatagacaaaaaagaaataatcctacactcaagtgtgttgaaaaataacatcaaattcagagaaaatgcacatacaccaataatataaataaatagggatatttaaaataataaataaaattgcgaaaatatcgagcaccaccagatctacagaaatgacacagagcccaacgatgatgtatctcgtttattttcgctataaataaactcacacagcccactcttcttcctcgctctctctttcgccttctcttagcctaccctttttccttcctcctctccgattcttcctccgtcaggttcgtctccgactttctatgtcttccttacgtctctcttatttagctccctttccttccttctccacgttattattactacttcgcttttagtgtgattcgtttcattctcgtttttttatattcctcgatctgtttgctcatttgttgagatctattcgctatgtgagttcatttgactcagatctggatatttcgtgttgttcgatttatagatctggtttctggatctgtttacgatctatcgtcatctttcctttgaaaatgattggtgtttctgtgttcgtattcgtttagatctaaagtttttgatcgatgaatgtcgcatgtgtttttatctgaaagttttcgattacagtatcaagtggtggtagtagtagtagtagactcaaaaagctgcacaaactttttatacacgtgaattgtgattgctttacggttttcttggagtttgttaattaaatcatttaatattaagaagtttatgaattaagagaacgttattttatactatgattttgattttgatttggtttgtgtgttttaatgcagtaaaagaaaatcaaaatggcttcacacattgttggatacccacgtatgggccctaagagagagctcaagtttgcattggaatctttctgggatggtaagagcactgctgaggatcttcagaaggtgtctgctgatctcaggtcatccatctggaaacagatgtctgccgctgggactaagttcatccctagcaacacctttgctcactacgaccaggttcttgacaccaccgccatgctcggtgctgttccacctaggtatggatacactggtggtgagatcggccttgatgtttacttctccatggctagaggaaatgcctctgtgcctgccatggaaatgaccaagtggttcgacaccaactagtgagtcttcattgatctcttgtgttctttttgttgacattggtctttttgagttgtggactaatttgattatgcttttgttgatgcagccattacatcgtccctgagttgggccctgaggttaacttctcttacgcatcccacaaggcggtgaatgagtacaaggaggccaaggctgtacgtatcattctttactaatatccgtttcttaggaaattactgtttgctcgtctaattaactattagagatcataggctttagtttgaggatatagtgtttaagcttagattcattgagtggtgtttcactgaggatgctaatatgctaggaaggtctcggatgcattgaatataaaaaccgttagaaaagtcatctggcactggttgtctaaagtagtttttttttctacgaagttctgatctggtttacttgatgtttatgcagcttggtgttgacaccgtccctgtacttgttggcccagtctcttacttgctgctttccaaggctgccaagggtgttgacaagtcattcgaacttctttctcttctccctaagattctcccgatctacaagtaagaaatcactttattgtttttctttattatgccatccgtatccttgatgttatcaatgatcctctgacataccactgatataatgactttgatttgtgtacagggaagtgattaccgagcttaaggctgctggtgccacctggattcagcttgacgagcctgtccttgttatggatcttgagggtcagaaactccaggcctttactggtgcctatgctgaacttgaatcaactctttctggtttgaatgttcttgtcgagacctacttcgctgatatccctgctgaggcatacaagaccctaacctcattgaagggtgtgactgcctttggatttgatttggttcgtggcaccaagacccttgatttggtcaaggcaggtttccctgagggaaagtacctctttgctggtgttgttgatggaaggaacatctgggccaacgactttgctgcgtccctaagcaccttgcaggcacttgaaggcattgttggtaaaggtaattgttcttccaaaatcatctgccttttacctgacattactagggaattattgaaaaacaactgtatgaaatgttgatctgttgtctttttgatgcagacaagcttgtggtctcaacctcctgctctcttctccacaccgctgttgatcttatcaatgagactaagcttgatgatgaaatcaagtcatggttggcgtttgctgcccagaaggtcgttgaagtgaacgctttggccaaggctttggctggtcagaaggacgaggtattttacccacatgctcccctagtagtggacccttgaattatctgtagtgtaattgatccagaaaaatctagaactcaatattttttttctttcaggctcttttctctgccaatgctgcggctttggcttcaaggagatcttccccaagagtcaccaacgagggtgtccagaaggctgtaagtttgatttcaaactgatgcactgtgctcacccaatggtttattttcctaatcttgtattgattgagatagtttctcattcttgttatctcaggctgctgctttgaagggatctgaccaccgtcgtgcaaccaatgttagtgctaggctagatgctcagcagaagaagctcaatctcccaatcctaccaaccacaaccattggatccttcccacagactgtagagctcaggagagttcgtcgtgagtacaaggccaaaaagttagtctcctaaatttaatccttgggcttatgcgtcacacattttcttaaattgttgtgatgctaatggtttctttaatctctcttttactagggtctcagaggaggactacgttaaagccatcaaggaagagatcaagaaagttgttgacctccaagaggaacttgacatcgatgttcttgtccacggagagccagaggtgaattttttttattattctatgtttttgcctgatatttctagtaatccttggtactgtttctgatgagacatgttttcacaattttgtagagaaacgacatggttgagtactttggtgagcagttgtctggttttgccttcactgcaaacggatgggtccaatcttatggatctcgctgtgtgaagccaccagttatctatggtgatgtgagccgtcccaaggcaatgaccgtcttctggtccgcaatggctcagagcatgacctctcgcccaatgaagggtatgcttactggtcccgtcaccattctcaactggtcctttgtcaggaacgaccagcccaggtacataatgttactataatctaaaaacaaacataaacaccaaataaagaacaaaacactaagacaatcttggaatcattgtaggcacgaaacctgttaccagatcgctttggccatcaaggacgaagtcgaggatcttgagaaaggtggaatcggtgtcattcagattgatgaggctgcacttagagaaggactaccactcaggaaatccgagcatgctttctacttggactgggccgtccactccttcagaatcaccaactgtggagtccaagacagcacccaggtttgcttaaataaaaactacacataacgagtctcatgtagtgtaatgctttctcagttgctcataacttatgtgtttctggtgttttttttttgcagatccacactcacatgtgctactcccacttcaatgacatcatacactccatcatcgacatggatgctgatgtcatcaccattgagaactccaggtctgatgagaagcttctttccgtgttccgtgaaggagtgaagtacggtgctggaatcggtccaggagtctacgacatccactctccaagaataccatcttctgaggaaatcgcagacagggtcaacaagatgcttgctgtcctagagcagaacatcctttgggttaaccctgactgtggtctcaagacccgtaagtacaccgaggtcaagcctgcactcaagaacatggttgatgcggctaagctcatccgctcccagctcgccagtgccaagtgaagaaaagcttgatttgaacaaggaaacgtttttttttctctaaaatggttgtgttttatttggtttaataactttcttaaaaatatttttagtcgaaggtagatttgatgcatatggtttctttcttgttgagagagagaaaggctatagcatcctttggatttgatgcaatgtttgtgattttctttttgtctccaatatatttctctgatggaatgtcttttttctaaagtatcttgaaaaggaataagaggattgattcttatacaaatacttttgtttgcgttgtcctaaactcactacttttttttatccgacgcaatcagtgctttgtagcctgttcttgaagtaggcccctttgtatgtctctatctggctcctgtatcagattgttgtttcccttagatttctttatttcgttggcaaaaagaaaatctgaattgccccacaaagagcgtggtggctgatgttaggttgcagtctcatggtccaccactttagactcgaagatttatttcgcttggagaacatcttcgttgatgtttatgtatcatttgaactgtagactgtagccaagtagaaggttttaactctgtaaaatctgagatgttgtatgttctcaagttttatctcagtaattcaagtctctttgagttcaaataagaaaaagattgtagctcggtctcgaagaaaagttcttgctcatttgcagtttttaatattatttttctctctaagattgtgtgaaaataacctagttagtaaaccaaattcaattagtgtaaaagaacctcaaccttttaa

SEQ ID NO: 717 - DNA, 36495 bp, Arabidopsis thaliana
gatcgttttcagtaaatttttattgaagatggtgaatgataaaaatcttacaaagtagaaactttaattaaattagaagatagtgtgtacaacaaaaagagacttcaaaattgttggtggcaacaacaggatcacatgagtaatccttctgcattgttaagtgcttctttagctttcctgaatttcccatagattgccttgttatttttcacaacatattccttcacaaagaacttgatgccatctcgtagagcttcatattccggattcaaggctatgcgtgtgaacaagttccacacaagattctcagggtgctcaaagatggcctcgaacagcattcgaaagtgcatgattcgttttggagttaactccactggatttgctaagtcaacggatttgagaacagcaagagaaagattgaaggttacaataatctctgccacgaatttcgccagatgcatcgatctctgaagtgacatcgactctagttctttaaaatggtcccaaatgcaatactgcaggaaaaaaaacacaagagatgataagagaaaaaagaatggttacataaccatggcttcggttctattagatagtaaaaacgtacctgcagtgtaaacttatgatttttgtcgtgctcgcacaactttgaagcaaggactgtgtagaacttgttgaatgctttctcctgtaaacagcattcaactagaaccctcatgatctctctgtcctgttttcctggcaaatccaatctaagaagtttctcgaatgcatcgatgtagtcctcactactcatgatcacacaaaatattgcttttctggaatctgtattcatcctctgtgcctcagctagctttaacattttttgggcctcaacaacctctgcatccattgtttctgctatatcttcagcggtgtttgagtcaaccaccaaatcgccagaaagccaccactgacccttcttctcggggtcaagcagcttgctccatgtaagccctcttaataacacttcttctactctcaactgggtaaattataaaaaaaacggacaaaaacaaatgcattttagtcaaaacttactaatccaaaagccacctaataagcagaagcatacatgtttataattgtcatgatggaatccattttataacatttcgaggaatagagcgctaaaatattaccttttgaagccacttctttacccttgtgttctggacggaatcctctttggctctcaacttgttgttctttattgcggaaatggtttcaagcatcttttccatctgcaaattcattgaacaaacaactttaaaaaaatcatagtataacattttcttcccgaagacaatttttcatagaattcataccatcatgttattcatttgtgtctggccatcggaggaggttttcaattcatttgccttgttctggatgctgatgatgaatgttttcatagccagaggatcatcacttcttattttcattccacagcctattcagagcattatcaagaactgagagacggaacataaacatctcaaaacacctaaagcagctatcgaaagataataatgataataataaaacttacaatctaaaacagtggtgatagtgaaagcatcaactttagtcagccgtttccccaatgtcattaagaaatcatatataagatcactgcaaaacaaatatagagagattcatatttcatccaaagaaaataacagaaaaatatcatttttgtttctgttacgtgagcggactagtgattgggttgggtgatgagtaaaaacatattaaacatatcgctgtaggaaaaactaaaatccataatacatgacaatcactcaatatctgtaaaaggtcaagagaatccatttccacaagattctgattaaaatgtgtgttgggattatcggtctaacaacctgataattaaacagcgttcttggttcagttctagaaatttcaagacagtgaggaataactaaacttgctctagaccaaaatgaacaaatatgtagctgcagattatcttacctggagcaaactcccaatatgcaaagataagaaagcaaaagagaaatcccatttaaagagagactgtcttccttctgatattcatcctgaaaataaattaaggacttgttagtagtgcactatttcaagcaaggtggtgaaaagatactatagacaacaaaatcttaaggacataactggatcttctcgagaatttagcttacaattcatgtaggaaaaactcagggacatacctcgaaagatttagcaagtgatgcaattagctttgcactaaaatccattccaactagacacgccatgccggctatgaaagaagcaaatacagcgtacctttacaaggaaaaaataatgttcagcaatatattgactaataagggcgtcaatgtagtcatgtagttccacacatgactatagggctagcattaacatgagcggacaatcagaaagttgtacagatcttaactgttcattgcctctcgcataagttgtcaaaacctcttcacagaaaatctgagaggacacacttctcgcaacagactgcattaacaaatgttacagggttacaagatgtaaaagtaacatgtaaacaataacaaaatggagttgaagcaactttaagaatgaaatctaggatgattataataatctcaagatatttgagcttacacgatagattgtggcaagttctgcagttattgtttctacattggattctgccatcttattgagaagacctgtaacacaaaccaagcataccaaaataagcctacagaattagaaatacacagaggataaataacttttgttagctataccttttatccgtgtacgcattttagtgagttcttcagattcacttttggcctgagatctcaaatgaggagcaacatacttgctgctgctctctggcttacgctcatgcaaaggagtatctactttctccaagcttgacggtgaatcgtgataattaacagtctctgactcaccatcatctgtgatattcatcagatcactttctagttcttcatctacagacttcttcttcttcttatgccttttacggtctctttttcctacaggctcttcttcgctttcctcgtcagaaaattcagattcttcatgctccaaatcttcatttgctagctcatcgacatcctcatggtcctgtttttcttctgatctctttttcttacgtttctttcgggaatcaccgagttcagatcccatcgaatcaagtacagatggaagtccttcgaacaaatcattcaatccatcatccatgccccttagttttcctttctttatcttgagcttctttgcgagcctcctctcaagttcagcatcctggtctccagatattacagttggtgtatccatttcaagaaactcttcaaaattcgtcttcttccttggtctattcagatcctttattctctctactttttgcatcttcttctcctttgatttgactctaacctcttctttcttaggtataaaagactttccatggtctttgtttccactaggactacttgattccatatgttcagttacactatcacttatctggcgaaaatcttcagacttgatcacatcaccagacttctgagctgaagcagatgatgatactcgtttctccttttccgacttctgagatccagcaaaaaccaacattacccatcaacaaacaattcaacaagaaaactaaaccttattaataaaacaaagattgcctcctacatgacgctgaagccaagattcatgttttttctggttcttctgcaagcgagcctcttttcgcttttcatgacgagagctccctggcgatcatcaaaaacaaataaaaggagactctttaaaatcctagctccaacatacatagagctaagcactactaagacaaaaatcagcttacccatgttatctgacccaatagattctctgccaacacctaaagaaggataaaaattagaactttagctttcagcttaataagttacaggtctctataacaatgaccacgaattcaacagaaaataattgaagttgtatagctaaaccctagttttattaaaactgaaaaacttaagcattcaccgtaattcaaccaaacaatgaaactacgccgacaatgtaagtttcagaatctataattgcacaaaaataaagacgtgattaaattgaaaacgccacttagaaatcgaaataatcatcagcagacccaatgtagaatgaagcaaagcaaaaaatcgacagaatccaaatagaaagatggagcaatacttgaaagacgagaattgattcgaaatcttgttcttgtttgctctcgctcgatgtgattagaggaagtaggaaacgaaaccggaaaggagtgttttttttttaggttcgacgaaaagaatttgcagaaaaattagggtttttcttttgttgaattttcaaaaaattataacgaagatggagaagcaaagcccgccaagttattgggcctaaaatccaagatgccaaaattttggccattacgttttcttttttttccttatggtgagaaatgtttggttgggcaaattctctaaatacaaatgtaggaaccaaacacaacatatgtttgtgtccacaagatagaaaatagaacagctagggtttgtagacattaagcgtaccaaacaatgcatgatgattcctctttccctagatatagagatgagacccatatcagctagggtttgtatccctttctccacgtcccagcccttctccgaaagcgagaatattgtgtctttcacgttcacaccaaagcttatattttctgttaacagagattaaatgaagttttgtgtttctcagataaaccatcatatgcaaatctaattgctttataaatttctttgtagtcaatataggtttcgagtttagctggtgtcattaaccactcctctttgctcttcccacgtaaagccgaacctaaaaccttgagaccaagtggaaaaggagcaacaagcttagctacttcagtggcatgcttcacgtaacctcttggtggagagcttttcccaaacgcagagtatgagaagatttgttgagcctcttcgcttgatgggtaagccactttgtatatcttgtcgatcctgttactcctgtaattagattttcattagtgacaaggtttaatcttgtaatctaatttaacattattttcaaaaaaaaaaaaagaagaagatataatcttgtaagaagagagttttaattaataaaaaaaaaaatctaaaacaaccagttttacgtggctggttaaataatggactatagagtattccagtcggaacaatcgaaatgtaagcttacacataaatatacttatttttgtcgttttggtttctaatgtttttatgtttcatttattcgaccaaacatataatttaagctgattagattattccggatcttttattaatcataatctaaagaacttctacaaagctaaacaaacatttatgctcacaatgagaatcgccaatacagagggaattaaacaaacacataagcaaatgcgggaattgaagaaaactcaagaacaacttggtcgaattcactggtaaacgagctcaacaaaaaaaaggaaactaattttctataaacattttaaaagacacgaagcacaaacattcctcacatcgactttgaagtaaatggaaccctgacagcgatcctcacaacggctgcaaaccggtcgggtgctgctcttgttgtcaagaacttccaccattcttcgattatgatatttgaaagtgttaccaggcttcagataaacgtggaatccgaataagcaattccgatgaatagtggtgcaacattcgttgcacgtgtagaaccattctgacgtattcacttccttttcgcattcttcacaccaatacttgtcgtccgtgtcttctccatagcaaagagtgagaggatgtttatcgtatttatagtgtaactcacttggaatcgtagcgcattcataacaaatagagtactcgcaaagagtactacattgtagacgattcttggtaagacctctcttacaaccattgcagcgaaaaggttcatagtcgtaattgaatggagcgatgaatagaggatgttcatggactttgtcaatgctatactcaggaactaaaaagcaagggacatctatcttaaaccaatgaatcttgcagttcttttcagcgcacttatacttgaaaccagtggacgttcgagaacaagctgaacattgcagattaccatcagtgggtagaggagatgggtcgaggatgatagaatgattatgcaatgcatgatccactttcttaggtagacaagcacacactacgtggagaaaaaagtcacattgcatacatttgtagaaatcatgcaagtggataggaaggacacacgcctcgcactgcttccttgcgtctcgtacactatcatacttctccagctttagatgatgttcatgactaaaatgttctatcaaaccatcacctacattcttgaatggtgcaatatcttcaattacaccaggttcttcgggttcccattcgagttcttttccatcccataccattacatgtgttgcacatttggtatgaagtacgtaagagcaatcctcgtctttacaagaatattgaccatatttaatgtcaactgtcttgtagcagacccggcataacgaatttgggggtggaaggtaaggagaaaaagagagacgatgaggatgacgtgtgatctttatgacgcgtggtaaatcaacacaatattgatgtaccacataattacattggaaacaagcataacttgcttccgacgcattgaccaaaccacaagcatcacaaggaactaagagtggacgagggaaaaggacgagtgaatggtgatggccttttgggttttcaatagtaagagggggtttggtttgtgtgcacatagtatccaaacaaaagttacaaatagaacaccgatagaaaactgtcattcttggatgtgaacttggtgttggtatgtatttcccacaccaagtgcagttatcaaatatgttaccccatccagacttaccaggatccgatgtgccttggtcttcataagggccttgttcgctcatattgctgccgtcgatgatattgtcatgctttccataggttaaaaagagaggatgttggaggtgaaaaggatgtaatatttttctaggaatattaacacattcttcgtggaaatccacatcgcagatggtgcagtggtaatggaaaccccgagaagaagtggatacttgcttcccgcatgtaaagcaattggacttagtgtttttgctgagtttaggggaaagggtgtgaggatgagtcggatgagccaaacgacatccttttgtatataaagcagcaggatgtatattcttaggctcttccatttcttttctgctttaggtttgatgtatgtttctacaaattgaagaccacccaatatatatacactttaagaattactcaagatatacaatttcatacattgcaatattgcatctccgttggtattatcactattttgtttttttacatatcagatctagatccacatcatacttaataatttaaaatgtcaaattgtgaaagtctgttgaatgaaagaatatctctaattactattagaaaatgcattcagcatatcatcaacctacataatatggcagaagacaaaaagaaaactttgttgatgtgtcgtcaataaaagatgatttagtgcaactagatatagcaaccaatggataaaatttgattaaaagtatctgttaattagccatagatccaaatacataatcttattactttatcaagatctccgttcgcaaagggagggcacatgttcactttgactagtcagagacttgacacgataattcagataagatcttcatttcattttgtaagtgaagttggctccaataagtgacagtaaatgcaatgagtcaagcaagcttgcttcgctaggccatttgcttctcaagacttgtcttgaaaagacaaaatgtgcatccaataagtgaacatgcatttgcttagaagaccacgtcagttaaattaattgtgagattcaatgctaacaaacaaagcaggactatttctcctaagttcacatccaacatttgatatgggtttaatattctttaaaacaattgcttaagtcttacaagtggtgttttgttttcaggttcattgcaaagttcctatttaacaaattgaatgttttttcttcaatgttgttcatgttcttctgaaataaaggtctaacgttctaacttataggtggactacaagggtatatatatcccatggttgaagtttactttcaactttttaactttatattgtaagaaagaaagtaaaaattcatgaatatagaccttgagtttagaaaaatctttaaatatattagtaaaacccttacaaaaaggggaaaaaaacaatggcttgaaaacaggagcttaattattagcacctccggcggtgtttgctgttactgtattatgtttgctggtacctaaacataaatcaacggaacctaaatcgttgaagaagccaaaaccaataaagaaaatcgagaaaataattagaaaccctaaatagaactcgaagaatatggccaataatgtttctagccaccttccaacttctccaaaagagtcaaactagtgagtagtgaattatgtgctgccatgtgtcagtctacgtggaggagatcatttgcttcgatttctctcttcttctctgtctctatcggttgcttaaaaaaaaaaaaaaagatttccttcgtaaaacctctgcttctggtcaatctattgactgaaaatatgactttttcaattacacaaacgtacggtatgatacatatgttcagtaatgtatggtatatgaagatgctcgatgtatagtagttccactcctgtcttatatgtccacgatctctatacttgcaggcaaatatggtaatgttttaaggttcttacatcccgccatctccaatgagacaagccgagaacataacttgattactgaaggcactttctctatcgcagtttcgcctagagacatgaactgaatctgcgttgaaatcaaaggaaagttattcagcttcgagcatcctctcatattaaggacactgagggatttcaagttgatgttgtctggcagactcttcagttttatgcaacaagacatgtccaagactttgagcttatgaagattctgtagacaagacgaaggaactatgaccaaatttttgcagaacctaagatacaacttctccagatttgttgctcttgataggtttggaatatctttaatctttgtggatgcactcagatccatacgcttgaggcttttcagtggctgagaacatagatagcaaaacaatatgtataaatagaaaggcattttataagaggagaccaagaattaagatatataataagaagctacctgaataccttcccagagcttctccagcttgctatctctcatagtaagttccacaagaaattcgggtcgaaacttagaaggcaaacattttttcggatacgaatcccaatgtagtaatctaagtttacgtggtagataatccaaaccgtgaggtaagtacaacttgactgcttcatctgggaaattcttgtatagccacaagaattggagattaggcattttctcaaaggctttttcacttacatacacttgatcttcaatttcagacatatctaatgatattcctaaaacagtttctgtaccctgcaaatgtaccacaattaagaaagaaggcaattagttagctaaaagtggattttgtgatgagtaggacttggatggaaagcatgtctcaaaaagcttacggtttcatctgcaagaacatctgaaatctccaaagaatcaactagaaacttacgtttcccgggctcgtcgagacactgtccccgagtgatttctttacccaattgttgtagcaaacaatgcatgactatatatccatcagcatctatgtgtataagagatctgtcaacaagaactttaagtccaaattctacatccaatgcactcttagcaagcaacagcttcacacgatcaacattcttgccattgaataagcacgcgatatgaagaaagatagccttatctttctcatctaacccttcataacatactcttagtagtttctctattttcccattcaaactagttctaagtcgcggtagagcgtttatccactctttcttactcatccctcgcaaagatgcacctaaaacgctgagacctaaaggaagatatcctgcaagttccacaacttcaacagctagatcattgtatccttctggtgccgagttttttccgaaagcacattgacacaagatctttaaggcttcatctctagatggataatccacttcatatacatgagtaatcccatgagccttcaaaagctgtctatcttctgtagtaactaaaattctggttccattaccaacccattgagtttgatctgccaaggcacgtagttgttccagttcatcaacatcatcaagaacaataagagctttctgattctttagcctttcttgtgctacacctaaatggcttacctttatctttctttgggtggtaatttcagagagaaacctttctcgtaaatgcaacttcatgctataaccatcgatttcctttctcctatagcttcccttaacattctccatgaaaatgaacaattgaaagtcgtcatcattagatgaagaaagttgattgtataaaatcctcgtgatagtggtcttccctattccagcaggaccccaaacacctatcatcttcacttcattagactctagacctaacattgatttcaaatttgcaacatgagcttccaatccaagtaaatcttcgaaatccgtcgaagaagtgaagcaaaatagctcttcagaaacataagcaacgatcttttcaatcattttggcgtcattgtccctgcaacaattgaaacaaacgaacgaatacacatgattcaatttaaaaccttcataaaaacgtttgaatattagtgaaactactaaccatttcgaagagcactcgccggcaatattaccaacattcgtcaaagcttgcctccatctctgcctctcttcctctgttctcacatcacaaatcttgtcaaaagcctttccaaaatctccagtctgttttcttacactagatggatccacatcatagaaaatcggcaccaatgtcttcccaacaacttccctgcactccatgatctcgaccaattcgtctaagcaccagcacgaaccagcgtagttcttggaaagaacaacaatgaaaatctttgattcccatatagcttgtttaagctcaggccatatggaacgacttctcttgattccaccatctttaaatgcatcaattccattatgttgcagctccttgtgtaaatgacttagaaagtttctacgtacatcttccccgcagaagctagggaacacatgataactatggcgatcagaaaaagaagacgaggacgaaacagaagccattaaagagttatccttttagttatttttttctttctctgcggcatgtttacactatagagttacttatcaaatttatacattccttattcttcctattggtcaagtttgggcgtgtgcggtcgattcagctaaagaatctgatgttgatcagtagacgtcgatcgataataaagtcaacaataaatatggcaatgaataaaccagttacccaaacaaaacaaaacaaatcaccaaaagaaaaacaaaacaaaacaaaaatatgatgaatgatcaacacgctttaattagataggatataaatcaaacgctttcttacttcagctgatgtttatagaatggtatataatattgtacgtttcaaaatcttgcaagagaagattttgattttcttgttcgtcaaggatctcgcgacataattaagaagcgttttttggaggaaaaagaacaaagagttcaatagggctgagtcaagcttttacttctttacattcttgcctaggctcgcagcttaggactgagtcaatagtcctacactgcattggcagaccgattccaatattagttttgttgaacttgttgatcttatattaacctgttaaccaatcagtgaactcgagaatgatctcagggtaactaaaatatagtgagatattaccaaaacttttttaaaattatataacttagaaattaccaaaactttttaaatactaaattatataacttagtcttacttagtatatctgcttgtttgtcagataacaatacttcaaatcgtattcctattggttttgtggtgtaaagaccctaacgtgaagggttacttaagggaaaacaaaaaattgaaccgaaacagaaaacatagcattttatgaacaaaagacagagcaagtatacgttgaatgcgaaggttgtttaagcttcctaatttccgctatttccttcctgttggagaattaagaagagattaaacaaatcctaatttccgctatttccttcctgtgatcatattaatatattgtatatatatatagtactaatcagacaattgaaccaaacttaatatatcttgtcttacattggaatttgggtaaggttgattgagaggagctatttaagctaaaggtcggtgagattcgagaaaaaggagagacaaagagaccaatcactttttgaagaagaacaaaagcaatttgcttaaaatctgacatgtccttactggcatttgagtgtcatccaccaccttcaatctccttgtgtgtatactaaagtctaaagctattaaagaaccaaaagagagaatcttcatttagtcaaaagcacttcgaaaaacaaaagccgaaagtaagcgaattacgtaatctatgacctgaaagagaaacatatgaatgtatttcgattaacaaacccaaaaagggaaagcaaaatgggaaaactacaaaagaaatagaaaacaaagtgtgaattgacaggagttgcttctaaatcaagttaagtatccaaaaaagaaacgaaaaaaagaaaaagaaattatggctttaactcgaaatatgttcaaaaactgaaatctttacactcaatacaaaaattaaaatgcacaaaattctttaacattgattcgatagcacagttttgaatgtgcatgcaacaacttaggcatctatcatatttttctctcattcttaaagtatcttcagtgaatatacagttcatatttactatttttacatgtataaacataaaacacaggctctttcctatcagatacacctaaaataatttacctcctactttttgattctttcacactttttttcttaacatataataagccactaatcctgcaaatcaaacctcttctttctttatacactctctctctctttctctcttttcacaaagccatcttgaggcaaactcatcacctcagttaaatcctatgcatgcattgaaacaacagttttaataagaaaaacaaaatggcaacaacccggaaactggtagtagaagtagtagacgcaaaggatcttacaccaaaagacggtcatggaacgtcaagtccgtacgttgtcctcgactattacggccaaagaagacggacacgaaccatagtacgtgacttaaaccctgtttggaacgagacactcgagttcagtctcgcaaagcgaccatctcatcagctctttaccgatgttcttgagctcgacatgtaccatgacaagaactttggacaaacccggaggaacaattttcttggtaggatccgacttgggtccgatcagtttgttggtcaaggagaagaggctttgatatattatcctttggagaagaagagtttgtttaatcttgtacaaggtgagattgggcttagggtttactacgccgatgaaaagcctcctcctttgaaaccgacggtagctcctcttgagacggtggtggaggaaaagacggaggagacgaaggcggaaggtccagacgagtctaagccaccaccagagactaatgacattcctgctgaagtgaaagaaaccgtgaaaccaccacaaccaccaccggaggagagttcaccagccgagggtcccaagccagacgaggaagcctcaccacctttacaagaaaacgctacggttggtggagaagaaccaccggcgtcggaatcagataagaatgaagcagaggcgaaacccgtggaggagccaccgcagaatcaaccagatggtgaagatattgtgcttgagtcagaagatacaatgagttgggcttcggcgccgcgatcaccgttaccggaagttatcatttcaagatctgtatccggttccatacccgaaaccaaaaacggaccacaaccactacggagaagcgtatcggaaactgcaagctacacatcagagatctccgacgtatcaacgatcgaacgatccacgtttgatttggtggagaagatgcattacgtcttcatccgcgtcgtgaaagctcggtctttaccaacctccgggagtccagtcacaaagatctcactctccggcacaatgattcaatcaaaaccggctagaaaaacctcttgcttcgagtgggatcaaacgttcgccttcctccgtgactcaccggatttatcttcctctccaattctggagatatccgtgtgggattcatcgacgggaatcgaaaccagccaattccttggtggaatttgcttcgacgtgtcagagattccgctccgagacccgccggatagtccattagcgccgcaatggtaccgtctcgaaggtggtggagctcacaacagtgatctaatgcttgccacgtggacaggaactcaagcagacgaatcattccccgacgcgtggaaaactgatacagccggaaacgtgaccgcacgagcgaaggtttacatgtcgtcgaagctgtggtatctacgcgctaccgtgatagaagcacaagacttgttaccgcctcagttaacggcgtttaaggaagcgtcatttcagttaaaagctcagttaggttcccaagttcagaaaaccaaatccgccgttactcgtaacggagctccgtcatggaacgaagatctactcttcgtagccgccgaacctttctccgatcagcttgttttcacgttggagtatcgaacatcgaaaggaccagtcaccgtcggaatggctcgcgtgccactcagcgcaatcgagagacgcgtcgacgatcgcttggttgcttcgagatggttaggattggaagatccaaacgacgagaagagaggaaacagatctagagttcacattaggctttgcttcgacggaggttatcacgtgatggacgaggcggcgcacgtgtgcagtgattaccgacctacggcgaggcagttatggaaaccagcggtgggaatcgtcgagctcggtataatcggttgcaaaaatctattaccgatgaagacggttaacggaaaaggatcaacggacgcgtacacggtggcgaaatacggttctaaatgggtccgtacccgaaccgtgtcggattctttagatccgaaatggaacgaacagtacacgtggaaagtatacgatccgtgtacggttttgactataggagtcttcgatagctggggagtatacgaagtcgacggtggaaaagaagccacgcgtcaagatctaagaattggaaaagtacgtatacgtatatcgacgctggagactggtaaagcgtatagaaatacgtatccgttactgatgttagttaacggcggcgttaaaaaattgggagagatagaattggccgttagattcgtgagaacagctccaccgttggatttcttacacgtgtatactcaaccgttattgcctttgatgcatcacattaaaccgttgagtttgtttcaagaagatatgttgaggaacactgcagtgaagatcttggccgcacatttgtcacgatctgagccgcctttaaggccggagatagtacggtatatgctcgacgccgatactcatactttcagtatgcgtaaagtcagagcaaattggcttcggatagtgaatgtagtcgccggaatggtcgacgtggtgcggtgggttgatgacacccgtttctggaagaatccgacatcaactttactagttcacgcacttgtcgtgatgctgatttggttcccggatcttatcgtaccgacattagcgttttacttgttcgtgattggtgcgtggaattataggttcaggtcacgtgctgctctaccacatttcgatccaagactctcgttagctgatgcagctgatagagacgagctcgacgaggagtttgacgtcgtaccgagcaaccgaccaccggagatggttcggttgaggtacgataagctacgaaacgtcggagctagagttcaaacgattcttggtgaagtggctgcgcaaggggagaagatgcaagctttggtgacgtggcgtgacccacgagcgactggtatattcgtggggctgtgtttctttgtggcgttggtgttgtatcttgtgccgacgaagatggtggctatggcgtcagggttttattacttccggcatcctattttccgtgatcggaaaccttctccggtgttaaatttcttccggcgactaccatcattatctgatcggctcatgtaatattgtttttttttttggaggggatgtatatatagtttgggtcgtttaaccttgttgggccttattgggttataatgggccactaaatggatttttatatgatttcctattataggtgctgtgtttgaccatgtctaaaacaaagaagtgtttggtatgacaaaattgatgaacctactttttgagcagagtggtaaatgtgcggaaataagcacacaaggaaatcgttgttggtgactaacaaaaggagttatccactgcccaagcattaccaactaccaccaaccaaactcaatttggaaatttcaaaggtccattagtcaaagcagcattaagtcattcagtaatcaacaaatatattcatatgaaacccaaaataaaataaaataaacacttttcaagaaaaaaataaaatactgagtactaaactggaaaccctttataagcaaaaagaccaaaagttaaaagttaattaagatttggtttaaggcgctttgctttattagagaggaaggaacgaaccatcatagaaatctctccttcgttcaagtttttctctactgtgttggttgagcaatcgagtgatggttattgcggtggcgacgacgagctccattgtttccggaatcaagctttcagggatcttaacttcgttcaacgccgtagatgatgcgtccagtagttgcggaagaagcaacttgaccggagttagaatttttccgacattgagtcggcgacgattctcatcgatcggagctgtttccccaattcgtggggatgctcaatcttcctttagtcgcaggtaaagcctcgatttttgggtttaggtgtctgcttattagagtaaaaacacatcctttgaaattgtttgtggtcatttgattgtgctcttgatccattgaattgctgcagctctttcgcttgctctcagaatctcggtttgagcggtggatttagtgcagctgaagctctgccacctgcttgtgcaaatgctagcccttcttccattaaatctttcaaccaggtgactcttcatttctattttcaggataagtttgtggtttgatgatcccttgtttctaagtctcttgatttgtgaacaattcagggtttttatatatctgtatctgtatttctgagttgggttgagttattggcttcatgctgactaaacatgtttggccctgtgtgttcttcgaatttcattttaattgcttgatgggttttattgacttgagtaaaagtgtactactttataggttttaaaagagttttacttttggtgattttccaatggctttgaagagagagatttaaatcatggggttactatgttctcatactgcgtttgctctgttctgttgtttttctttcagttgattgaaaccttgattgatcgggttgatctatctgaaactgaggctgaatcatctcttgagtttttgctgaatgaggcaaacgaggcgctgatcagtgcctttctagttcttctgagagctaaaggagagacatacgaagaggtaagtatccattaagtcaatctaggcttataataaaaaagtatacataatcctatattactgcacttcaataagttaactcaacgttcactttaattcggatattgggtagattgtggggttagctagggcaatgatgaagcatgccaggaaagtggaaggattagttgatgctgtggacatagttggaacaggtggtgatggagcaaacacagtcaatatatcaactggatcttcaatacttgctgcagcttgtggtgcaaaagtagcaaaggtataacgaatgagaaaatccttaaaagaaacgatatatttaaattttgactatctgcattaatgctaaatgatcttcgtctggtcgtctaactaatggatacttattttgcagcaagggaatcgttcaagttcttctgcttgtggaagtgctgatgtactagaggcactaggagtggttctggacttgggaccagagggcattaaaagatgtgttgaagaaggggggatcggttttatgatgtcaccaatgtatcatccagctatgaagatcgttggtcctgttcggaaaaagcttaaaattaaaactgtttttaacatattgggacctatgcttaatcctgctagagtttcttatgctgtcgttggtgtataccacaaagatctggtacatttacttattgctgaaattagtttgttcatcaacaaaaacaagacatttacttaccatttgcttgtgtggtttcataggttgttaagatggcaaaggcactgcaacgatttggaatgaaaagagcactggtggttcattcatgtggtctagacgaaatgagtccgttaggtaagattatctcttcccaaaattgattacttttattattgaacaattattaaccaatcatggcttaacgaaaaacaggaggaggactagtttatgatgtaactccggaaaagatcgaagaattctcattcgacccatgtaatgtttcctctagctttttatcccttctctaaaatgaatattgcagatgcagcttaatgaaattgaagcttatttctttttgacagtggactttggtattcctcgttgtactcttgaggatttgcgaggtggaggtccagactacaatgcggatgtgctaagacgtgtgctttcaggggaaagtggagcaattgcggattcattggtatgttttgatttgccgattcaacattctctgaacttctgcaatttgttcatccttttttttcaaaatcttgtttcagatcctaaacgcagctgcagctcttctggttagcaaccgagttcaaacgctagctgaaggagtaaccgtggcacgtgaagtacaatcgtctgggaaagctatcaagacgcttgattcttggataaacatctcaaacttagctcagaaatctcagtgaccagaagaggcttatgatattgttgtattcaacggatcacctttgcaagcaattgtagatgaagatggaggcaatgtgccaaaggaagaagctggagttatttgtaacttaagttttctttgtcaaacaataaagagaagagaccggagcgagctctatacacattcatcatgtaaacactacaacaataatctttaataaaatgaataaatctgttttactcaaacggagttcagattcatcattgggatacaaatcaaacctaagtagtaagtagaaaaacaaaattataaaattagtcctaacattgaatcacagaccataatcttgttccgaagttcttcactaattctgcaactacacctaaaatatcatcatcgtcatggtgtctattctttggagactttcacacgcatctctgtcggtttgatgagcttgaacgtacaaacatctccgaccagtaaacctaactccttggccaaacgactccatccaccagagaatcttgattgtacatcagtgaccacatatgtaacatcccatgacttctttcctctcggataatgaatcttgaacatcgttgtctcagttggcatatgcatatccacaaatttctttgggatcccctgaatcacagattttcattagattaatacacacttttatacatagccatttcgacagtgtgtcactggtcttgtcttgcttaatcttaccaagaacagaaggtgtgatttctttatggtgagcttgaattctggaataagagatgaagtaccggcttcagagtcgttactaacagtttccaccttcttcttcttactcgtcttggatttttcggttttatcggcttccttctttctcaagttaagctcctgtttctgcgtcaatctcccacttgtagattcagctgttttgtgacaaggatggctcgattcagaccaagactctatctcttcttccttcttcacatctttgtagatgctcttcctctcttctctcttgttccgacctgtttgcatcaaaatcaaccacagaagtaactaatgactgtattcttcttcttcttcttcttaagcataaagaaagcaataacatagatgatgaacacttaccggaactagaagtaatggtttttcttggtctaagcatctccgtaccatctgcctcgaatatggttacattaaagcacatatttgcctcatgagtgaaagtaagatactcgttttcacccaaaccgttgtcattcacaaactggttccatccacgatcttccatgtagtgaaaatttgggttcttggagattttaacttgccatgaccttccccatggtactcttaagaccatcttaaacgatgaagacttgtcggagatgcttcttatcaagtgatgaggaatcattctcttcagagaggcaacaaaatcaagaaatatggaacatcaggaaatggtaaaatgaagtcacattcctcaatttcagtgataagtacagtaaataaaagtttactgatcgatgtacagtcaaaatccatttggtccgatccgatcatttcacacatcaaaacttagttaagaccaagaacagacagatctaagttcaggacactacaagagacacactgaagaaccaatagattcgatctttaatttaagaaaaaaggctaataagaaaataagtgataaggcttaccatcatttcagtcgaatgatcttcccttcgaagaatcttgaagaatgctggattatctctttcttccataatctgaccaaaaaaagctttgtttttcaccatctctgcttctctccttcgatatgatctttcttcaaaacctctcagtcttaactctttaatcctcttcactctatctcctcagtcactcactcgcatcttctcttttcaacttttctatctcactcactcgctacttctctttctctctctctggttgtgggcaaagaatgggtaaaaagagaggtctcttaaaactttaatttctaaaaacagccaaagtgttttatttttctgcattaactttgaaattaattttacttgtggttagttggaaaagattcccatgaatcattaaacttttgtgattcgtaatttgatatcgtaatgatacacagaaacagcaatatgctcgtgacttcccagacacgtaaaaagcagagcaaattcctatttttagtaactgaattctaaaaagacagcgtcatatttccatatttttttttttggttgcataaactattaattaacttatactgtactaaaatacattcacggcaaattttggttaatcacccatttgaaaacctcattcctaatatttactagctagtctgtagaatgtagacttgtgtccagcacatacccctattaactttatacaagctacatgtttgaaaacttagctaaaaaaataaaaatactacagactatacatgtttttttttgggatcaaactatagaatatacattagtactctaaaataccaaaagaaacatgcatatatgtatattcagcgtaacagatacgtatcaataaatcattgaagaaagggatcggatccagtccacatcaaccctaactagtgcgtgtctctatagttttcctttttgggcaatgtatacttgtctttattatttggaaggagaaagcaatgttatttatagaataaaatacaaacagaagtttggaattcaaaagtaaatttcttttcctttttgcttgacaatatcttgaaaactataatcaaatgtcactggagacatcaactaaatgtaacccccacactatacgtaagagccagccactgataaattgtgtaagttaaaagtggtcatttgttatttgtttccgtctaattcagagtagcaaacaaatactaaaaccggatctgaaattctcggttagagtaacaagaatcccgaaccgggggtagtgcatcaaaaggcaaaaattggaaataagcaggtaaaacaaaaagatatccggaataaagttcgggggattgaacccgacgtgaatcgaacacgcaaccttctgatctggagtcagacgcgctaccattgcgccacggatccggatgttagatgttccacttaattgtttttaatcaacatgaaactataattagagtagttttttgattgatgaatttggtgtcgtctttctttttcaatgagcgatcaaaaatgtattgacatgaagtttgtatataacattaattttgtatttcactttctacacttttagaacaactctttcaagaagaaagagaaaaaagctcatgtatttacaatgaataagtctatttctaactgaaggaaaaaatgttggatcatcttcattggagccgagaagtcacattgatgaaagtatcttcgggacaagggatcgttaagccacccatcggatgagcaaacccaaactcttcttcggatttactgagcagagcttgaaatgacggttggctcaagtatgagagcggcaccaaatatctcttcttctggctctctcctacgtacaccgcaagaaacccttttggtgccgcagatcctgctgcggtggagcggcttagaatcttctttgctcccaatagacttctcacgaaagccatttttattttattttaaataaaagaagtttgaattattatgaagctcttgaagatgtatgaaaagattcaagttattggaatgcttgttgttggttgatgatagaaataatggggttatgggtgtatatatagaaatatcaatgaacgatttgaaacttctctgaaaaagtcattgaaactgtggtcttgaagcgtgggacagactagagcaagagttcacatggttctgtctttaccatctggaaaagatgcattaatgaaatttatctacttaaataatctccatgtgaaatttcacaagggcttgctttctcaatgtttctgagataagacgtgccctatatttgcaagaacaaagacagcaggttctgtgatgattaggtggttggttctttgtcctatagtactctaatctctgcagtcgaaatggatttattaagaagttaaagtggggacctgaatgttattcaacaacagaacaacaattcaatgtcactctctagttgttctttgattatatccacacatgaaaactaaaagagactgaatacctcacttcttctcttcatttattatacagacatggagaagacagacccttgtgaagtgatgataatgctcattagcttccgttgtcaacttgtcatctatcatacctaaaaaacagaaccatgtgaaactatctttgtgtatgtctcacccctactttgaatggtttcagggtgatttgaagtcttttatcaatctatttatacatccagagacagaaccaactcttcaccaagtagtgaagcaatccagacctcaaaattttgagcatctaactttttctcagaagcttcaaatttagattttccagactcaagaaatggctttgttcagaggcctcttgagttcaaagaagattatcggcttttctgtagaggctacaagcaaaaggacagtttcaacacctattttatgtaaaactattattttatgaaaatctatatttggaatataaccaaaaatgtatatcaatatgatcctgcatagtaaagacactcacttaataaccaattttttttcactttctcacatcttagaattgatgttttgagagtttcgtatactacaagaaaccctttttagcactccctgagcgaatttaaaagcctctcggaaatcttctgaaacttgtggatgtaagagtggacacataagaagagagtttagatggttttgtcgtccagatgctaacgtgataaatgaatgtggatacaaaagacgagcaacgataagctaaactagacttcatgagggtttgagttcgctacatttgcttgtggttcttggttgtgatttctctggttgcttttgtcgtacgtcctgatcttaatatttgaagaaggagacgtggctcacttgacaaatgctaggaacagaccagtctcgggttttacggatcttatgcaatagtctgcatgcagtatccagtatccacattaattgttctataacatgttatgatagtaaaaccataggaatgatcacaaatcatgacaagaaaagcctaaggaaatcaaagaagcttaatatcgcataagtgattaatagcattgagccattaatgatcttacaacaacaagagtctctcaatgttatttgggaaaacatcgagatcattgagagaatcgagtctgagccctttaagtcgtctatataggtcatttgcaattcctttaattttggttactctaatactctttctctttggatcaaaatacaccacatggaaggattcatacacactcattggcgtataaacaaactcaccagcatcagtaacacccttcaaaattaaacacgcccattctttgtcagacagaggaaaattcaaagacataaagagacatatttcaacaccaacggccatggaacaaggccacctacaccatcatcttcacaaccttgagcttctccaaaacatttctcattggatctcatgataaaaagccagagaagtaataagcaaatggctggcaagttctgttcttgattgtgattctctgcttgattttgtccgtttttgaatatgaataagcaaacgtggctcgcatgaaaaatgctagaaacagagcagtctctgtttatacagactacaacaatagtttgcactatccacattgttatataacatgctgggataaatatcttgagattaaggaataattacaaatcattacaagaaaacctaaagacatcatcaaacaatctcaaaatctaataaatgaatgatgaagaactagcatcgagcggtgaatgttcttacaaggacaagagactctcaatgtgatttgggaaaacatctaaatcattgagtggaccaaatccaaatcccttgagtttcctacaattcctttaaacttagtttctcttatactgtttctcttcagatcaaaatacacaacatggcgtagaagcttcgtgccaaggaagcagcattttgggttaagaagattcctatgatccctcccgttttctctttctttgaatccatggcggatcgcaaacacacttttactttcttcaaaccctaaacagttgtgtttagtttatcgaatgaaagcgaagggcaaagtctggatttttttaaaaagaatatccggagtaaagttcggggaattgaacccgacgtgaatcgaacacgcaaccttctgatctggagtcagacgcgctaccattgcgccacggatccggatgttatatgttccacttaattgtacttaatcaacatgaaactatcattagagtagttccaattggtttggtcattggtgttatcttttcatttttcaatgaaagatcaaaaatgtattgacatgaatcgtttctgttgcataaagatggcatttactctctaaacttttagaacaactctttcaagaagaaagagaaaaaagctcatgtatttacaatgaataagtctatttctaactaggaagaaaaatgttggctcatcatcgttggaaccgagaagtcacattgatgaatgtatcttcaggacaggggatcgttaagccacccattggatgatcgaatccaaactcttcctcggatttactgagaagagcttgaaatgaaggctggtttaaatatgagattggcaccagatatctcttcttttggctctcacctacgtacactgcaagaaacccttttggtgccgccgaggctgctgtggtggagcggcttagaatcttctttgctcccaatagacttctcacaaaagccatatctattgtttttgtttcgaatattaaattctttaaaatcttctgaagatgtatgaaaagattcaagttattggattgcttgttgtttgttgatgattgaaagaatgggtttatgagtgtatatatagaaagatcaactactaatgagttgaaacctctctgaaaaaatcattgaaacttgtggtcttgaagtgttggacagactagaacagagaacatggttctgtctctaccatttggaaaagatgcattaatgcagtttgtcttgatgagataattaattgattgtgggacattaaactaaaaacaaaatccatatgcaattcacaagggactgttttctcaatgtttttagataaaagaccagcaagtttctcttctccatgttctgtgatgatcctatttttgattctctgtggtctaaatggatttaataacaacttaaaagtggggacctgaagtttctcaacaacagaacaacatgtctccatcactctttaagctgttccttttttatgatatacacaaatagaaccacacacgaaaatcaagtaaaagaataaagaaaacatcatcaaaatatatacccctttagttttcttgcaacagtattacagtaatgagatcctccatgccttgcttgtctttgaagcaacttaagtacctaagtgtaaacatcggtgagaaaatcactatgatgttagccttaaggtcaagatcaagaatcttcattattttaagcaaatcctcttggtgataaggaatgtatttacacattatatctatgacagcaagatgaagtatttacattgaataatctatctctcactaactactgttagttattccttcttgcggaacatcttcattgaagctgagaagtcagatcgatgaaggtatcttcaggacaatggatttttaagctagccacccattggatgatcgaatccaagctcttccttggaattacggtgaagagcttgaaatgaaggctggtttaaatataagactggcaccaaatatcttttcttttagacctggtcttcgccaacgtacaccgcaagaaacccccttgatgctgaaactggccttttgcttgtagcctctatagaaaatctgataattttctttgcacccaaaagacctctgaacaaaaacatttcttgtgtttggaaaatctaaatttgaagctttagagaaaaacctagatgctcagattcaagcttcggattgaatagttagttctatctttagatgtataaatagattgatggacttcaaaccaacatggaacatacacaaacagagttacgtttcacatgattctgttttctccatatttttataataaatgcagagaagaaaggagatattcaatcctttacttgtaactgtcatgtgtggtcctcctatttgaggatatcaaaaaagaacaacttaaccctagacaaagacttgttgttctattgttgagctacttcaggtcccaattttaagttcttattaaattgcaccacagacatgaggtaatatgatcatcacagaacatgaaggaaagaaacttgctgggccttcttattgacaatagcatgtcttatcttaaaaacattgaggaaacagtcccttgtgcatatggagttagtttttcgtttattggcccaaactcaattaattatgtcatcaagacaaatttcattaatgcttcttttctagattgtaaagacagaaccatgtgagctctgttctagtctgtcccacgcttcaagaccacaagtttcaatgattttttcaaagaggttttaactccttcattgatctttctatatatacacacataaacacattcgttctatcatcaaccaacaacaagcaatatatccaataacttgaatcttttcatccatcttaataagcttcaaaaaccttttcgtacaaaaataacagatatggctttggtgagaagtctattgggtgcaaagaagattctaagccgctccaccgcatcggcggcaccaaaagggtttcttgcggtgtacgtaggagagagccagaagaagagatatttggtgccgctctcatacttgagccaaccttcatttcaagctcttctcagtaaatccgaggaagagtttggatttgatcatccaatgggtggcttaacgatcccttgtcctgaagataccttcatcaatgtgacttctcggctccaatgatcatgatgatccgacatttggttcttctgagttagagatagacttgatccttgtaaatagatgatttttttctttcctttttctctttcttcttgaaagagttgttctcaaagttttgaaagtggatgccattttttattcaatagacacgagatcatggtccatgttaatacattttggatcgattaccggaaaaataaaggacaacgccgactgaataactattttaattatactttctaaaatcaagtgagagcattattaatcttcttacccactgtcttaatttagaaaaattctttctaattcacttttcacactatctcttttcaattttacccttttctatttactattttcatttataccctctttaaattttaatgaccattttacccctatttgtaaattgatttaggttaataaaatgaagtattaatatttttcgcctaaaacattctaaaataaaatttcccgccaaaaaatttcgggaaaaaacttcccgccaaaaatttcgtgaaaaaaatttcccgccaaatttttttttcaaaaacatttttcccgccaaaaatttcggaaaaaaaatcccgctaaaaattttctctgaaaaaaatttcccgccaaattttttttcgaaaatattttcccgtaaaatttttgtttttggcaggaaatagatttacaagggattttaaaagggttttaaaagatttacaagaaattttaaaagggtttaaaagatttacaagagattttaaaagggtttaaaagatttacaagagattttaaaaaggttttaaaagatttacaagagattttaaagggctttaaaagacttacaagagtttttaaaagatttttaaagggttcgaaagtgttttaaaagatttacaagggatttttaaagagttttaaaagatgtacaagagtttttataatattttaaaagaatttataagaaaaacttttaaaaattcttgtaactctttttaaaaccttttgtaaaggttcacaagagatttaaaatggttcaaaaagagttataaatgttttaaatacttacaattcttttttttaaaagttaaaaaatgcttgtaaagactttataagagttttaaaaggatttacaaaggtttaaaatcccttgtaaatcattctttgacacttacttatgctttaaaaacgattgtaaatcattttaaccccttttaaaatcccttgtaaatcattcaataacacttacttatgctttaaaacgattgtaaaccatacaaacacttttaaaatcccttgtaaatcattctatgccactaacttatgctttaaaaacgattgtaaatcatgttttacccttttataagcttttaaaatcccttgtaaatcattcaatgcttcttatttatgcttaaaaacgattgaaaatcttgtaaaactattgtaaaaagctttaaaatgatttacaaagatttaaaaaggtgttttaaagtatttacctatgtttttaaagactttataaagattttaagaggttttaaaatgatttacaatggtttttagcaactaccaaagcttttagaaaactttacaaggttttttaaagagtttttaaaaaatttacaaggttttttaaaagcattttttggctgggaaaaaaattttacgagaaaaatttttggcggaaaagtttttttttggcgggaaaaaaagtttgccggaatttttttttttggcgggaaattgaaagtttccaagtacttgttattattaaatgagggtaatttggtcattctgttcaagaaaaaagatatttttaaaaataaataatataaaagagtattatggcaaaaaggtagtcaaaaaatatagttttgcaaatctcccattaatttaaccaatttcttatccatttcgtaggccaaagtttctctttttccttcataggcatggatgggcctgatcattattaatatctcatatattagatgagataatctctttgatcctcaaaacaagaaaatattttttcgtttgtgaaaacaagaaggtgagcagttacaaactcctcataaaaataatgatctacatgtctttaaataaacaagaatatacgagattttcctaaagtttttatgaggaatttaaataaattatgcaaagggaaatatcaaactagacacaaaattgaagtaaaataagatagaagtagaagttattatcctcttcactgaaaatttaccaagacacataatcatggtcctttaaggtggcagagaacttgaacatggaataatgagccaccgttttcgagatagtattctgtcatggtccaaccactggcttgtctctcacctttgacgtagaaacttagacttcttcccaatcactgcaccggtatcttccaacacgacatcactcaacttcccatggcctttccaacatccatcaaccgtctctcctttgactttgcggctgatgcgttttccagtaacgttttcagagagatgattcactttcacgaactagaaccattcattaggttccaaaaagttagtctcggtgtgagacaaccgccacggctctttggcatagatgtcaaacttgtcttctaattcaaattctttatttgatcttttggtaaccttaggcccgatataacggatgatgagttcttgggcagaaggatgaaaccaaaacccaacatgttcctctttatcgtagtacttaaccatcgacatattcttttcttgttctatgagacaaagaaaacgcaaatcagacaaaaagttaaggatctatatattatagcaataatccaaggggaacaacaaatgatctttagagcaaaactgaaaaacaataataaacgcgttgaagacttgaaactttcaggtagacaaatagaaaaggtgatttcgtatatatatgtggattttaaggatttttaatatattaggaaaacgattctttaaaaaggaaatatatccatgtaattcaaagccaatattcttaaaattagataagtaagccaatatcacattttttcttttcaaatttgtaatgttggttttagcgtatgatattttgtctactattttctttttaaacttattttgtcttatatctttttacaaactaaaaaacaagattattcttttacttatctaaataatgttcaaagactggaagatttcttgctcttctgatatggagagatacttgtattagtacttgaagaagcttatgcctcaaatattttcttgctctccaaaaaatgcattgacatgatcgtgatcggttgcacaaaaaatggtatccactctctaaacttttagaacaagtactctttcaagaagaaagagaaaaaatctatttacaacgaataagtcgatgtctaactcggaaaaacaaaatgttggatcatcatcattggagcctaaaagaaaattgttgttaaactataattgttgcccttaaataaacaggcaaaaacgatgttgttaaaaagacttttaaaaacattggcaatgtcataaaaacggcaacgttttaaggaaagtttcaaacgtcgtcgtcttgaggactaaagttgaagtcttaaaaaggcgacacgtttcgggacaaagctgaggggaaatcttcgcgacgactgtgagagtttgtttcgcgaacattctctgagtttctctcgacgcgacggcgattgcgaatgtcttctccttctgattctcgtctctctgtgtctccggtaatttctctcaattttctctctctgttggattcttttagcttgttttggatttgttaccgattctactccgtgacttggcctttctcagtgctattagtgaacagagataaactttagggtttgaacttttttttttggatgaatgatttgaatcctttttaacgttagagttgttctttgttaatggaagctatcattgttactttggtttactctaaagcttcttgttcgacgatttttcctctgcaactagaaatggttgtgtttatgtcaaaacttgaaaccatgtttatggttttcgctagttaggtcttgtttttgtttttccttttgccttatctgcttgactctactggatttctgaatgtgttcttctgctggattctacttgaaaccagggataagtaatcgaagatgaatatgattcagcgattcatgcaatctatggcaaagacgcgtggcctctgtcatccagattgcgtaaaagcaagtagtgagcaagaagattacggtaaatgaatcaaatcttgttctagagaacattactttattcgcatcgttaagagatactgtgattgattttagctgatagtagtttactccctttttaatatagtctaatcctttgaaagagtcatatgaattgactacaacattttcattttttttttgtcttgcagatgcgtctcagctcagtatttggtggataatgctgggaaggaagacgaccagggagaaatggatgaaccaagctctcagttcactatcgaaaacttgcatcagtatatggtggaaaatgtctggaataagaggtaagatgtgcagggagagggagcaaccactcactgtcaaagactgccttgaatgtgctttcaagaaagggctaccgagaagagaacattgggcacatgtgggatgtacattcaaggctcccccatttgcttgtcacataccccgcgtgcccatgaaaggagaagtgattgagactaagagtttggatgaagcgtttaagctgttgattaaacaaccggtgggtgcaagactccatgtgttcagtccagaccttgataatgttggagaggtaaagtgttgtgagataaatttcgaaattttcaaagatcaatgacaaagttttgatctaatcttattcaaccttttttttttgtgtggtagggagtttacgagggcctgtctagcctgtctcgtaaggaatcacgctatgttggacttagggatgtcatcatagttgcagtgaataagtccgagggaaaaactgttgctactgtgaagatatgttacaagaagaagacttcatttgtcaaagtgtgtttgagccgtatgtttgtccagcttggtggtggcgaggagtctcaggtgaaagagccaacaggtctgcttgttgacttctgtatcccacgcttatctatcaactaaacaagagctgagatcttggaaagtatctcctagttgtggaacctctctatgttggtctcattttaagaatgttttatcagacttattttctgttttatgtattttgaaaaccgtatgcttgttgtgaaactctgtttgtggtctcaagttaagtttgttttatgagactttaatctgtgtcaagaattgagatgttgatcgctacttcttggataaattatatctataaaatttaagaattgcatttgatggaaagtcttatatgtaagcaaaaaagattactggaagcctcaatggcaccaaaaggattttcttgcatgtctttgaaactgcacttgcaagcatttcgttatgtaatatctttagctagatattggggtaatctgaagatagcggttaacaagagatttccggaaagtgatcgggattttgaactcgacgtgctaccattgaggcatggatccggatgataaacagggaaacatatacttttctaaccatgatttaactataatgaaaggttcttcaaatggtgtggtctttagttttcaaagatcattccaaaatgtattgacatgtcgtgtcggttgcacaaaaatggcatccattctctaaacttttagaacaagtactctttcaagaagaaagagaaaaaagctatttacaatgaattaagtctatatctaactcggaaaaacaaaatgttggatcatgatcattggagccgagaagtcacattgatgaacgtatcttcatgacaaggtatcgttaagccccccatcggatgatcaaacccaaactcatcttcagatttactgagcagagcttgaaaagaaggttggttcaagtatgagagtggcactaagtatcttttcttctggctctctcctacgtacactgcaagaaacccttttggtgccgccgagactgctgcggtggagcggcttagaatcttttttgcacccagtagacttctcaccagagccatttataattctctatttgtctgaaaatttgatttcttttttaagcaaatctgaagatgaatgaaaagattcaagttattggatatattgcttgttgttggttgatgatagaaagaatgggtttatgtgtgtatatatagaaatatcaatgaaggagttaagcctctctgaaaaaatcattgaaactcttggtcttgaagcgtgggacaaactagagcaagagttcacatggttctgtctctaccatttggaaaagatgcattaatgtaacttgtcttggtgagataattaacaaactccatatgcaattcacaagggcttgtttgctcaatgttttgtttagataagacatattctactgtcaataataaaggccagcaactttctcttcttcaaattctgtgatgatctattcttgaatctctgtggtctaaaattgtaaatggggtttaataagaaattatagtgggtactgatgttgttcaacaacagaacaacaaatcctatcgtttaaaacattgaaaaaacagtcctttgtgaacttatggagtttgtttttcgtttactgtcccacactcaatttattgttagattatctcatcaagacgaactgcattaaactaaatctttccagatggtaaagacatattgataggcaacataatcttagctcgccgtgagaatccatcttttgcatatctgcttcaacaatggtttgctcatgagtaatctctgcattctcataatctcatttcatgattaggcttttaaaaaaaatcttagctatgccaagctcttgctaagaaaatgttcctcttggtaatgataatcacagtttatccaaaaaaaaacaaaaaacagaaccatgtgaactctgtcccacgcttcaagaccacaagtttcaatgacttttcagagcggtttctactccttcattgatatttctatatatacacatatagcctcattctttcaatcatcaaccaacaccaagcaatccattaacttgaatctttcatacatcttttcagaagctttaaaaataattcaaactttcagacaaaagaaatggctttggtgagaagtctattggttgcaaagaagattcttagccgctccgccgcagcagtctcggcgccaccaaaagggtttcttgcagtgtacgtaggagagagccagaagaagagatatttagtgccactctcatacttgaaccagccttcttttcaagctctgctcagtaaatccgaagaagagtttgggttcgatcatccgatgggtggcttaacgatcccttgtcccgaagatactttcatcaatgtgacttctcggctccattgatgattatccaacatagtgttttttcgagttagagatagagttgtttccttgtaaatagaggaattttttgttccttttttttttttttttttctctttcatcttgaaaaagttcttctaaattttttggaagtggatgtagatgcagtttttgtgctatatacacaatcataattcatgttaacacattttg

SEQ ID NO: 718 - DNA, 83948 bp, Arabidopsis thaliana
gatcgattatggaaaaagaatggatatcaccaactgaagaactcttttcttatattataattgttgttaaataaaaccaagtgagattacggaaattatatgacaatctctagctggcttttggagtaatttagttgtgtagtgagatcactgaaattacaatctttgtaacatttttaacgataaataaacgattgttgcccaatgatgttaaagacttaggggtgttattggttcctaatttacaaggaactagattttaaaatatttatattaaaatttacaatcttattattttttaaaagtaatatatattaaaatttacaatttttttttttataaaatatttataatttacagtttataattgttattaaataacgttataccacgaatccatgagagaattgttaaaaaactgaagttttaacccctatgaaaacagtatattaataatattttaaaattttataaatatcgattcaaatatatccaccatataacccaattccaaaataaaacccgttctgtaatttctttatccgtcccgtgatttttttttttaaagtagtaatttttaaaatttaagaattatttattatatataaaaattttgcaaattgtatcattctctaatacatttatattttatagtttaattttatatatagtaacattatacataccacataacatttttgattttatataatcttttctaaattaggatgatttgatatgtttaatattagtggtcttaaaaataataaattttagatttaacccgtattgaaacggtggattaattatattttacttttttattaatgttgattcaaaaacccgtccctccaaatctgtcttgccaaaaagccatttattttattaatattaattttatttatgatatgactctgaattataatctaaatattttagctaataacataggagtgcaccatatttatttaataggggaatataccatatgacccgaattcacttttatccaaatccaccaaaaaaaaagtcttgcaaaaatactatagagataagaaacgatagtcggttttgataggtataagattagcaaatatattagttagcttaaattagttaaaaaatacaaattgaaaagatatattacactttattcgaatctagtatcaaaacttatataacacagagatttgataattttttaattgttgaatactttttttttgtgctaatttttatgtgattaagatttaattgatttcgtatataaaatattaaatttttttacgaacttatttgtttataatatggtgagagataaatatttgaatattcagtatattttgcttcagtttaggaaatctttgatgacccgtctttagatccaataagccctacaattaagagatgaatattgacgttaaatgattttggtaaccttaatgacgtcattaaaagattttgtttttgattaaatttttctaatggcattgtcatgtaattaattacaaaaattaaggttacatttaaaatgtacttcccaaataatatagtaggatttggatgacttcaatcacattctagaaagtaaatactttcatgatttaaataaataaatgattataaagtattgttagagagatttttctataatcttgttgattagttttttataatcttataaagtttctcaaacaatctctttatttttataataattttcatgattttccatgactttattttgtaaaaaaaaatgtaaaaagtcatgaaccaatcagagattcttttgttttaattgaataacacaaaacttatttttaatgattttgtaagagtatgaatacaataactccaaatttataaagatgttaaattacttcttacaaatcttaaataaataacacaaaactttaacatacttttaataaatcttaattgaataacaacagattttacatgacattttaaaccagtaaaactcttttgaaatcataaaccaatagcgtcccttttgaaaacagtggcagatggcaaaaaaaacaaggccattttaaggaaaactggcaaacggcgtcctgttgcactgttgcactgttgcactgttgcagtcccaaaagcgacatcgttttgggataaagatgagggtatatagggtttggcatggggctttgtgagtttcgcgaacattctcagagcttctctctacgcggcgattgcgattgcgactacgactgtctcctgattatcgcctctctgtgagatctccggtacctttctctctttttttctttctctgttggattcttttagcttgttatgtgtttgttaaggattctgttccgtgacttggcgtttctcagtgcgatttgtgaacagaaatgaacttttagggttttcactttttgttttggatgaatgatactgaatccgttgtttatgttagagttaatctttgttaacggaagctatcatcgttagttttgttcagtctaaagctttttgttcgacgatttttcctctgcaagtagaaacttgaaaccatgtttatgattttagctagttaggtcttgttttgtctttccttttgctttatctgcttgattctgctggattttgtaaagtggttatgtttatgtcaaaaactgaaaccatgtttatgcttttagctagttaagtcttgttttgtttttcttttttctttatctgcttgattcttctgaatgtgttcttctactggattctacttcaaaccagggataagtaatcgaagatggatatgaatcagctattcatgcaatctattgcaaacagtcgtggactctgtcatccagattgcgaaaaagcaaataatgagcgtgaagattatggtaaataatcaaatctttaatctagagaaatttactttcttcgcatcatttaaagaaacggtgattgattttaactgattgtttgcttccgtttttaatgtaacatgttcaatctaatcttttgaaaaaatcatatgaattgactgcaacgttttcatcttttttttgtcttccagatgcgtctcaacatgccgctatggtagcggtgaatctgattagctctgcacgggttatcctcaagcttgatgctgtgtatactgagtactcagctcagtatttggtggataatgctgggaaggaagacaaccagggagaaatggatcaacaaagctctcagctcactctccaaaacttgcttcagtatatggatgaaaatgtctggaataagaaggaagatgtgcagggagaaagggagcaaccactcactgtcaaagactgccttgaatgtgctttcaagtaagggctaccgagaagtgagcagtgggcacatgtgggatgtccgttcaaggctccaccatttgcctgtcagattcctcgcgtgcccatgaaaggagaagtgattgagactaagagtttggatgaagcgtttaagctgttgattaaacaaccggtgggagcaagactccatgtcttcagtccagagcttgataatgttggagaggtaatgtgttgttagataaatttcgaattttcagagatcaatgacaaagttttgatctaatcttgttcaacttttttgtttgtgtggtagggattttacgagggcctgtctagccagtctagtaaggaatcacgctatgttggacttagggatgtaatcatagttgcagtggataagtccgagggaaaaactgttgctactgtgaagatctgttacaagaagaagacttcatttgtcaaagtgcttgtgagccgtatgtttgtccagcttggtggtggtgaggagtctcaggtgaaagagccagcaggtctgcttgttgacttctgtatcccacgcttatctgtcaactaaacaagagctgagatcttatctgctagttgtggaacctctctatgttggtcttattttaagaatgttttatcagacttattttctgttatcttgaaaaccgtatgcttgttgtgaaaccctggttgttgtttgaagttaagattgttttatgagacttttatctgtgtgtttagaagttattggtcgcgctactttctaaattatgtagtatccatctgcttaaatgtgacgccaattgggcattacgcattctcccaaaatccaagtcatgatgaagctttttttcgttgaaaaactttctgcgattagcattaacaccattgtgtctcacacataacgtgacagtcacatttgaatattgtaacctcttgaacaactctttcctcgagggaaaaggttgacctaactcgagctaaataacgtttgatctatcttctttctggatcatcttccctgtagcgcagttacagagatgaaggcatcttcaggacaagggatcgttaagccacatatcggatgatcgtacccaaacacttcctctgatttactgagaagagcttgacatgaaggctggttcaagtatgatagtggcaccatatatctcttcttctggacctggtcaaataaactaatgtaacaattacatagtcaaataaaaatgcttccttttatgtcaaaaaagcttactttacgttgattagcttcatttctcctccttctctgtttctctcacaagtaccatggacgagatccaaatagcttcaatcctcaaatcatctgagctttttccgattccacaaggcgtcaagctttcgtatggaacagctggattcagaggcgatgcaaagttattggaatcaactgtgtatagagttgggattctctcagctctccgatcacttaagcttggatcagccaccgtcgggcttatgatcacagcttcgcataacaaagtctctgacaatggcattaaagtttcagatccatctggttttatgctttctcaggaatgggagccttttgcagatcagatcgctaacgcatcttctcctgaagaactcgtttcgttgattagaaaattcatggagaaggaagagattgcaatcggagagaataataaaggtgcagaggtttggttgggaagagatactagacctagtggtgaatcacttctcagagctggtgagatcggagttggttcaattttgggatctgttgcgattgacattgggattttgacaactccgcaattgcattggatggttagagctaagaataaaggtcttaaggcaactgagaatgattactttgagaatctatctacttcgtttaggtgtttgattgatttgattccaagcagtggaaatgataagttagagattagcaaattgcttgtagatggtgctaatggtgtaggtggacagaagattgagaagctaagagggtctttgagtaatttagatgttgagattcgtaacacagggagagatggtggtgtgcttaatgaaggtgtaggtgctgattttgtgcagaaagaaaaggttttgcctgtaggatttgggtttaaggatgttgggatgaggtgtgcgagtttggatggtgatgcagatcgattggtttacttttacattccttcagattcttctgaaaaggttgagctacttgacggtgataagattctgtctttgtttgctctcttcatcaaagagcaactaaatgctctggaggatgatgaagaaaggaagcagtctcgtcttggtgttgtgcagacagcttacgcgaatggtgcgtctactgattacctaaagcatttgggtttagatgttgtttttgctaaaactggagttaagcatttacacgagaaagcagcagagtttgatattggaatctactttgaagctaatggccacgggactattctcttctcggaatctttcctatcttggttagtttccaaacaaaaggatcttacggctaaaggtcagggtggttctgaagagcacaaagctgtttctagactaatggcggtgagtaatctgattaaccaagcggtaggtgatgctctaagtggagtgctcttggttgaagtgattctacaacacctgggatggtcgatagagaagtggaatgagctatacaaggaccttcctagcaggcagatcaaggtcgaagttccagatagaacagcggttgtgaccacaagcgaagaaaccgaggctctgagacctatggggattcaagatgctattaattctgaaatcaagaagtactcgcgtggcagagcttttataaggccatcgggtacagaagatgtggtgagagtatatgcagaggcttccactcaagaagatgctgattctttggctaattctgtggctcagctcgtcaaaagcttccttggttcaagctaaagaaccatctgaatttctgcaagagtatgttaatgggagatttttttaattttcttgttcacctcttagcttttacatcttttgtgtaacccgaatgacaagttttcttctcagcttcttttgatttacttcgtttctcttctagctcttctgcttctttctcctcaacgtaaacctgtaaatgctttactttcctgaaaagaatcagcaacgccattactcttttttattaatgaagctctaagaacagaatgtttcttctcctgaaattgtgtaagggaaagatagttgttaaggaatcagtagcagctactttatagtaagatcataacaatggtgtacttgaagaaacgttatgccgtaatctttggcttaagagggaacatagctcatgccttttgttttcctgtcctatctctaatcaacttggtctccgacagtgacttcacaacaaacctaccacagaatcttcttttacttacaactttcatgtgagatcctatttgtgggtatgataaaagaacaacttaaccagtgacagggacttgttgttatgttgttgagaaacttcaggtccccactttaagttgttattaaatccatttagaccaaagagattagagaataggatcatcactgaacatggagaagagagaaacttgctggcttttattattgacaatagcatatgtcatatctaaaaaacattgagaagacagtcccttgtgaattgcatatgaagtttgtagtttaatgtcccacacactccaataattatgtcatcaaaacaaatttcattaatgcatctttccaaatggtaaagacaaagccatgttctctgttttagtatgtccaacgcgtcaaaaccacaagtttcaatgattttttcagagaaatttcaactccttagttgatcttgctatatatatactcacataactcactctttcaatcatcaaccaacaacaagaaatccaataacttgaatcttttcatacatcttcagaagcttcaaaaagaattcaaacattttaaacaaaaaaacaatagatatggctttcgtgagaagtctattgggagcaaagaagattctaagccgctccaccggagcaggatctgcggcaccaaaagggtttcttgcggtgtacgtaggagagagccagaagaagagatatttggtgcctgtctcatatttaaaccagccttcatttcaagctcttctcagtaaatccgaagaagagtttggatttgatcatccgatgggaggcttaacgatcccttgtcccgaagataccttcatcaatgtgacttctcggctccaatgatgatgatccaacattttttccttcagttagaaatagacttattcattgtaaatagatgagccctttttcctctttcttcttgaaagagttgttctaaaagtgtagaaagtgaaatacaaaattgatgttatatacaaacttcatgtcaatacttttttgattgatcattgaaaaagaaagacaacaccaaattcaccaatcaaaaactactctaattatagtttcatgttgattaaatataaataagtggaacatctaacatccggatccgtggcgcaatggtagcgcgtctgactccagatcagaaggttgcgtgttcgattcacgtcgggttcaatcccccgaactttactccggaaataccttttttttgtaacttcttatttccatttttgctctcttcgcttatgcttcgtttcatccggtttaaccaggaggctactctggtttggtaatctaattactctaaaccgaaagtccttagtactggttcgaaatctgaaatctaaaccagttgactcacaaccagtgaaatcaacgatcaagggccaagcctatcttcaattcatactcgccagtttttgtgcctaaaggttttttcaaaggataaacaaaggcctaaataattttgctaccacttgaacattaattcgttctcaattatgtaatatttaatcatttatcttgttaattattcttaagtgattttacttaatactagcctagaaacaatttcaaactttcaaattcaatctcacgggaagcatagggtcacatctatatctagttaaagactaacatttaaaacaaaatttgaatataatagtaaccaaaaataggaaacgaaaattagcatagagattccaacttttgttacatttttattcctagatataaacatcatcacattttctttataaattacattgacacgtaacgctttaactatggtttagatgtggaatacatgcaggttacatcttccgcactatctcatacaatcaatgtatctgttctgagacttttagaaatgtgaatctgttttgtgtaagattaaaaagtaaataaaattatataatttaaagtaaaaattggctgtaaaccagtaacaatagttaattcttgagacttaaagagtaaatgaagttgttagtcgctgtcattgtagtaaatcaagttactaaaactggcaaactactttgctttttgcgtgtctttgaagtcacaaaacagagctcctctatttagtattattgggaagaaaacaaatagaaagagaattagtgagtcataaatcagagagcgagagaaaagtggtgagacatagagtgggaggttaacgaaagagagaacgatgaagaacaaagcgtttggtcagattatggatgatgcagagaatcccgggttcttcaagatccttcgaagtgcagatttatcgtctgaaatcatggtgattctcttaattttctcatactttatcactgatttttcttgtaagcttatccttgaaagatcggatcttctggttcttacaaggttataatgggtctctgaagtagatgtggtctcattaacttagatctgtttgttcttggtaaaattttgctctgtttttttttggtttttcttcgcttctgatttcttgctaggtttgtgtgtgaaatgatcggaccaaatcaattcatgtaaaaaaaaaaaaaacttgaaactttggcctcaatgtgcttggtggatgtgaagttttcagtgattgccagtgtaattgcatatttcaactctttcttgacaaatatttttcttgttgtatgtggtaagagagggatccctctaaacttcatcaaaagcatctcggaagaagagttatcggctaagatgttgttaaaagtgtcatggggaagttcttggcctatcaaaatttgtagaaacccaagcttctactttatggagaaaaagggatgggatcagtttttgagcgacaatggattaggtaatgatgagtttcttaccttcacacaccaaggaaatatgtgctttaccgtggacatctaccaaatagacggtaaagagctacttacaccacgcagatctgcaaccattgcttctagttccggtaaatatttcatctatgtgattgctttcttgatgcttaaggagaagaatgaagaagaagacagtgcttaatttactttttgtggttgattttgatgaaaacaggtcggaacaagagagaacaaaggaataacatctacaaagatgtgaaggaggaagaagacatagagtcttggtctgaatcgagctatcctggtcacaaaacagctgaatctacaggaagaagacaaaggcttagcttgagtaataagaaagccaaggaaactgagaaatcaaagaagaagaagatgaaggtggaaagtattagttacgattctcaagatgacagtttgtctcttgttccagaatttaccctcaccataaagaaatcatacctcattttcttggtaagacaaaaacatgttacaataatgtcaaactggtttatataaaatgtgaattacgaatccaataagaaatttgtgattcaggggattccaaagatgtttgaggagctgcatatgccaacggaggcaactatgttcaagatccatgatccggaagggaaaaggtcatgggatgttatgtataagttcagtaataaccagacaagattctgtgctggttggattcgtttggctaaagaacttggtttggagatcggagatgtttgcactttcacgctcatcaaacctaccgagatgcttgttagagtctctaaataagagatgatgaagatatgatattagtttgataactctctcaaaatctagttaatgtgttaggaatctttactaattatgggtcttattaacttgttacatttgttgtttctcttaagactttttatgttagtacaagtatacaatggttcttctatccggtttggaattacaaattctcttaaccgagtattagatccggtttgatttggtttatagttaattttaaccaatatattacaattttaatagaatccgatagaaatcttcacatcaattattaccaaacacaaaactgatggaagctcctagaggaaatctgagagcggtggctcttatcgccggcgataacaacgtccgaggctgtcttcaattcgtacaagacatttccggtctttctgcgtcgacatttttaatctctgaggacttgtttgatatctcactcattgagctctggtctgtggtctttgtgtgtttttgtttacaggaactactcatgtcaccgggaagatctcaggactctctcctggcttccatggatttcatattcactcttttggtgataccacaaatggctgcatctctactggtttgtttgttatcaattttagttctgctgagtttgaattactttcagatggattgtttttttttggtagcttgtgctacttacaagtcttgactgtttctcttaaataacctttatctaaaagactgatacacatacagacatgtgaatcttgatgacactggattggtttggatcataattttagtttaggatggctattggtgttgccaaagaattggctaaaggaaccatttggatagctgataatggaatcagaaacaaagcttaaaaatctcagctaatgaatgtttgcttttactggttttgttctcctttgtgatatatacctgagttttcatgaaaatggtaactttcaggacctcacttcaatccattaaatcgagttcacgggccaccgaacgaggaagagcgtcatgctggcgatttgggtaacattcttgcaggatcaaacggtatataatgtttttctcacctctatatatggttttgtgtcctttgaagaatgatgctagtaatttttggatgtgccttgttttcaggtgttgctgaaatcttaatcaaagacaaacatgtatatgatcttcttttttcacttcttcaatcatttaatgtttggcaaaataaacattacatttttcggttcttagattgttcatatatctctcggacgtttcaccatttatctcatcttgtctttgaattcacagataccgcttagtgggcagtattccatactcgggagggcggttgttgtgcatgcggatcctgatgaccttgggaaaggtagaaacttcttttagcctttggatatccatatggtccaatgtcacaatatgcaaattgagttgtcgaagtttaagagtaatatcacaaaagcaatcactgtagtttcatgtagttgtcatcaggtaccaagcattagttcttagattcgtgatgtgctttatcgatgttaaagagcgatgatctctttgcgatgttactgtgcaggagggcacaagcttagcaaatcaactggaaacgcaggctcgagagttggatgtggtaatgcttacaaggctaagatttctaaaaaacagaacaccgttttctcttattttctagtttccattgtgtgaagtaattcactcgaggctttgatgttgaaccaggtatcatcggacttcaatcatctgcggatgctaaactatagcttttgagatcaacggacagagccacactcagtttttcatcagtagatgtacattagagatcatcgtacgaagtgacattgtatattgacatcctgttactttttaagacatgagttataatgtaaaccagaacgtaatttccagttttcattgaaaatacatccttatagttttgatcaagagtcaaaccattgaagttaacaagatgtactgtaaaagaaaaacgaaatgaacacatactgacacagaagtagcccggattttgttttttctgatattgtaagcctccggtacagtatggtattggatacagggttcaatccagatatcttcccaggttgcagatgagcttcccaaatcttctccacattacatgatacaatcatcgactttgggcctatcctctcagccatgtgtttctgtaggaagagttgtcgcggagagaagcatcgtgtggcttgtattccatgacatatgcatgaggcaacttcaaatgccgcttgattgagtctctcaaacccatcactgcctgtttaaggaaaacattgcactgtgtaagtaccaatcaaaaggagagggagagagacagttcttcttgtgaacagttttctcacctgatggtcagaagcattgcgattccatacactaatgatgtcctcgttgaaacggacactcagtactgccccacatatgttatcagcatcatcaagctggtcgcctaccaacgcaagaagctgaagaaaacaaataaacggaagagtatttaacatgattctcagaccctaagtatgtaaaatggattataaataacattgacaaaagggtttcttttgaataaagtagaaaggtgtcaatactccaatagtagtgcccacaagaaaataaaactcaccagatcctcccagaagcgagcagatacaacttttgagaaacgtatgatccactttcctccattgcagttggcaccatcctaaaggtgatgaatttagctagtttagttggtttattgaagaagatacaactcttgagaaacttttgttgtataaaaggttccctctatatcgatgatccagataaaaacacaatacgaaaaatcaacacaggggaatacgtacctcccacaatggacgaatcccatccttaaagaaatgaagatctgttggactaggcaagagagaagaacgagcaaggtgacagtagcaggcccaaaatccttcaacctagtttataaaagccataactcagaaacgaacaagatagtatcgcaaacagcttcaacaatgaacttccagtagtatatttagacttaccgtgctgaattctaccatcttcttgatgttatcttcataagactggttccgaacccctggtgtgcgacgagtgtaccatatcgaaaacttgtactgcatcattaccaaaaatcctagagtcactgagccagtacttactcttaacaatgaaatcagttcctctaaatcaatctgccttgttctagctacaatcaataccaccaatacgaaaatcctataacatttgagctcacatacatctaaacaaattcgcaaaacctaatttgaaaacaaaaactccaacaaacaaagatttagaatccgaatcttccactactctagctataaaccgtcatatacaaagttcagaaatctttgacgaacgggaatcaaattttcagctaagatcagattcaaattgcaaatgaatcgatactaaggataaaggacaaacccgtaaaggatggtctccatccttgagctcacgagagcggcgttcctcggaaacagagtcggtaacatagtgtgacttgatgctgtccatgtttcccgagtccctgatctcatcgtctctcctatccaaaacctccatttttttctcgattagagcttcacgcgttcgtgctttcaaaagccctaaaattccaatcaggaagaagaaagaggaggagagaagaaaagaactgtattacttttccactcggtcaaatacataaaggtcaaattctggagaaaaaaaatagcatatgggccttattgggtctactaaatgggccttagtgattagttagttttaatatctcaatgattttcattcttttttacagtaaacaaaataagaaacagaaaattcaaaagtggacaaaatgtattaagtatagttgttggttattacataaactaatccaaccggaacaaaagagatatgtcttaaacacatacacatgcacctatcacggcaagattagtggtgtagtggagaaaattaaaaaaaaaaggaatgtgtgacgaatgcgatttgtcaaaaaagaaaattaaaaaaaagaatcgatttttggcgttctccatctgtaatgtaatgtttctgcaaaaacaagtgacaataaaaactttttcatggatctgagattttctccaaatctatatttgtgattgtttcgtgtagtttttctcttaaagttgtgttctttaagctctctcgtgctcaatcttacgtttccctttggtttgatttcgtgtttttgttattcgatttcacctttaacttttatctaatctcttgtttttgattttgtaaattgtaaaaagtttctggtgattctcttagcgaatttgggaaactttatctgtatttttctgtttcgccgtagatttaggatccttaattaatgaatttgtgggtttcaatattcctcgtctctgcaatagctggatcatgcttaccttctgggtttgcttacgttgacgtttgcaatcacgaattcgaggtgttccgatccgtgatcgagcaaaaatgtcctcgttctttgtatccaagccctcctatcgaggtacgtcatcattgttatagcaaaacgaatatttttatcttcgattggattaggcatgcgtttggtgtgcctttaaagtggaagaatttgcttaaatatcatctcttgaaaattcagatgataactcttccataatgtgatttgtaaggatcgattcgagccctcttttgcttatttggcatgatatcactttagagtgttgtggtcgtgacaacaagtctctttttttcagcttttggttgtggttttcactatgcaaagcttaatgagaacggtataggcttgtagcttaacttcactgatgttttacctttgctccaatgtttcttgaggtctcagaggttttttgaacgtggtagtagtttacctgcagttagaattttgaggaatgttcaatggatatagagtcccttactgtaaaaagaaagctggtggtaatatgtttgtttccagtcaatatattagtttatgatgaaataatctacttaaatggttggattgttttggttggaaaagtgtataactaatgatgtatttgtcacgatcatgcttgtttctccgatatgtgggatctctcttttctacttaagttctgcaatgaattccttttatttgtgtcaacagtggtaagctaccaacagaatctcatcatgtcacctgcaatgtattagcttcaatttctaatgttgaaatgcagcaaagatgttattgcaaagaaattaaatatgtgtgggtgcttctatatagggtgcctgtttttgtaactcaagtatcttaatttgtgttcttgttaatgtaggtagatggagacttgctagacaaactcatggatgcaaaccatggaaatgcctatatatccatactattttatacctcacggtgcccgttttcacgtgcagtacgcccaaagtttgatgttctgagttcaatgtttcctcacataacgcacctgattgttgagcaatctcaggctttaccatcgtaagaacttacttagaatacttagattattctatttacatcttatctgatatagtgaggccatggatcaattgaaccattcacaacaaatcctgggtgttgatatcccccttgcagaaataaaatgacttgaattacttgtcagattgtttagatttgccagtaatcaatccgtcttttacactgatcagtaaagtttttggcttaatgagttagttttacaaagacaggacaaataattcaatatgacagaaatgatgctatgtgtgttcattgtctcttattcttgcacgctttgctagaggctactttttagtttatttggtgagcatcaaatgtagattagttaggttattatgctgtataacccttttagccttatgaaattgtttcatgagtagcttatcctctaaaatactaaatgttttcatcatttctttcccatttttggtccatgttaattgatatcatgaatttttttgttcatattgcagtgtgttttctaggtatggtatccatagcttgccttcaatcctgatggtgaatcaaacaatgaagatgcgataccatggtccaaaggatcttgcatccctgattcagttttacaaggaaacaacaggtgagagtatgcttcatgaaaagccagactgtgtctctgtttgtactttctggttttgttttctactgtatctgaatatattagctcacaacttattaaaatcctttgaagaaaatcagttaaacttttttatatctgtgtctttccaggtcttaaacctgtccagtatatggatgaaggtgaaccaacaagcttggacactgatggaaacctgatcacatggctacacaacgggtcatctatcagagaaatagcagaaagagagccatatatggtacttgcactaatgtttctgtctttgaaactggcaattttgatcttccccatcatgggatcacggttgaaaacgttatgggcattgtatgttccgcatctgagcttgggaatacttggtgagactagccaactgtttggccgtgccctacacatgatcgatgtgaggagactatggataaaactgagactcaccaaaacaaggaacttccaagaaagagcaaagaacgcacttgcatcagtctcactaggaaaatcttcatcacaatcagcctaaaagggtgatttagaaatccttcactgtcaatgagcttagtttagattactttactttactgtctgtgagagatcctttgactgacatgtttctatacctttggagttccactgtctctgtatgtaaatcctgttttgcttcttttgtgaatattttttcttcttcttttgaatattcatgttcttggtccacttcgttgtgcttacgttttgtctatattgattatggatggtttggttttaattggtgttagagatggacacttgggtcgtgtatgtgaaagaaacttgtccaacttgtggatcactctggttcacatgttttgaagtttcgttttcctgtcgcttttgcgtatgtgtctgacagttgaatctctctatttagatattttcaacttaggaatctgcttttatttgattctatcgtttattacagttataagatttagcttcaagcgtaaactgactaataaaccataaaatcaaaatcaaagaagcaaccttcaatgtttaaagtgtagggaacaaagtagcacaagaggtgaaagaaaaaaaaaagtagagcaaagcaaaaacaaacggaatcgttaacaattactatatgttatgaatgattttttttctttgtagacttaagagtttcttaaatttgcaattgaattctgtatgctaagtgcctaagttcaatgattattgctttttgttcatccgcatttgaattttttttaatggatttgcaactgataatctaaaagctaccaaataacctaatattagtgtttttgaataattgcctttgtattttacaagtattgatttagttgattttcgacgaaaagctttcctcaaattttttaatattatcacctatattctcattacgtaaaggatcatatcaaggatgataagaaattataataagaaaaataaatgattctaggtgtttattaaatgactccctctttctacacttgttaaatgaaaacgtagttgctttttcctggaataacactaataattccgagcaagcaacctccactactactatcttttatcatttttatccctagaaagggactttaaacttgtaacttgtataacacatcacatcatcttctttttttcttcctttcgttttgtggttaatttggtaatttactttcgatgcaataaacaagccgaaaatatgaaaaacgttcatctgttaattagtaccaagtttatacttgaagcttgaatatagttatctacaccaataatttttgtattattttacaagaaatttaaatacccgcttaggtagacgtcttaatccataacttatagaaacttaaaaaacttggtacgaaagattcttcttaatcatcagctaactaaatcttgtttttatcactaaatattttattagcaatcaaatattgtggaaaatgaattagcgtgttaaccaatgggtttggttataggaaatataaaatatcaaaggagagaagggaccttgtcaaagaagacaatcgatacttcttaacgtgggtcctaaaatggcaacatcttttttttgtcatttcatgtgtgtagataagctctaatttcttacctcaccaatggttatatgaatataaaaatgatttctgtaaacaattctgttgaaattatgtaattatcattatatattaaatcactaatcaacactttatactttttaacagtgacaacactaaatgcgtccatttaagagtttcgcttttccgtctcttcttcttctttgatcatctatttaaggatctagagaaaccacttcgcaacgatgagggagataggtcactcctcaaaattaccaaacacaaattagctccaataattgcaacaaatcactctcacccaaacaaaacttttcaaaagccctaatccgagaaatcattcgacaacaacacgaaggagatggatctagaagattgggaaatactccccaaaatcaactacaagggtctcgaacttgatctcggtcatgaagaggatcatgaagttacgaagatgatgagaaacaccgcaaaaagcttcgacagtgattacttcatctgcccaattcaagattctgtcggaaagacagagtttcttcatcagagatctagcgtggtccccacacaactcctccagattccaataacttgggaacctttgtcccccgtggacgacaaagatcacaataagtacctggatccggatttctcggaaccagacccggaacttttgacggagtcttttccgtcgccgagaataaccttcaagaaatcgaaggaaaccgaatttgccgacatgaaaatagattcaccagcagcgaggttcactagtcctctgccgcagaacgatgagagacactctgactcagaaggagggttaggaggagagtcttatgatgagatcatgggatcagaggttgaagaaagcagtgacttgagtagcaagaaagaggttgattgggatgaaggtgaaagaacgaatctgtggaagaagggtcttaatggaattggagctatatgttcatttggtgttgcagctgctgcagccaccatatgtgtcttcttccttggacacaacagtagcatccaaggtggtcggaacaagaaccagatcctcaggttccagatttactctgatgataataaggtaaaaaatttaaaatatgattcttgttagaagtcacttagttaaggaaaattaatttttatgatacgaaatacactaattttgataactgatatatctgattagttctactagtttagttagatgggtgtgtaatctcacatttgacttatgccgtcttaatcagatagcattaattttaaaattggttcccttttttttttttatcaagcaaattggctcctaatgcacgaaaacatgtcactcatttgagattttgatctaacagggtaaatcaagacaaattagctattaagtttggtttgcttccctaattgttgttaaagttagatctcaacttatacatattcctgtttgattgattgaatagtaaagttgtttgtgtctttgatacaacgaaagtgataaggatgcgtttggcggtgtggcctattacgtgtcttagtgaacaatcaataattgtagagaagattcttattttgtctttgtacgttttgtgtttatcttttcttgcgtcaccctcacactttgaaccaaaacacgtttatataataacgtcattgttccttgcatatcaataatagctagagccgcctagagatgtttgggaccgagttagccattattgatatatagatttatgattcaaagtcgttgatgtgtgattggttttaaactcgttattgcagcggatgaacgaggtagtgaaacatgcaacaaagctaaatgaagcaatctctgtgatgaaaggtcttccggtggcaagagctcaaatatcttttggaggatactacgatgcactttgaatcatagccatatagccatagatccaatgtcttctgcttaatcgcctctatagcttatgtatttacgaatttaggaaattcaatataaataatggttgtgaaattttacattctttgtccgaatgcatactacatactggctaagccgacgcctacataggaccagggcggactcaaaatatcatgtactctgagctgggaaacatatataggccttattttctatgtttttcggacaaacaaattttggaccctaattttaacaaatgtagttatatataaataaataaaatgtggaccatgtgcatgagcacctctagcacatgtttggaaccggcactacgtacgacaatacgacatcaagttctagcgaacgatgatatatacttattaagtcgttagaaaatgcaataggtaaatgatatatatacaagaacaagaaaaacaaagataatacacaagagagtataaacttagtattttgctattatgaataagtaaaaaattatgtatttaaattcttgtgtcagttgttcggtcactatacaaattcaaacctaatacaacataaccatcataatacaacataattgatgtatagaaaagtgctatcatcaaaacgattttaatggtgcgaaagatccacaattaaatagtttacctaattgtttcgatgtagagagtccaaaattttcgagaagtatcacagttcaaacaaaaattcaaagatgactaacaaatctcactttaaatttcaaatgtaaatgcctacaatgatgtagtttggtgtaaaacttactaaatcttttgataaacaaaaacatggatttgaacatgacacaatgacaacactaattcaaatcactagcctacatatctaagggtttagttccttgcgcttgcaaggtacatcaactgaagaacaagcccaataatatctaaaggcccataatctaacccaccagttaattttaacggtcctccgtcaaagtcgcctctcttctcctccaccacttaacgtcagtggtccgtttgacaaacagacctgtgactgtgagtgaagaagataatgcagactcaccttttggtgggacctatcccactcaaaggctaccgtcgattctcttcctcctccttctccggcgatctcctccctccgtcgtctaaccctatcggccgagacctattccctcaccgtcgaaggcaccgcgacggcaaatctcggagttaccgtaatcgctcgaaaacgacgattactagtgctgcgttttcttcaagttctaataccggcgggcagaatcattacgctgttttgggcatcgctcgaaacgccacacaaggtgacatcaagagagcttatcgtttgctagctcgaaaggtaaagaactaaggaaatgctcgtttagtaaatttctctagttttgcatcgtttggtttgattgattgttgcgttaaagatgtgaaatttgcaaccagtatcagaagtagttgagaacacgaccaatttcttctagcaacatgatttgggtaatagaaaagtttaaatcttgtgtttgtataagttagcaacatgtgtctggagtttggtggaacctgttctctgtattcttatatttcaatttagctcttgctcacttggatactgaatgaataacctgttctctgtatcccttagctttgtttgggttatgtttgtgactgtatccttgtgttactattgcagtttcatcctgatgttaataaggactctaaagccggagagctattcaagagtgtccgttgttcctacgaagtcagtattccttctcaagtgtcttttttccttctatgagagtgttgttgttcttggaattcaatgtaacatcaatagatgaaatcttactcactttacctgtattgtttttcaaaaggtactatctaatgaagctacaaggactcagtacgacagagcacttaaacttcaagaaaattcccggttccatagagtgaaaaggcacagctacacccctgaggttgaagatgccatgaagtattactacacctggtctgagaaaagacaaagatccagacacgggagattctatggacactattctacatatccaaactcacatttctacgctgagaccgagccgcaagaagaagaaggagtagaaacagcaccagaccagcgagactcatttgttgaagctctcaaatccgccttcttatcgatgtttcttctatatacattcggttgcctagcatctctcacatttagcacattcacagcgttgctcgacaaggaactcgacatgggttacaaagtcggattcatgatcgcttggatacttggcggaaaaggcggtatccttcttactctctgcttaacatttgcaagctggctctgtgggaaagcaagcagcagcgtggtggttcttgtgttagtagcaatgtgggttggctctaatttagctagacatgctcctcttccacaaggtgctcttctcaccctcctctacatgtcaatcaaacttcaagtcgactcaacctgaatcttctgtaagtttccactacgttttagattgtaaatagctaagttacattatttgtatcctatgatttgggtcttggagaaaaatgattagtagtaaagagaagaaattgcttgaaggttacaaactctttgttattctttttccaagattacaaatcaatgaatcaaaagttacaaaattcaggagaaagattagaacaaatgaatactaaactcgtaaagtatcattattattgtttcttacactttctgcacaaagaagaaaccaaaaaaaaaaagatgaaatcttttcgtattcgttcatcatcatcttcattgagatttctctctcatttccttgagattcctccaaaggtatcttccgctagccatatcgacgaacacccaaaacccattctccatcttctgttaaaatagcaattcaacaaagaaacagagaaattagaacaaatcaccagaaattaacgaaaaaggaacgagatttatgcttacctttttgagattgagttcttgtttctcattcaattcgtccggtgaatcgaattccggcgaagaactcaccgtcttccatgcgaaatatccggcgagtacagctgagaagaacaccaataagaacctcatcggacacatatttttttgaattggaatatgatctcaatgtgtgacgaagaatgagaagttttagggttcgtaagattctgggaaacgaagaattgtgtgagagaagagagagatatagagaaattataaagggggtgagattgagattacatgtctcccctctcgccactacgagaaaaaggaaacgcgtttctgaatctttcagcaatgaggaaaatttaggaattggtggtttgatatatacgtcaattacataaagacccacagtgttttccatatttataaattagccccatttcttttaatgtttttttttttgtcaattttcttttaatgttttataaaaatcctaatttctacgagaatgtcatgagttgaaagaattttcacccataatgttgaaaatttgaagcgaatttttgaattaaattaatgattataaagagtcactattaatgggaaaagtagaatttagattcttacgtgagaaaaaataatttgtattgttatgttgtgtttcttatgctatatagcttgtttttttttcttttccaaatagatatagatttgagaagaaaacaattgagaggtgtgttgagttaaccatgcaaaagttagggggtctaaatgagatggttattatattaaagggtaaaagaaagccaaaataagtaaatataatatatgagcctctagaagaggctgacctcaactaccacttgagtagttgtattattgtatcatcacgtatgatgaagattttgtcaacgggacgcaattatagaattgaaataactcttctaaaatagtctaattcttttttgtacaatttaaggcgcattctagaaaattgtcaatgtcatatgtaaaagagttagttatttgtcatatcgattgttatgaatgattatgtttggcttaatgtaaattcttgttagatcaacaaattaatgattatttggtagaacatcgggttcttcatggcagaatattgtacgagcaacatctatttgaaaaagcaatttcaaccatacatggaaattttcaaaaggtagaggtttaaactttaaagcttccacgaaactaaaccctattgctttgtgaataataagtttaggatattacttttgtaccaaggaaagaaggcaaccaaaaaaaaaaaaaaactaatttatgtgagcgtttaattcataactaaatggagattagagcttaaagttttggatttagggtttagtggtatccgtgcttgtgtttaatggcttctcatatgatagtattagtaccttatgagggaaggttagccatagttaatactagaaatttctcttctactgagctatgggttttttgaaggatggagacagacacgaatggatgcataaacactttgttttacctctttctgggacacacccaatacgaaggaaacatctacatttcaagggtgttagtgatgctggtgtgcttatttttgcttcacagagtttgtctaaatcgttttatattctacattttaggcgatgaatttaggtgccgttatggacttgataaagacgacggtttatacaacatgtatttttttccaaaccacatcgagactcttgtgtctttctaaagcagcgccttcatagctcaatgatcagtgaaacttacttttgatgcaacaattataactctttttatatctttgatttttcttgtgttcgttacttgatcattcctttataaattttttgcctttagtgtttgtaatctttatttgacctttccttgatttggtgtgcctttgtatattattgcataacttcaagtcccaacataagtttctgagttgtataaaggtttggcaaatcagaaacagaacttcttctcttagtttagagggtaagatagagaagaatcattacaaaacatgaagaagataaccatgttgcttgctccacaatccatcaagattaacatctgtaagaaccatatgaaattctgttcttggagatcccaagttgactttgaagcatgccctaatgagctttgatctcagatttaaaaagtagaattatctaaatttggaggatgcagaaaatcacaaacggtcaatacaaacacttttgttaattacccttacaaaaaaaaatggaagttgaagggttgtatatctaaaactataaaatagaaattatgaaatattaatttggataattacaattaacataatttgtttttgccttttattcttttcaagtttaccttatttctttctaactcaagtttacatataatttgatttttccatttttccttttcaagtttaccttatttctttctaattcatcttatatatttagtagtatagcagacggaagaacaaataagcgttaacttaaagaagacgaacgaacaaattaggtgaattttaagaaagcaagattgtggaacgatcggccatggacaaacaagacgagaagaagcagggaacaacaaaatcttcatctacattgacgacaagatgctcacatggtaatcacatatctcagtcaaactcgattcctctcgacataaccattgagatactctcaagacttcctgcgaaatcaatcgtcagatctcgctccgtctctaagctctggtcgtccattaccaccacaccagagttcatcaagcatcggtccaagaagacatcaccaccttgtgttctactaatcttccgaaaacacgacaagctgatcgttttctcgtctccccaacaccagaatacttattctcatgtgcaagattatcacattgaaatccccaagaatggtttcatccgtcgtcttgattccgtccacggtttgatctgcttagaaggttctaaacagctcgtgatttgtaaccctactttgaaacgattcttccctttacctgagcctcaaggcaccggtgacgaatacaacgtaggagggtttctgggatatgaaccgatagagggtaaatacaaagcattgtgcattgtcagaggatggaacactcaagttcttacattggaaattcaagaatcatggagagtaaccaaacctggctatacacattggcctactaaagatactggacgatgcattaatggagttatctactataaagctattatatttgatagggttccaaggcatgttatatttggctttgatctcagatatgaagagtttacacatattgagtttccgatgcgtaattatgaccgctttcttatggtatcttatgagggaaggttggctttgataagttccactagctctgttgttgaaatctggagtttggaggatgcagggaatcgaaaatggtcgtatgaacagtttcatttatgtcttcctcccaacacaagtctgaagggtgttattgatgctggtgagcttatttacacaggatttagtttgaatagatcgttctgtgttgtgtattttgatcctaagaaaaacaatatcagagaaaccaagtttcaaggaattgcggataaccagatttggcaacctgatagacttggatttgatcttgtgaatgacttttatgtattaccaaatcacattgagagtttcatctcgttttaagagatttcatctttttgcatggaatgacactatatatttctgaagtgttcttcagatctttttttgtatccactgattgattgatcccactggagatcccaatatgttttaatgatgatactacatattctagagacttaatagaaactttataaaactatacatggagagactgtaatatgtgtttttgagattgaacctacgattcctctgttctgtttctagcaatttccatgtgatccttttctcaaaaatagaaaagagacttttgtcctaaagttaaacaagtacagaagaagtacttgaaatcttcactcagacgattagagcttagagcatacgaagattagccttagttacttgcagtatgaattcaacattttgagacatggatctctgtaaaattgaccaatatagtggttttattatggtaccttatgagaaaagattagcctggatagccacaaattcattgatattggaggacttggctaaatttgggcgctattagtctattactaatgctagtgaatttattgtgtcatgaactttgatattattagcagttttaagagccctcaggacaataacatttggtaatgaatgtaataacatcccttacatattagtgttataacactatctagtttactctcaatttggatgtgagagaccaataatcataattcataacaactgattttgagaagggttctgttttgttttccaaagaatgacacatagctaattatatatgcaagtttatgattctctgatagattcttcttgttatgattatccgttcacattgaagggctttgtcataatttgatttttctttagtttgaatatatcgtaagtcctaaacatgcatgtcttattaaacaatgtgggctctgctctgaagactattgcctacatttatgctatctactcaatcccttaggagttatggcatttagtttccagctgatgatatgtagaacattcataagcgagctcaagattctacaatacgtgtataaaagatgaagcctaagctactactaggctgcatcggtcaaaacacacaagccttgtctttttgtttctttttcttacaaaaactttgtctcctacagtgacttcaccaccaacaccatcactgacaaacactaataatgaaagaccaaattcgtatcacagaaagataagactgaaaaatcaaaatgtttcaatagcattagcctccagaagaaataacaacagtcgttgtacttgtatcctagctaaaagcaaaatgtaattgatttattgcgaattaaactctatcttgttacaaactttaacaaaagttttaatattttgaattccgtacatgtaaatggaagcatattaattgggaaaacaaaagaaacatagtggataagattgtttacaagtcaacacacaccaatttagaaaaatcaaagaaatcccgatttgatgcgaacatgacgacgcaaccatatctctccaaatcaaaagattatgtgtgtcacattccccactaatttcacttatatctagcataagatgccatataatatacatgtagtatgtaacgttttgagaatgttcttattcggcgagattatttttctgacaatacatagcacaatgtttagttttcccaaactatataattggaaaattttccaatgacatctcaaatatgtcgacatatccaaccgtaattccgtaaataggaacaaaaacatccaaagaatttaagtctagttgatctcaaattttaggcaagttgcaaataaacacaagtatattttagttgaattatacaactaaactcaaaagtacatgttgttccagaaattaaacagatagacagttagttggtaaagatttaattagttgattcaaaaaagaaaaaaatttctcgagttatcttaaagtatgtttgtcttaacttatcaaaattatatctaaaacccacttaaaggcttaaaccatgattattgtgtcttgtctttttttgtaattaaattacttaatcagctccaccgtaatcagctggacctccactgaatcttacccaaacatatcgatcacgtgcctgtgtataaataaatacatacacacttaacaagttacaatcagactgacaccaatcttcctctttaacagtcgttttattacagcgttctgatcaaaactccagtgaaagttcaaagtacacagagagaaacaaaaaaagaagaagaagaagttgaagaagaagaagccatgaatgctttagcagcaacaaacagaaacttcaagttagctgctaggcttcttggtctggattctaagctcgagaaaagtcttctcatccccttccgagaaatcaaggttcgcaaattttcactcctttcttaacctaattaaccttgatccgctgattttgtgccttcgccggcgccggagacgattcgtcgcggtggattgtagtgaaaaatgattactgaatgtttaggggcatttcgaaacccgacccgcttttttgtggatccagttacttcaatccggttgctgaattatataaccggaacaaaccaatttaaatcaaccggttctggtatttttgtaggtggaatgtaccataccgaaagacgatggtacactagcatcattcgttgggttcagagttcaacacgacaatgcaagaggtcccatgaaaggtggaatcagatatcatcctgaggtttttgaccttttgactttgaccttttgaaccaaaactcaaatgtaacaaaccagtatacaatttcggttttggtatatgatgcaaaccggttatcgttttcttgcaggttgatccggatgaagtgaacgcattggctcagctcatgacatggaaaacagcagtggctaagattccttacggaggagctaaaggagggattggttgtgatcctagcaagctcagtatctccgagctcgagcggttgactcgagttttcactcagaagattcatgatctcattgggattcatactgatgttccagctccagatatgggcactggtcctcaggttcttaaactctcttcagaacgtttccaaaatgttctgtgtttttttttgaaaccatctttcaactttttcccttggtggaatttgcagacaatggcttggattcttgatgaatactctaagtttcatggatactcgcctgcagttgtgactggaaaacccattgtaagtaaagaataatcacaatcttgttttgctaatgactggtttaaccacctgaatgtttaatgatgtttatgaaccaggatcttggtggatcgctagggagagacgcggctactggaagaggagtgatgtttggtaccgaagctttgcttaacgagcacggaaagaccatatcagggcagcgttttgtcatccaggtgacctttcttttattgcggtttcctgcgagccaaagaaacttttcttattctggtttacatattggttcattagggatttggtaatgtgggttcttgggcggcaaagctgataagtgaaaagggtgggaagattgttgccgtgagtgacattaccggagcaatcaagaacaaggatggtatcgatatcccggccttgctcaagcatactaaagaacacagaggtgtcaaagggtttgatggtgcagatccgatcgatccaaactccatactggttgaggattgtgatatcctcgtccctgcagcacttggtggtgtcatcaacaggttagagcttttttttgctacaaaagcttacatattgttttgaaactttttaaaaactattagttggattttggtttgaagggagaatgcgaatgagattaaagcaaagttcatcatagaagcagctaatcatccaactgatccggacgcggatgaggtttgattgtcttcttctttgactttggagtttctcattgcgaatctctgtaatggagattcttgtattacagatcctaagtaagaaaggtgtggttattctcccggacatatatgcaaactctggaggagtcactgtaagttacttcgaatgggttcaggtatgtatgagtctctcaacaacttacctttgacagaccaagtactcgaacaaaaccgattttgatcagattagttgtttccggtaatgtgcagaacattcaaggctttatgtgggaggaagagaaggtgaacgatgagctaaagacttacatgactcgctctttcaaggacttgaaagagatgtgcaaaactcactcttgcgatctccggatgggagctttcacactcggtgttaatcgtgtggctcaagctaccattctcagaggctggggagcttaaagattatctaatctcttatgcaatctctttagcagctcctgaataagaattgagccaaactttaatctactttttgttttatcctcctactttggcttagaggtcatcctgagttaacagatatgtgtttacaagtactagaagacgcttctgtatgtaataaaaccttggactctaatagttaatgagcttttttactctcttgttaataaaaccaaggtatcaaaaaactagaaccaagaaaacagttatcatcaatatggttcttaaaaaaagcaatttaaagatagcttaaggctatagaatatgaatctaggccctccctcggcctctgaagcctccacgaggaccacctcttggttgaaaccctctgctagcacctctgggagcacctctacctctgaaattgcctctaccacggggaggccctctaccacggggagggactcttccttcaccacggcctcctgattgtcccctgcaagaagaacagaacaaagactttcgttacagactttttctaacacttgaacaagtttcttctactacttcaagggacctaagaattggtaacaagggttaagaagtgtagcttactttggttgaggaaggaatcttgatagaggtaaaagcttctcagggctaatgaagaacttatcgccttgactatatgaggtagctacaataccttccctcattttgatagaaaatagctgaaaaagtaagaaccaatgctttgtatattagtgagcaaggccagtgaacgaagaagacaacagagagagagagataacacatacagattcattaataggaccaaagatttcatctactctcccaatctgggtcttgttttgtaggtagattggggcattgaaatgtgggattttcacattggagagcttgaacacagcatctccctcacaagcatggagaaaagttgcaacttctgtataacaccaccaagaaagaaactctatcataacagagacaattcacaagtttgttccttttcaattaacttcaaaactgtcacaagaatccaacaaaatcctaataacaggaaaacaaatcatcaatcagaatacaaaaattttctttttgtcaaatttcagcaacaaacgctcattaatgtcaaagctgacaacttttttcaataatttttatctgcttgattggtaagaatgagagaatcgtcaaagagggttgaaaacgaaccaacgacttcgctgggaggtccttcgtcataattaccaccaccaaagcgtccacgtccacgtccacgtccacgtccacgtccgccgttatctcttcctccccttcccctgaagctgccgccgccacgtggtggtctcatctttttggttttggtttcttctatcgctctctgctcctcagaggtttttatttagggtttcagcgagggaagcaattgccaattggagtgttgaagaagtagttgtgactcttaataacgaaaagaaaaaaaagaaggtaaaccactagggttttcagcaatcccagaccgggttacgactcgttaaaccgggaagagataaaattttcttttagtaaatttgtcaataatttttgtaaaaatttaacaaaagatttgaataacaatgagatattattttatttatttatgcttatgtcggtttaagtttggtttggctttctcacatttcatttattttaaacacttgaaagttgaaacaaagactcaaacaaggcaagtgataccaaaaagtaagcacacttgaaggcttaaaaagccctcaaaactttctattaaaactaattcaacttctctgttaccatcttttctatccttttatacttctacatacatacgaacacgcatccatttcattacatttaacaaacaggttgcgttaccttcttgatcgtattatgatccttatcctccaattgtcttcttggctttcatatgatgctaagtacctcagcaaactgtcctcccaaagcatattgatgcaatgtacagatttttcgcccatttttcctgcaaaatcaaccaacaccgggcaggtcctgatcagtattatggaaacaaagcaaaagtccaatctttgttcaaaactaaagaaacccaccttgacatgagtgcttggaaaggcggtggtgcgaagagtctcttgagtttcatccatcattttacgttttggtacgcttaatatgaaagctgcttgatctgcagttgctgccattgatgttatcctatacccactttcccacctcctatgtattccatcgcttgggtacaaaaagtcgagctccacgaccttttcacacaataccaaccaagagtatcaggaaaaatgtcaaaatgtttaaagattatgtcattctaaggtgacgggattgaaacctacctgatcagagtagccagaattcctcgacattaccacaccccaacgattcccagcagttgtcatggaggttacatggaaatcttctttccatttcttgtttatccacttgaaaggaaaagagtcgctgactttgtaagattgctgagtataagacgttcctaccaatttacaacaagcacaaaattagtaaagaagactccatgttatatggttataatgaaagtacgacattttctatagtcaagtgtttgtgtgacataaaaatttgcagattactaccattaacaccaaccttttgacataacaactaatgagttcccgttatctgaaccagctatggaactgatatagtagttcttttcccattgttccataatccagtcctgccaagaaaatgcaaatggtgagttaatataaaattgattgattcctatatgcttcaagcgattattaccttgtgaaggaagacagttgacaattcataaacttgagaggtgaatccagtcccagcatccattatgagggcccagagattagctgctgatgctacacagctaattaaaaggccatcctcattacccttctgtacatgctgatgcaaccttgagtctgcaacgttgtagtgatatctacacaaataaaaatggcattaaaccggggtgagaaatttgattcacgaaggttttcgaaacttttaagtgaatatgcaacttttacctctgtttcatgggacgacgagcattatagactgagatccactgacaagcaggactgccaattctgattttcttctttggctgttcatcctcatccaaattaagaagcattcttcctcgtttttgcccaacctataaaccaacagacccaaaatcagcattttcagaattatttataacaagtcgaataattaagcataagaacgagaaaaaagccagcaaccttaagagcaccatcaattttaattggtctagatagtgcacattgttcaataagagaatcaaaaatcgaaataagctttgcatagttgggctcttcgtcaaacttcatgtttgtaactgcctcgaggaagagcttaaacgggggtggacaaaaacagcacatcaattcaggagaagttgacatctttttcttgcaaacaagaaagctcttgttgtcaccctgcaaaaaaaagtcaacaatatatacataaaactgattgcaattaatgaagaatatgaatcagacataattgtaaggttgtcaagagaaataaaaaacagacctgatatccttgccatggcaatcttcccttcaaaagaaaaattaaagtataagccagcgactccagatcatctctcctacttccagttcgacctaggtgtgcatgaacacttgcataccttatcgttcccctgcatttgaaacataataaacatgtaaacaaatatgaataatataaagaaaaagaaagataaactaatgaatatacctgaacacatcaggtctttgatcatattcaacatgctggcctgagtgtgaatctttccatttagatgctgaaacaacagaagattatgtgaacattaatgccaacatcaaagagaagtaccaagttacatatctcataaaatattgcagcatcagagagaataaagttcttcataagaatacactcacccagaccaagatcgataaggtagagttttttctcatctgctgttcctggttgaccgagtaaaaagttttccggcttcacatctccgtggacaaacctagtttgatatggggatggaacatagcatgacaatcagtacagtgaaagataatacattgtaattagttaaagcgaaatgaatgaaactatttgcaaagaagttacgaaaaaatatagtaactaaccctttcatatgaagtttctcaagaatagatatggactcaactgcaatgcaggctaccatgtttggagacatcctgccacatgacacgaacatgaatcaaatcaagaatcttgcaatcagaaggaagtgtggtgagaggagaagagtgcttacgattgccccgaagaattccaaacatcccagagactcggaccaagcatgtccatgacctgaagtatatattatagcattacttgtacatgataacacaatcaatatcgaaagtatatttaacaaagctcattgtaaattacatacaagaatgtaaaaatctccttgacgacccttatgatgtaccgcaggaactccatagcaaccattgagggtactttacaacaagaagaaaaagaaacagatgagatgacaaataagttgatcagagaaatttggcaggaaaatttacatagaatgcatgcaagacttacttgtacacttgccactcgtaaggtggaccaaaattgcatcctttgctatttcgatgctcaaatttcagggccacctggtaagaaaaataattaatttgttaacgattagacttctttcgtctgtatccctcaaaaatctcaagtatgcttctttacaatatacctcaattgcatcggccccaatcctatcgctgccaccactcacccttctaccaacaaaaacttgaccaaagcctcctttaccgagtttcctctcagtcttatatacaggagaatttccaacttgtacctatacaagtaaaatgaaatcaatatcagcatctctctcaaatgaaaaaaaaaacttgtgattgaatgtcattagcataaattttaccctttcagggactggagctgtgctagaatcttcttccacaccaactaccttctctgcgctaccaccttccatagcaatatccttttcagctaccgcttcaacttgattaaaagcaggttcacctactgctggacgaacttcacaaggttctgcctctaaatctattaatctgatgcctcgacccctaccgacaccaccagctggtcttggaggtgcagcacctttggcgtttccccttcctctaccaccaccgcctcttctccttgttacaggctgaggaggaagttcaatattatccgcctgaccagtcacctgagggctaggttgtctcaatctacgtgctccacttcttaactctggcattcttactccatacaaagagtaagaaagtattttgctttcagtaaacctctttaactaacctgcagtataaagagaggtagcagagagtacgtatttagttgataaaaaggtgaacccaaccaatttcatttgcatttccttcacaatccaaaagaaaagacaccaatccgttgtgttagcaagtaaaaatacaatcaaaaagaatacaagaaacattggcttgcacttaaagcattgtctttccatcaaaatcactttccaatcaaacagataaaaacaatcaaaatcacagtcatctgcaaccaaattcagaccatacactcatcaactttggttcaagagtaacaaaatcatcgttactctcgagaaaacgccatcaaaggctcttcgatgatgatgatgatgatgaccaacacatcaaaagaatctgtgaagaaagtcgattcactactcaagataccaatcagaaaccatcaatacagattctcatcttcacagaaacatatagattcaaaagaatagtgtaaccaagcgacagtttgatacaaaaacacgctccatcatcacccaaaaacaagatctttccagataatcaaaagagaaatatatgaaacaaagcatcaaaacacaacaaccaccacagaataaaaaacgagatgtcaaaaacattatacccgatgaacgatttacgattaacccttgaacagaaatgatgatcggagtatgataacgatgaaatcgatccaaaaaattaaaactttcagatctccttggaaatttcaaaatgagaaaccgacggctttctccaactagggcgatttaaatgtaagaactttctagctgtgataagcacacctagaaaatggagataaagagagagaaagattcagtcgttttaggttataaataatgaagattgaaggagatgaagaagatgagaggaggtgcagatttggggatgaattctttttttttttttcggtccaaaattttctttttttctttggatggattgatcaactttagcaaaatttctggcaaatatttggtagatttttattttattttcattgctttaatttatgaataaatctatattttgaaaaaataaaaagcttgtagacttctcgaatgtttatggtcttaatattgctgcttgcttcgttttgctcgcatgaatttaaatttgttaatatactaatttaatacgttcgtacgtatacaatgggacttgtatgttgttccagtaaggcgcacgtgtataagggcttaatgtaaaatccacatcctttgtcttgtacaaatcttattataaagaggattatagtgtaaaatctcgattgtttaggcatgtgaatacaatatgaaccctcttcggtttggattacaccgataaattcgaatcttagatcgaaacaaatcggttcgagttttccggttcaatttaaaccggaattgcccattgctaaatttctgtccaacgccaacggtaacgaaattgcacaagtgtcgcagctacagagcacacaaaagaaggagagaaagatgacgtcaccgagccatgcctctgatcgcggcggcggcgacggtgactcagtcgagaatcagtcccctgagctcaggaaagatccggtaactaaccgctgggtcatattctctcccgccagagccaagagaccgactgatttcaaatccaaatctccccagaaccctaatcccaaaccttcctcatgcccattttgcatcggtcgtgagcaagagtgtgccccggagttatttcgtgtgccagatcatgacccgaattggaaactccgggtcatcgagaatctgtacccggctcttagtaggaatctcgagacccaatcgacccaacctgagacgggaacaagtcggacaatagtcggattcggattccacgacgtagtgatcgaatcccctgttcattcgattcagctctccgatatcgatccggtgggtatcggcgatatcttgatcgcttataagaagaggatcaatcagattgcgcaacatgattccatcaattacatccaggtaagcattatccatagatcccaatgtagtagctctattagtgtgaatttatacattgtttagccgtcaatacttgtgttatgtgtggatattttgtgttgcttgcatagttacattcatctgctacgtttgttttcgtatgttgaaggttttcaagaaccaaggtgcgtcggctggagcatcaatgagtcactcccacagtcaaatgatggctctaccagttgttcctccaacggtttcttcacgccttgatggtactaaagattatttcgaggagactgggaaatgttgtctctgtgaagctaaatcaaaacattttgtgatcgatgagtcgtctcattttgtttctgttgctccttttgctgctacgtatccctttgagatttggattattccgaaagatcattcttcccacttccatcatctcgatgacgttaaggttaccttttactgatctactatgttccatttatggtttggttagatgatcacctgactcactttgttttgatgattatcaggctgttgaccttggaggacttctgaaactcatgcttcagaagatagcaaagcaacttaacgatccaccgtataactatatgatccatacttctccactcaaggttacagaatcacaattaccttatacgcactggttcttacagattgtacctcagctttctggggtaggtgggtttgagattggcacaggttgttacataaaccctgttttcccagaggatgtagcaaaggttatgcgggaagttagccttacttgaacccggttttttagtctcaacctaaagttcagctggaagtgattagtgttgagttattggcctaatgtgcaagtctctaaaaaacactattcaattgtctttttctcctctgttgaagaggaagatgtttcagcttgattcaaataacactgatgtaaacaatgcatgtactgtagttctttgtaaaacaagctcatatcagggcattaagaagattctttgatcaatcagcttttaaattcagcatcaaaccaattaacccgaacaaaaccactaattcgaaccaaaccagacgatgcttgacggcgtcgtttaaaatgtttttaaagggcaattttaagagcttctttctcaaaaactcgaagcagcgagtgaaaaaaacacagagagcttcctcacttgcttatagcttagggtttacgttcaaggcgtagatcttcgtcggaaacaatgggaatctctacgcagtctcatggaattcaatcgatgcttaaagaaggttacagacatctcgctggtcttgatgaggccgtcatcaaaaacactgaagcttgcaaggagctttccaccattacccgcacttctcttagccccaatggtttgcctctcgtcgtcggattcgaaatctatcgtttctgtaatgttagaatctgtttatgattattgttctgatttaggaatgaataaagactgagccgatgcttatatgcaaagtgtggctaactatggtgcttataaatggcagattataatggctaaaccagcaggtgggccgaggagagatgcagctgcagcagccggtgcaggcatggacgaagactaagctgttataacaatcacctcttagcctaacaactcttcttctatattcattagtttcttttttcatctttcttagaaaagtttttcttataaaagtttaatctttcttctgcctgtcattggttcctctcaacatttgacactgaatagttgtaatgacaaagttttagttgggttttagacaaaaatgatcaacattctaacaaaacaatataagaactagttagattctggctctagttctcattctggttacacagtaaaattaaagatggagataacctcccttaagtaaaatgtactagaattttgagaagtccaaaatcttaaaccccgaacggcgtcgcttagcaacactaacgccgtcgtttagcaacactaacgccgacttgttcagttccacagtcaaaactcaaaacagagtacagtcacacagtcaacgaagatactaataagtcaattttcgtttgaccaaatttgattcttcatggcttcctcagtctcctctctcgccggacgagtcgcgatagtcaccggttcttctcgcggaatcggccgagctatagccatacatctcgccgagctcggcgccaagatagtcatcaactacaccaccagatccaccgaggccgatcaagtcgccgcagaaatcaactcatccgccggcaccgttccgcaaccgatcgccgtcgtgttcctcgccgatatctcagaaccaagccaaattaagtctctcttcgacgcggcggagaaagcctttaactcgccggttcacatcctagttaactcagctggaatcctcaatcccaattaccctaccatcgccaacactcccattgaagaattcgatcgcatcttcaagtaatcgaaaaaactttatagttaatttcattgtagagattaagaattaaaattatgattatcagtgttgtttgttgttgtttagggtgaacacaagaggatcattcttatgctgtaaagaagcagcaaaaaggctaaaacgtggaggcggtggtaggattatactgctaacgtcgtcgttaaccgaggcgttaatcccggggcaaggagcttatacagcatcaaaggcagctgttgaagcaatggtgaagattcttgctaaggaacttaaaggtttaggcatcactgcaaactgtgtatctccagggcctgttgcgacggagatgttttttgacgggaagagtgaagagacggtgatgaatatcattgagaggagtccttttggtaggcttggtgagactaaagatattgcttctgttgttggtttcttagctagtgatggtggtgagtggatcaatggacaagttattgttgctaatggtgcattcctcaaatgaatatggattatgtttgtttatctgaaagttaaagtattgaagtagtgttctaatcaataccattaagaagtttgaaactgcaggattcaaattgcaatttagtggtgacacaagaatcagcaatatactacaatgcataaacaatgctaaaacaaccaagaagcaaaactggaaaagctcatagtgctgtaaagagtagcaacatactcaccagagagaagctgataaaccggtggttatgatcactatgtccggatgttggatctccgatttgaataggaaaattacactgttctcgagaaatattcctggtagtgataattgcaaggccctcaaagtcacaagcctctgccttttgattctgtacctgaaaatacatgttgaatgcatacgaggcattcccgacctcatcaagattaccacaagaggaaccatagcccaaagctgtgcagtcggagaaggtacatgcgtagtttacgttatccccgagctggttagtgttgttgctgaaagtgagggcattagggttgaacatacaccactggtttcgcaagtactgaacattttgagctccggttaagatcttcttctgacctgctcctgacaaatccgctggaaatttcggttggccatcgtatttgaatatcccccagtgacgttcaaagttaccaggagctatactctttgcatcttcatcgatgaatccaaagagataaacttcaatgtaacccggacgcataggtgttcctctgttggctgctagctttggaagcaaacctgtgtagaagcgttctgcgtttgggatgttagcattcttgtcaccatccgttggccaaccaacttctccaactataacagtcatgtctccatgacccaaagctttaagtgaagccaagagggtatcgaaattggcgtcgaaaacatttgtatagataacgccgttatcgctgacagtgttttggccattgaagaaggcatagtcaaaagggaaatcgctgctaaggtaaagacttaggaaagggtaaatgttgacagtgaagggagctttgttatgagctaagaagttgactattagtttcatctcttcaaagatgtcttgacggaaacttccggcagaaggaactggattttccagcggagaattatagacgtcagcgtttaaaggtacggtggctttgatgaaatctccaactccagcttcgtttaatgctttttggatgttgaagagtgctggataagttaagtttatgaatgatccattataagctgtcaaaaacggctcatttccaacggcgacatatctgcaaagaaactaaatttagctccaaaattgaagaaccttcgatttgtggtgaaagatcaaaacttgtttacttgattttaacatcgtcattgaaacgagtgatgtttcttcgaacccaatctttagctctgttataacttcccatggctttgagctgatcgttagggattgcaaccataacttcgataccagagccggcaagagctaccatggtgtttgtgtccgcatcgaaaagcttcacttttttgacgttgttgtcttttaacatctgtaccaccgtctttggagggagctggtgagttgacatcgttccccagtttactcccaaggcggagacgtcgccggataataaagatactatggtgatgcagaggaagatgccggcagtggtgctctgtttccgtcggttactcattttggatgtattctgttttttgccgcttgtagaaaaaactgatcaagttttgggattttgataagttatcggtaatgttttagattcgctttgcacgagtaaaaaactggttgttgtattgttggtttaagctatgagaacaatcgaagagaagttttgaaacataaaaaaaaaggagacaaaagaataatacgagtaaattttgtcttgtttctgaagtaactagtaagatacagagaagaagtgatatatcatgacataagagtacaacaatgtggatctatggaggtcatattcatatgatatgaggttattaatctatgtacatatttttctttggtcggtctttattacattaagcaaaaggcaaagtgaattgcttggggtctaagggattgcctgattggcacgagaaacgatgccgttcttcaggtcaaatcccgaaaacgacactctccacgtgcttgtaataaccaaatttcaccgatccgctaaacaagccccatactcatagtcacattgttacaagtcataactctttcttcttcttttttttccttcttttttcagttttatttaaccgacactgcttaatcttcggtacatgcacatttctgtactagacatttaagaaaaaataattggactatatttcaataaatatattgggaatagttcaacattacatgttcaacaagcctcgtttagtatttggttggcaggagatgatattaatgcaattcttcattcttggaataatcttccaaagtcattggtgttttctcaaccattagagaatgatgacttgggattttttagaaatttgtacaaaatggtgtaccaaaaaaaggtattttatatcttggaaatgttaaaaaaaatttataaacaaaagttcctagatctctgatgaacagccccgtttgtttttttttccttttccgtttgttaaaaaaatcggcttttggaataatctaagcattaaagatttcatgatgatactctggcttttattgtctttaagagtcgttaacgaagaatttcaacttgttgaaactaaaagtaattagtttattgaaaagaagagtacaaatagtcgcaggaaataataacacacttgctcgagagtatatacaaacatgcatctctctctattctatacgacgagttcatcttcaagataactgtattcaaatgtgaactcgtttttgatcctttggcacctacacagacatttaagaaaaaacattacgattaccatctccaaagaagaagaacaatgtgtaatcggaaaacatgaatgaaatcataccatcctccttcttgattctcgtctttcggggtttggaaatcgaagtaaacgtaggctccttgttcatattcatcggttgcaatctttggctctttatgtctctgaaaccaagtgttgaacttcctgtggtatctccatgactgtttcttcagctcttttgcagcaagatattgctggtatgagttctacacaaacacagggaaaaaaagtcgataaggttgacgtgaaccggggaaaagaagataaataaaagatggaacagagcattgagattttggtacctgctgatagtagaacgcaaagaacaaagtatcggttccataagcatcgctgcctaaccgttcccagagcaaagggttgtttatgattggtgcttgtgtttggggaaatgtttgaggtgtgattgctgggttcctctgttcaaaatcataggcaatatgagatttaagcggatattatttaagtagaattcagaagaatgatgtaccggagaatagggtctaggacgttctgaatctgagggttgaggacgtttgtaaaaagcagcttcaagcatctggagattgtgcatttgatcatgcattggccctacagctgaagggtcaccaatggctcctaactcagagttacttctccgtccaatgaccccgaggctacttgaagattgacccggttgtataggttgtccaggagagaaatcaggaccgctagatacttgtactggatccaacatgtagctgggcattcccgactgaagataaaacagaaaacacatgaaggatcagaggccacccttagttagttgcttggtttaatagaatacagctgtcattatgtatatccataaaccacattcactattgaattgcatatgagaattttaagcgaaggaatgacaaatcacaacactcaccaacactaacaaagacagaagttttttatccgctttaaaatctatctggtggaaagcgtatatcaaaaagttaccaacaagtaataaatgagagcacagaactattcctgcttaccggagtatcaaatagaactttagagtcatcctcactttgaatagcttttgaagctgctatggaagctgaatcatcaggtaagttttgctgggattgatcatcatttctgacatggtctacatctgcacaaacatcaaagacaaagccctttattttgctgatatttttatctgtactttctatactcgaatccaaaaactgaggctccaacaaatctagtatttaagtaattgccaagatgttaaaccccttaacaaagtttactttaatcaattatataaaacttggataatattttgccaaagatgttagttgctaaacccagaaatagtgtctatcaacaatcatatcataaaccacagagctaaacctaaacagtgaatgtacctgcaacagaaggttgctgacccaattgttgactcatggcatttgattgctgctgtaaggaggcagaactcatgacattaaaacctggtgcctgaactccgattcccaagcttccatgaggagagatggaagagctctgagaaacagattagaaaagataatctcttaatatgatggaatgttttgaatactattaagcatgtgattattccatattgaatatgctacctgctgtaaaagaggattttgctgttgtgaagaaaactgcttctcgtttcctccagataaagaaggtatgcctaagaggttaccatggccttgctgtacttgctgtaatctctgtaagaatttctctctttggtctggtgctatttcagttctcccacgaacctaaaagccaatgtacgtagttaatagtagaaaaagaagacagtagaaagggactaccagtagaaaaataagtaaagccctaggaatacatctcaaaagagcctggttaggattatgttaagagcgtaaacccaattatacacagagttccacatcacaagaatcagaacttgtttctgaagtatgttccagaatacgaaaaaaactaacaagtcatgatattgctcagactaacaagtaaagccatgatattgctcaaactaccatagtataatgcaaatgtcccagggatccttaaacttataatcgaattcaaaacacacaccgtttcattctgactctgaaagggactaccaggcctccactgcgaaccagatacaatagatggtgaaaaagctctaccaatactagccgcaacatcaccagggttgctatcagaggcagttccatcattaccctttgcagttggtggcaacaccattttgctcagtggagaagtaagaggttggacgttgctctcaactcccattatatttctctttgcaacttcagcagctgaagttgcactaatgcgagacccgttagctggaataggagacggaggctggcttggttggggttggttggggataccaactctaccaatgcccctcaatggagtatccgcaacagatgagggtggtttacgagaaggcaaggttgttgcgtcttcttccttggcagccacgggagacaaactccccatgctttctatggaagtttgagtaggaatagaagttgataaggtaactgatgtatttgaaacattaccggcaggcacgttcaaacttggacgtcctccggcaggtgttgatggtgctgagtgaaggcctgcaccattctttggcggaggggtttttggaaccatctcagcactgctatccggtaaagatgtatcctctgttttctcttgatggtgagttggcaaacttatgctctgaaacaacgcaaaaataaagaaacataaacaaaaaatcttcaataaaagagttataggaatacttacccgaacttgagatgctgacgctgccaaagaactcttcatgcttaaaggagtaccctgacaaatgtaagtcatgttatttcataatctaaagctaatgactggtaattacagtgaaaatgtcatgaactccaaatagattcctgaattcctgcactcttttcaccggacagatacagctcttccacagagagggaaaattatgcaaatagaggtattgtaacaaaaagtcaccttgacaagtgggccagcggtaactagatcttcaagaccctccacctcatctagtggcaacgtgctatagagctcatcgacatcactgaattcatcaaaatcatcctacatagaagaaagttaaacacagtacaagataatataagtgtattttaatgttcgaaacccagggtataacacataagcaaaatattccaggatttagatatagcagacctgatttcgttcaacataatcatccagaaaatctttgacgtcatttacttgttctggacttaattcatcattgtccagaagcctcaagatcagttccaactttattatgtgatccttgtgtcttgtaatagatgtctcaagatgagtctgaaagggggtcaacaagccaaatgacatgactcaccacgagagaagaaattacagcattttgcataccaatgcatattttatcagattttaccaatctgggcggtcttgtctttccttttttgacagacagtccttccaactcagcttcaaagctatcaatctgcgactccagttcactcacctatcaaaatcaagaaaataagtaatgaatcagctagagcactgacagaagatgatcataaggaccgaatcacctagtttcactcgcacatcaaccatatttcaaaaacaccattaacattagtcttttttgacgtttctgttcaataattaggcgcgaatacgcgaaaacaactcaccacattgttcaaccaatcccttgtctctgactttgctttctcttttgggtcctataaaacatgaagctgacaaatcagtagcctgaataccagagaagagttttcgttaatatataatatatatataactacctacgaatatccaacagatttcacaaaaccagatatgtttcaatataaactcaatgatgtgttagaaactttgaagggaaatagtagaaaaacacttcaatttcacattcttattttggggaaaaggtaaatgattcaacggaaaagtagagaaattcttacagttttaggttgctgacccagtccttccttggagaaggcttttgtcttggtctctttttcacatatcttaaacctctccatctctttctcaataagcttccgagcatccaccagggattgctcataagatgcactgacctaagtcaattgacagacaatctgatcagttcagtcaaaaaacaaacggatattaagacagaattacgtgaaacagaacatgtatcagagatgaagctactcctttcagactatgtgaaaccaaattaaactagctggagcctagagggtagccaaaagtatgacagggaaaaccaatggtgcaaagcgccttactcaactgaacaaaagtcaagactttttctttaagatgttaggaaagctttgtttataatattgaaaacacagccatagattatggtttgcaggtgcaatttaagagaatgcaagggatccaagtcgcatcattagtcaattaaacaaaaaaaaaggctgtgaagaagaagaccacttactttcttatctttgatctcactagactgaatccatgtcttgatctggtctctataccgctgcagcttcttgatttccttcttcaagtccgcctcaaacttttccttttgattaacattgtctgtatcatatacctgaaacaccaaaaaagtccgaaaccgagtttttcctctgtccagtaaaaaacttttctgcttcgaaaacaaacattctgctcacattccactgcataaaaaacaaacggagctcgatattgagttccactggaaaatttacctcacaaaacaaaacaaacgaaaagttataaataacaaaagattaacaaaccaaacaatatcacagacatttccaccaatcctatctagcacaatctaagtatcatcgattaagagccaatgcatgaattaacaatcgcaatccgaatctacacacagtgattattttcctatagatcttcatgcattctcgatatcaacgattaacaaaattgagaaaggaagaaaaaaaaacaatcaattattggaataatatacagagaattgtgaagagaaaggaaacgttaccttgttccagatgctgtcgaaaacatcaacaccttcttgaaccttcttcagcacccgatctatctcgccttgtaatttccggctcgcacccatcacagccgaaccagagaagagactccgatgattttatccccccaaaaaaaaaaagggttaattcgtcgggatttggttacggaaagtagcagctgagagtattttagggtttcgctatcagagggagcgagaggaagaagacgatgatgtgtaactaacgatgatgggtgaatgaattttgattggatcttttgtggatttgattacagaaatcagaacgagagtttcgagtttgacattgacggcccatagtaaaagagttaccgggctttttattcgccgatttgcccctcatacttttactactttctgattcttaccccctatttttactcctttttcccaaatgtgaaggtctataataatttggttatcaaaattaaattaaagttattgaagtagatatttcaagtataaaaagaaaacacaaaaatggaaagtaatgtaaaacaatttaaagaatatttgaatttatggcgcgagacgcattctggttattttttattataacggtaattttataccggacaaattaaatatactttatattattatttgttaaagtttttttttatttttatagaaaaataaatttaaaatctcgtactcaatgatttttatatgttgacatcgtttagtaaatctaaacttaaatataccttattaatatataacagtttgacttattttactgaaattagatatatcacctatatgtatgtcatacattataaatatatacgagatatattttaattttatataaatttatcagcattttagtacacgcaaatgtagttaaccgactatttttcattcatataaaataaaacgattatatttttactttaaaaatttatcagtagattgtaattaattagtttaatggtttttttttgtttttttctacagtattaaacttaattatatgaaatcaaaagtttttttctataaaaaaaaaagaaaaaaaaatttgagatgtgtatttaacgataaaataaacaaaattgcaatgtttggttaagtggtccaaagaaaactataatgggtgaaaataagcgcctactaaaatttcagggacgaaacatgacattgtcactctttgaggtaacagatggggtcctcttgcccgaattcggataaaaccagtttaacccgacccagatctatgcgaaccgacccggtttgaaaaaaggcgtcggacaatccccaatctctcgtcgttcgacggggccattcgtttctcactttccggtttttcttcgatttgcaacgttgtgaatgcttacacatctatgggtatgttcttgctttgttaaaaagcacggagctttacgtccttctctcaagaatttcagtatcttccatgaagttagtaaatttatctgtatttatatgatgagatcataactacgcaaattaatagtgttgtacattgttgcacaagatgtctcttttgagttcgactaataattcaatttttagacgaatccctcaagctaacaaaggaaatcaaaggcttttcatttcctgtgtgattatcataaaaaggttgttgcactcttctaaagcttatttgttcttctcaattccagctgaaaccatttaaatcaaactgtttaggacgcgttgtgccatagttttcgtcgtgtgtgttaagatctagagctgttcttgtgtgtgtttcaagcttgcaatcttcattattctcgttgaatctttcttctgtatactcactgttgttgctactccttcctctgtgttcatgtaatcccactcctattgacaatcttccaggacttcttcttgaagacgagattctcggttctgcgttgttaaccattgttgaaagatatggcctgttgtgattctctctgaggctttcttcttctgcccatgtgagctccattctatggaagaatggctcttccattatctctttctgctctgaagttgaatctccaatatatgttcttaatcccagtctgttgtcaagcatctttggggctttctgagttccttcacttgaggttaggcaactgtccagggaggagttaggtggatacgttttttgcatctgttgatggtgtagattctgcagttctttcggttcgaggaaactagagtctggatagtctgctgatactttagatactaattctgagagttgagcttttgttgcttcaatcccagctgcacctaggttctgtcttccaagagtctcttgtgctttctccagaatcgattgcaggtactttccttgagcctctatcctgagctgcaaatgtcgctgtacctggctcagttttaaaatatttttaatgaaatcgtaactaaatgctctgttctctgtttctatatagttcatctcgcctctattgatactctatacttatgattttcactgatctatgtgtttctacaattttgagtatagttctgtaaattgttcctatttttttccatgagaattaatgaaaccagactcatcttgattggtcttgttagaacaaatataggaaccgaaaattccaacactgatagctgctttgaacatggtgaatgcacagagtacagtatatgatagatacctcaagttgctcgtgtagccgtctctggacctctatttgcatttgaagggcatcacttatgggtaagttcctgcgtgcacaaatataggtcatttttgagaatctactaaggtagaatatgtaagcaaataggcatatccttacatgctcggctgtggtccaatgcttaaactctcactgtgactttcgtctacttcaggggggttttcttctaccatggtcatcacacctaaaccaggttgcttttagtttacttgaaggaaaatagtatgaaaaaagaatgaatctttagattaaaatatttttgtatctgagtaatgaataactaagcttacttgtcttgtttaaactgctgttagcttgtccattaagattcttgcttagcctatatttctggtagtcaaatcatgatattaataatctttgtaaaacaaaaaacagatattacagatttttcatatcttgacatatcgtcatttttgtgctactttaatagttttctaccaatcgaattgatgaacgagtcatgtaagtttagggccttgggcatatgactgtataaagtgttgatggattacctgaagatgactcttgagatggtataaggtaaggcctggaatgcccatgactttcatgattgtcttaggagtagcctctgcgcagacaaaagtatacacattaatacattatgttcaaaaagcctgattgtaaaagatggttcatttgcttataagataacttactatctcctcctccaagctggttgaccgcttcaacaaatctctcgtgaagatctggagtccattttagtcgtggctttgcatcagtggagagaatgagtccagaatctcctgtgccatttcctctgaggaacggatgcctttcagaagaaatgggcattctcgatgaagagaggatgctctttccttggtgctggttgtggtaatacataagtctgtcttcaaaataaaaaggtaagcttatcccacctagcaatactgcattaataatgagtgcaaagaccaaatgtttttcttttacctgacacaatctttagtttttaattgcaacctgctactctcagttcagagatacactatggtttgcaactccaccaacttgggaagatgtctttgctgctttccttatttatgctctttttctcaggccggggtctctcaagagtaaaaagtctttgcaactttgctttatatagaaagttgaatggcaaaaaggcaaattagaggatgataactaaggtatggaatatgaataactggtccaatcgttgctttgttatttgtgttcttatcgtttaaactgtaccttgtgtgcttacattattttttctagttttgattcctctggactacaacttttcagtgcaattaaagccttgcattagatacgagaattgatccacaattaatgcatcatatgcgcattccttcaccattctggtatatgaaagtatcttattctccaaatctttttgacaacttttctacttgggcaggggaattcattctttttccttattcctcaattttttcaaagtccacagctccaacctctctatctcttgaggtatattctcaatgctttccacttgtctgtattgtttttgttccgacttgaaagtcattttttcagtctctacatacatcttaaatctattaaaactttaagttaggttttgaccaaaatcaataatggtttatttggccatgtttcaagaaaatatagtgattatgtttgtattattatatagcgtagaatacccaggtttgtgatatgcataatgcaaggggggtgaaagtttatgtttcaacattgatttttcttgaaagataattgagaaagcgaatgtagaatatttcttgctgtctccttcaacaagtttagtacctattctctctaaatagtataaaaattagtggggggtccatatcttacactctttgattggcacaacatatttggctcatccatgcatgtgttaatctatgtatgtgtgtaacctttcctgtctgttctgaatgcaacataacatgtcttcagtgcatatttgtatgtattgtttgtgtgtttatgtgtgcatacatgtacatatttacatgtatatatgtataagttcgtgaagcatatatgcatctaatgtttggctggtttcttacagtgtacttccttgaatctactttagtggtgagtacggctctaaattttatcatcattcatattatggtgttggatgcgagtttgatttggacttcactattatatttctactgactgattaagtgtagagatactctcctatatgatatacagctatatagaataagttgagagataaagatatataaatatacaagtcgtgattgccaaatgctgaaattatggcttctctatgtgcaattgagaatatatccactatctagtatagagtctcacatatcttaatgagtttgataggtgccttaaaaaaaaaaactaggtagaaatatggtctattgtttgaaaggaaaatgtcaaaaaaacaaatcttatgttccttgaatgatatctttgcatttttcaatctttttttggtgaaatctcatggttctgatttctcattaacactttattctgtttggtgaagaacctttttcataaccttcagttaaaagtatttgagcatattgcctaaatagttgattggcatgtgagtgggaatatgcttccacaaagagaggcttcatattgtgtgctgcaagtttgaaaactctatttgtataccatcaaaagtaaattagacgaagcaaacaatttatgttgaactcttttgattggcttctcttttgtcagatagataatcctctgttctatatcaaatgtagtttcagaaaagatcaaattttgtgtatgctttttgtagcaggttctgttccagattttggactactgtgtttttcttcagaactagagcttaaacgatatgttatcttggtcacaattgttatactagtttgtgcttaattatgtagtctttccccttcttcagtgaaagaaaagagtgatacagacaaaatgttcttccttgtacgttcatttccctttgacagattcttgttcttgtttactaactttaatcagtgtttgatcttccatagggagcataattcaacacgtgggattgtgattcgcttgattgaatgagagaggattggatacataaaacaggaggaagcgggaaatgaccgcggaattatattcgtttggagagaaaatggagggtaataagtgggttcgttcatgagattctagagaatgagaatatgagaatccaaaactaaagaaagcttggtgagtcgcattctcaactcaagaatcttttttgttcatcacaacccgaacccaaaaaaaaaaagagactattcgggtctatttctttccccttttacttagtctcgatttttgtggatattttaatgaattgtgattcttataagcacaacaaaagattaggagaatcattgtaggagttttgtgttcaccacaaggcagtgttgtctgcatccaaccgaatcatgtagcagttttgttatattggtttgaatattatgaaactataaaaaatcgagggcactgcgactggacgcaaacgcaaatgctggctaaattattcgacaagtcggatcattataaagagttgattgtctagttgcaagtagttggtagtagtatccattcttgtttttctttttttcagttttatacattctcttggttcgtttactttctttaagattcgttttaaacatttatttcaaaagttgtttgaaaccctttggaaaacatggagaagtaagattcttccgtagataaaactttggataagcaaaaacatccaccttttaagctaaaaatagatggaggtcaggaaccggttctgtgaccggtccaaattttctgattattttcttcacgggttggaccgactcggtttacggagctaaaatggtctaaaccgtaagtgatcgatcggtggactctctttgttgtcgaacagaggaagaaggaaacagtaacagagtataaaccctacgacccaaaaacaaaagagacgaaacaaaacaaaacaaaaagtctggtttgggtttctcgagctcttcttcttcttacaaagaaaatgacggattctgggcatgatattgaaatcagatgccatcactgcgcaggccctcttaccagaaatttggtatttttctgcatccagcatatacagattcatgttgctgatgaaataattgatctttttgtttagaggaagattcgttctttgtttttacctggaagttgatcgatttcaggaaaccagtaaatggactgttgatccgttcatcagggatagcttttctatggtaagtttctatcaaaaaaattgtttgctcttgaagaaatattaggttttggggggaacagttggacttttttactctaaccataggttgctgcaaaacaaaataaggagaatttttcagacaaagttcgtcctttgaatgtgcaaagtttccttttgtttctgtttcatatggatcaaatggattagttatttatgtttgaaagctttacttttgtttgttcttagattggatcagctgttggaggtactgcaagtgcattcattggatttaaccatggtatgcagagtttcgccaactttaatctctcattgattgttatctctgttgatatcttcttgtgattattgctttcatttattgagtttgttcttctcttgttgattgtgtctgtgcaatcaacttccaccttctaatatgcgctacttatgattcatgtatgcttggagaaacaaagagtgttggattgtgttagaatgtctcaaaagctatgagtaatcatagttttttagtctgttctgagtgcatttgattctcggttgtatcgcttatgttccactgctgtaacagacgacattctagctatgttttagttagattggtagcagtttgatttaaagcttgatcgaaagagactgaatctgttgtacttatttgaatgctcttgttgatggaaacagcaatgccaattgtacgcaagtggatcaaaggacccatgtggttacattttcttgttggggtaagttatctacaaagatacagacttctattcttatgttctcttcttttcgtattccacgccttgttacatacataaaccctccgcggaaaagaccagtaaaattgttaagtcaaattctactattgatgtttctccatttctgtatcgatgcaggcaccacctgttatagttctttcatcagcatgtgctggactagcaggtttgagatcttcttctcctcctcattcactagttataatcaatttcatattaatcttggttttgtgtcaataagctctgaatcttgaatgttgcatctttcttttgggggaatgtttgtaggtggcactgtaccggcactggcacagctcgcttcatcttcataccgagctgcagtccattcgtctcagccaccacaagcacaaaaggataacaaaatgcagaagtctacgacttctcctttgtaaacgacacacacagcacagctctctcttttgttcttatttatttctcttcattttgtatgtcaaatcttttctttgaaagagagagcttcttggtgtaaattcttcttatcttatacaactatctggtgctaaagaaagcttaatccgtgtcacgggctttatgtacatggatgccaatggtgattcactcattctcatatagactatagagtgatgaaaggattagttttgttgtttcagaagctgtggggtttctttataatattcgaacaattttggctctgtttcgttatatatatacgagggtaattttggaatttcaagatgagatttagtgaattagggtttttgaccaaaggctataaaactcgagcaaccaaatcaatcaaatcttcaaaactacttgatcttatctgagctgagaaaaagtgatttatcgttagggtttcggccttttcgggccaatgagcaaccccaatatccttggctggcggctccggtgacggaaaggtttcgattccttttatcgttaatttcccattgttttcagcgatgaagactgcttgctgcctgagcgcacgattttactcggcgctgtgatggctattgcgagctttaacacccacccaaccaaatatttatgtgtttttgaaaattttagattttgattatttaaggtttcttcttctagctttttgtttttgttcgattcgaatttgtggattatggttttggttttctgtttttgttttgttttgttcttatcaactagaagaaaacttaattcgtgtgtaaggcttgttgttcctagttaactagagtttctttgtagcctgaaatatagattttggattacaagttaactaaaatgcgtactgcttctgtctatagtttcccagacactcgagaaactataagtttgaaaagattctttcttttgtgttataactatcgattagatccaagtaaaagttcaaagaacctaatttaatcgggtcatgttggatttctaggaagaagatgagaagcttatattcaaacagcagctgagtttgtcccatttatggcttcttctggtattgtgtcttctttgattgtcattggaagggactcttactgtctctaattctagagctgtgcggcttcttctgagagatcttagagccatttgcaatgtttcaggtgctatcagtggctgttccattactccaatggtgtttgagcaaacaggacaagacgggtctctggtttgagctgttggggttgctttgtctaaacactcaacatggtagacgtgatggcaggggaaaacaccagtggctggcatgtctctggatctcaatatcttgtatgagctccatggagatttctgagataaaagcttcttgcaaatcccgcatctttgatgtgtcattgaaccttgttcagatctcgggtttgcgacttctgtgtcattggatctttcaacatctagcaacatgtcattgctgctcgagtttggtgatacttcttcctctactggtgagccttggtggtttcttgtggacatcatgatactggaaccaggatttgtggacgagtcttcttgcgtatgatcaggttcaggattctcacaaactgaaaccgggttgcagaagactcgagggtaagagcagtgagtaaggctggaagactgattgttggtcggagtctcccatgggacagatgactctgaaagagacagcaacgatctgaaactcgttgagatggcggtactgtctctatcaaaaccgttctcctgagccgtaattacatcaaagagcgacaaggttcagccaaagatgaaaccaagaaaagcccatcttgaagattaatgacttgatatgtaaagaagaccaaaattacctcgtttaagcattgaggatttgagctatttggtcttgttagactattattaaccaaggaggttttctgttcgttcccatcagaagcagatgagtatggagcccatcttggcgactgctgaaatctgaattccaaactttttctttgtctactgctgcccgagtgcaatgcaaaagcgggactctcatcactcatatcctgttccaaaccatctctagtatagccagcagcaggtgagaagctgaaatttgtccgccattgcaaggcttcagcttgacttgattgaggaatatcccttccgctgtggggtgaagattttgttgtaaccagtggccttgaggccacaatacaacagagtgcacccgttttgagctctggtttatcctcaccgccttcaaggccaaacaatgctgccaaaaggaagagacttgaagaatgatttcagttgaaaccaaagtcgtctttttgtaacttgtaaacactgtggaaggctaagttaatgattgtaatcttacttaataaatgaaattcttgattatacagccaaaatccccgagtttagtgattagtataaacacattcataagtaccaagccatctctgcagggacaggaacacacctgagacaaaatggaaacaacagtatttgaggatgcatataaattaaactaacgcaatatttaagacaaaacactagattcagactcgtaacagctgttttgagctcttataatcacagaagaaatttagacagcaaaagattcattgatggagaaaccaaaataaacaaacccaggaagaattcgaggaagataaccaagtgtcggtgaaagcagactacagattatacagaaaaggaagattttaaaaatcaaagacaacaaaccttcaaactttggaaaatgataacctgggtttgagaaagaactctgtaatttggagatggctgatattttgtaaaatcgatgagagtaagagagagcgcacttctctttactttttctttgtctcttttttttttttttttttttgaaataagaacgacagagacgacgacgacggctatgagttctgttctgtaatgagagtggccaattattaacccattattactccttttaaaaattagtatttctggttaatcccctcactgatttttgttgttgtttttattctaacattggaataatcactaatggctatgatgtgatatggctattattagagttacacattatctattttcattaggatatataaaactaaaaaaatattagtgaatctttaacaaaaaagaaaagaaggtatttactatttagagaaagaaatgtgttttcatttgagtgaaatccattataatatcaactattgttatcttaaaacccaattattggtatcatcgaataaaggtgttttcactagtacctatcaaaattcaactttcatcctcaactaacgaatagattactcaatattaaatctttggttaagagtactgcaatattgctgaactcctagtcttaattagacaactctttacgcagtaatttgctacttttgacagcaattaacgcctttgattaatcattaatctcttacttttctaactcttactaagtattacttttctttcaaaaatttctttcttttcaatatttttttcacttgcatagcaaaaccatttgcccttttctttttcttgctgaaagattaaaattaaacatttttaaaaatgtgggacttcagattaaattgtctttttatgaacgaaactaatggacttcataaaggcccataatataatgtaggcctttttggtccaaactatggtccatggcattaccataagcatatctgcttattgtctaacctaatccattaaaaaggtgaaaattaaagcaacaaaaatgaaatatgtatcgtttgtaatgttttattttacatgttttaaaagtgaaatgttttttcataacaaatcagctgtaaaaagaagcaacacatagaaaattggttccacctaaataactgctctggacaaccggttaagcaaaaaacatttccaaatggtaagagggtttgattcacacgtgtagtctatcgtttagaacctaggaggtggtacatttgtatatagtaaaataaattgtttaagcagaaggaagaagataagagacaaaagaaacgaagcaatagtaatcatctagaaacctaaaaaggggaagagaacggttagctttgctgcaagtatcgatctaaaagcttcgctttaaatggaaagtcctctttctatgcacattttaataatcctcacattcatgcatttttttttcttttttccaaaatattactaatattttattctagtatataatctagttgtaactactgtaagcaatgctatgtttatacaccaaaaagtttatggataatctcaaatccaaaattgaaccaaaaaataataacaataatcagatttatgtcctgaatttgaggtggaagagactcacacgcttttttgcaaatcatcatcatatagtacattgaaccagaagcctcatttatttacgtacggttaattgagtttttatttatttataaccgttacatgattatctgtatattaacgtttagaacttttttgataacactatatgatttttaagggaataaaaaaggactaatataagactatatatcaagaaaaattgaaaactatgtatttgcatggcattatgtttttacatctttgatgttaatgccttttaataataacatttaccaagatgttattcctttggtatttttcaaatcggtgcattttctttaaaggtgtttgtctttgtcgttttatatattaaaaaatatcaaagaatttaaaacaaagaatattatagtaaatatacattcaaccaaaaaacagatctgctgccaaatcttaaagacagatctgcagccatatcttattctatgtaaagacaagctttgtgcttcgggcccaaaaaaaaaattccttgagatacaatattatatctatatatatcaaagataaaacgagtatgtagttatgatattaacagatgttaacaagtgctggaaaattttaatgatatgtaacgtactaagaacttgcatttattaaaaaattaagtaggaaaacgtaatgtgattgatgtaataaacaagttccttaagacataagatttagggatctggtattgtattcttacaagaaacccatcattaatcactgttcttagttgaaatgatttttttttttgtttatactagtatagtgttgtcaaaaattcatagtaataatctaaattattgggcatatgaaaggcttatatgctgcccagattcggggaacattcacatgcttcatgagctgtgttttttttttcctctctgtgatttttattaagattccatctgtatgcattttgttgattgttttataagttatttctcaaaacataatgttgattgttgtttttgttagtaaacattatgttgattgtgaatgatacaaatagtaaagcttcgtgagaaccatttattaaaatctattattaatattagtggcgtacttatgttattatccgtattcaaatgcaatttatgttgtattttatcagccgtaaaaaaactacatgacattcacgtaatcattatcattttcttctgttttaaaatggaaacgtttcgacttgagtttggatggtatattcctatatgtcgacttaatattgtaaatgtaaatcatagttccttagcataagtgttattcaacttgtatgaatatatcgaattgaactaacaacgttagaatatatatatatatatcgtaaatcttaataattaaaactctatgagaagactaattatatgtatacaaatacagtttacattgagatataacttatgcactaaaatcccaaattatcacaatcctttcttttcttttttaaccacactataaagtataaactaattaaacaatcaactaattaaataatatcaatgaagtgaaaatagttaactaggattaagcctctagtaaatcctatatgtatatgtattaactaacatgatttaaatcccaacaaatatactctttcaccacagtcaaatgattaattagaagtcccacaagtcccccctcaagtcacatagatcttcatacgacttgctaccattcaccattcccatcatccccatttcttgtttcattacaggacccgaagatacctccgtggttgtagtcatgttcgcgttcacatctgagcttaggcatgtttcttgagatacactaacaagtgattgctccatcttgatcatctcgttgttgttgttgtacgtagagcccgaagcagaaccaaaaacctggtggttaaagattgattggtaagaattgaaatgatggggttggattggtgatgagatatcgtaagttggagggttgatgggtttgaagtttggttgttcggtttgactcatgaaactcgggtctatgagaggaggaagagatgagaagtctaggagatgatcaatgttctctagagaatccatccttgtgaaatcttcaacgggtattctcgtcattggttgggttgtggtagaaggattgttcttgtgaaaaaccctacacacgacccattcgtcctgtaatcaaagatcataaacaaacaaaagtatagattagtttttatttttgaagttaggattcaattatcttaaattggatatatgaaaacgaatcaaactcttttgaaaaggacttatgttttccaccatatataacacacttttggtttaagaaaactaagacataataatcaaataaatcttagatctttctccttttggagtcgaattgaaaaaaacattgagaatatatggtttcgtaacataaactcacccttgcagattttgggagattgtaatacgaatatttgccttcaagacgatattcatgcatgacccaattagtcttttcaccttttggagctcttcctctataaaacacaagtgttttcttcatcccaacgagacaacctttgcctttgaagatctccttatccttcccggtggctttccagtatcctgactccgtcgcacggttcgtcctcatcccagtcggatacttcctgtccctttgacagaagaagtagaactctttctcccccatctttgccctctctataccaaccaaaaacaaaaatcagaatcttgatcaagaagccttttgtgtgttgaaatggtcaaagaagattgaaatttgtttggcttcgaagtttgaaaatttggttcaaaaacaagttagacatcaagaattgataaatcttaatcaagaagctatagcctttgtgtttacacatgaatggtcaaagaaaaattgaaattttgttttggtttatggaaaattgactactacttacttggcaaatcccaaggctcacacttgttgagatcagcttctcccatggccacagccgtgaatcggctgtttaaaaccttctccttaaggtaacatgttatgatctcttcgtctgttggatgaaacctgaaaccaggtggcaaatccacaagctcttcacctccatgattcaacaccacaccttcttcaaccacaaccgccatcactttatatgtttttcaagtaataaagattcaagagaacaagaacaatatcagaaacccagaaatatttttgtaagaatgataagcttatttggaaagagagatcacacaagaagaagatgaagaaagaaaaatgaattgagaaagctagctgggagagaatcttttgggcagttaaagcagagaaataaaagtattgaaagggtggaaaaaatggcttttaaatagaggagatggatatgagctttctttgtaattaactaaaagataaatctatttattgtttgtttttttccttcttcttttttccttctttttggtgattttgaaagatacgtacgctccaagcaacttcctgaattgttgaacaagtttcacttagacaacaattcgatttttttcattatatttttacaagtaataaattcgattaatatgtactttttagctcaaacttagtcattgataatacatttaacaaactgttgagatttttaaattatcccttaagaaatacttggtactcaaatttgtattgaaggtgtgaaactagcgtctctctaactaatttagctaacaataattcgactaaatatattatatatatacataatgttgattgcattaattatatgttgatttgttttcatgctatagcttagctggttttaaataccgtattaaaaactgtggggaaagaactcttggaaaataaataccatatcaaaccaaaaacgtgttgaaaataatttcactaaagagggttatacaatatagcttttgatgtggtggacccgtgattaaagattgttcttgtttttaatttggttattatcctatagaaagaaagccctaagaaatctcctcttttctgtatttagctattaatcatgagtttcataatttaacattagacccccaaaaaaaaattgagtttcatatttatcttcaataattatccgttttattcatttattctatagtgttctcaaagtcgagaaatactacggttaattataaagtatatgttttctagtatttaattagagaatgtataattagctgagtattatattaattgattagcaccgctcctacttgaaaaggctgtggtctttttatgtggtgtttgttttagccttttcagtgaagccgaagaaagacgatagtgatataattaacttatttaattaattggtagcagagtaacttaatctggatcctttcattttctgtgtgtttaattattctctcaaaacccaaatatcacacaaaattcgtaactttttgcaagtcgcataatagtaacactacacgtgatataattattagtatgattgctcgaaatccgtgaagtaagtatagattaagttggaattaacctgatttttcccaagtcggtgaatatatattgactagtcaagtcaccaagcgcttgactaaaaaaacataaaggaatttccaacaaaaaagcatagattttacatatatatgcaaattagtagcatatattattttagttgcaataccaatatatcggagtactctactcttgtagaacttataattattaggtcatatataacgacgtcaaaaaacaaaacgaaaattaggtcacatacatatatcatcaaaatagaaaagtgcggctatgtattctaagtatttaatacttcgtctgactttttctgtgtaaataaccgagaactattgcccactattacaactaaacaatcaatacgagaaaataactagttactctaattaatttatgagctgacaatgaaactaaatgtggatacatcggattttgtcaatgtcactactacgttcatatgtaacttactgatcttttggatgagtttggcgcgttgacactctctgactcagtaatcgtagattcgtcacaatccgttatttcctagtagacaaagcaaaaatgtagttgtttcttagtagatacaaaagtaaaaaagcagacacctaaaatttgtctatcacaaagtatctgtaaattccgaaattaagaaaacatttctttttgttttctaataattagaaaatctttagaatgttattttcttcttatgtgaacaaatcatcataccaattttttttttttttttttttggaattatgacacctaatctccaaccaaattaactgtataattgtctttactcgctagtattatatagcacggtctagtctagtctctagtttaaatatttatgatcattggtcattgtttactagagcttcatatatagttatgtaagtataaaactttaacggtttaaaagaacattacataataatttaacaagaataatagtactaatagaaatattgatgcatattgttattgtacgcatttaaaaagttaagaagaaaaaaaaagagttgagagaatacatcgattttccagcctgtaatcttctggaaatattaacatgcgacaaatttttatattaaagatatttgtacagtaataatctacacattgccgactcagattaaattggaaagtcgttttagtcagtacgttgtaacaaattcaccgacttggttccagcattaaaaaaaaataatcacccatcccttaattcatattgcatctttattaattagtagtaatatagtaatcttaatttatttctttgatctgttcgtattattgaccgacgaactatacatgtacggtgttaccaatattttatattgaatttttttggttgaatgtagaatttttattggttaaatgttgattattgtgtacatagtatatatgtgacatctcatgtataaacaaacaataatataaaggaacttttttcgtctgactacatataattgtgatttaaatacagtggtcatatatcaaaaattaaatcgttaataaaatagattttaaaaaaaaacataactttttaatcacaattttttttaatcactaattacacgccgttgaaaattggtgatttgtcgtaaaatggttgtaaggtccaaaaatcaaatgtttgaacttggaagtgtattttttttatattttttttgtctagtagagtcgaaatcttttaattgtctttccctaaaattgtttttatctgaattttctttgtccgtaattatctcgattaaacgcgttttggtgatcttatgtggagcatatattaaggaaaaatggataagaataataataatttcagattaagatggttttgttataaaaatataatgatgtggaccgaaagatatggaatgaaatcagggattaaaataaaatataatactgtttccttacttggtagttttgtgtttatgtttttttatttcgacgtgtggacccctctggaggaattataatatgtgtgtaggtgtaacttaagaaggttgacttttgatccccaagacgagactgcaaagcgaaggagctacatcattggtcgatgagagcgcattgacgtcaacattgacgtcatcactatccctttcaacggatcttaaggggccacgtggacctaccacaagccgttaagatgtgcggccctagattatgtcatacccaacgctccttgtctagtttcttctcatgtacttttattattacaactgaaatggtcaatgctcttttgttgttttgtagtattttatgatcagaaaacgcatttttgtccaccgataacatatttgatagaacgagagtattgcatgatacgagtcacaagatagtggtatgattttcgcaataccagaatatcatgatttttcatattcgacgagtttacagtacatgatgaataatatgtatatcgttgttatacacgacttcagagtactgcttcctatacatacgggttacataaaaaatgctagttgttacaaaaaaaaactatgcttatatgtaaagttggtgtaatatactgtaatgtgaatatgtaacacaattatgtaacataatgttaaatgatgatgatgatgatggatatgatgtcattcaacattgctcaaagtcatggccaccaccaccatgtatcaggcatatatccatctctctgtgtgtgtatatataatttatttgtaaattggaaatcttagaagttaatctcactaattaaagaaatagtttatatatgtacttgtggatcaaattgacgagcttattattattaagtatagtccaataactcaaataaaatatacacctaaattgtttgtttcgtagtttgagacagagcacacatcatatgtatcttgcaactacaagaagttaggatcgatgttattgttattgttggtaggaatctaatatattaagatatgtataaattatggttaattatttccaatttggcagatcataatttataaatatataacaaggtttgcttgatcattattacgtactgggagtttatctgtgattgttgttaagtaacaagctaaagaaagttgttttatttcgattatcgcaatttggtaaaagtgaaatgcacgcacaatagaccagagttgtggaaaaaagtaagatgaaagactatagtcaaaattattcatatatgtaatttatacacacatatgatattgtagttaaatacgtagtttctatatatatatatatatatatatatatatattgacagttgtattttgaacattagagtatgttttagtaatcccatctgtatattcactagaacattaaatatgatgggcagtcttgcgtcatttggaggaaaaaacaaagataatattgttaaacgattatttaacaaaaaattaatgattatcatagcaattggtttggaaattgatttgtaaattttgaaagtcaatttgccaactttttccttggagagctttttaattagctgattaaatagactagaccattctgtcatacatgttccacctctccatattcttacgtatgtgtgtatacatacacattcatatctatacatgaaattcttaattatgtttagaataatgaagactggataaaatgtgtactaatttttagccacccataaccgttgcaaatatgaaaacagcttaaagtcttaaacattagatttatcatttatgattcttaggctttcatttctacagcttaagagttcagaaaaataaactactgacaaaataaattataagctaatatgttttatgcatataaatgtcataaatctctatgattttgtcatttaaaaaaaaatatcaatttggaatataatttgtagtttttttttttggtgtgaggattatgattggtagtttagtagtttttgatgatatcgtttataagatatatcataacttcaaatctgcatattatattagtgataagaaaaggaaaaaaactgaagttgttcgatatgcatatattttcttcttagatatgtcaattgagaaatttttgtttttatccaaaatcaatatgatcacatacgcatatcgtatggtggatacaaaaatgatcaagtagcacaatgctttgaagaagtatatatgtacgtgtattcattatatcctaaacacgtatatatgtagttaattgaaatttgagtttatacgtgcaaacaatagcataagattatacctaactagggtaattgagcctctcatgttattattttcaattaacacggcaaaaacgaatggtttaaagcttcacacaaaaatactatcaaatttaatttgtaagtcttttaatattaatattaatatatatatatatatcaattttaatcgataactaaattcttcaaaaataattcaaaaatatttatgatgcaattttaaaatttgttgaaaaataataatttttaatagcatttgaacacgttaaaaaaatctattacaaaatctcacactgttaattgtcaaaaaaaatcattttcatatattttttgatccaagacttatgactcaaattaatttgtgattaacttaaattagaaaacgactttcgatcttcggtgtaattgttcccccatttcaagacaattatacatgtactttcgtaaccacacacacattatgtgcatatacaaagcattaagcattgaactcaaatctactacgtacagcaaatgatatatatccatgtgtgcagggtttgtgtgcatctacaccaaaatatggtaaacaaaataagtaaacaaaggataacatatttccacagttcaattatttagctaatgcatgggtcatatataagcaagtgtcacatcaataaaattatttaggtcaccaatcaaaacatgatacttattcatgcgtgttcatcgaatttcctcttataagataattcttttctttttctttttataggctcagactcatattttgttctacgtaggacagtgctttgatattcaacttatacagaaattacacgtagggataaaaaaaaaaggattgtctctttagtcctgaatccaatgatacaacgattcagtttaattttctcaatgtatatcattagacttcatatcaaaataatcgtcaatatagattaatttgaaacggttttattcaccatataatcaaacattcaaactactagaaaaactagagattatattgattatcatttcatcgaggagtagtcttttcaatatgtgaaagtaacccttacgattcttctttgaaaataaatgtgttatatgtcgtcatttttatggacaaatttatattattgggtttgctttattctacttgttaaaattcaaatgattccccaataattcattgaaaattaaaacttagcttcaccatgaagcttgagaatattccctttttcctagatattgacttacatgtaattttgaatcgcgattttattttttcttaactatcaaattatttaaccaattcgtaatatttgattattttacaaataaatggaaaactatagaaatgaatgtagaaatatttcatgttatcgtgatccaaaacttggtgcaaaaaatttcatctgtttttttccttcttcctacctttgaacttcggtcgtgaagcattttttgttaacattttttttttgtcgaagctttttgttatcatcttcgggtaactaaaagttaatgccaatgatataagtgataatatgaaatagcccccgctaaaagatttcaaaagtttgacagataattttttttttttttttgaactaagataattaaaactatgttttattattaattaagtgtttcatatttgtttataatattgcactttttcggtaaatgtaatttatctattttaaaaaatcctaagaaatttgtttttgttatatttactgaagattaatactatatacttatatgcaacaaaaaagccaaataaaatgatgattcaccatttgttgtgtgcaagtaattgcctttctttcgagggacatgagcgagagacaataattggagttcaatcaccacgtggatttacgaaagaccacaatcacagcaggcgtcattgtcaattgtattatttcattggaaacatataaacatgcaaaactgaaatgttttcccaacaaggcaagaacacaagtttttgggcagattacggttcaatgaaagttgtcccaagctatatagataaccaaaaaaatgattatagtttttgaattagtaattaaatgtataattctcaatttaaataacaatgataagaatatttatccttgcaggtttagtagaggataaatttattttaattctataattacaatgctagagtttaaaaattaataaactcctgattgctgctggaaaaaataatttcatgaacaaatacgagaaacacaaaaaggtaagaatgttgcaatcttttcataaaagagtactctattatacaaaaaaagaatcaaaaatctggaaaaaagtaaacataagtaacaaaacaatttctctaaataggatatattgtaataaaaatgataagtactatgctttaaggatggtaaaaatttgaggtagagaaaaaaaaaaaaatagctttggcagaaatcaaaagaataaggttctatgtaattcccaaaatgccccctcacggtgaggatacggcctcgatggcgctacccaatggccacgcagcttccacggcttggtctccgtatttgaccttcttcactaacgttattgtctgtgatggctccaatcctgttatattttttacccaagaaaatacaaacattagacaaatgaaatacatatacaaagacattacagaaacttggaccagatcatcctaaaatgtaacacttttttccttcatgtatttggtgcatatgtttaagcaaattctagtatcctgaacctaaaataaatagtggattctcttgaaagtgacttggtgtaaaaaggggagaaacttaccgaatccatcaatgagcagagtatattggtaaacgagatccatgcacaagtaaggcaaattctcttcctccacaagtgggaacgttgattttccctcttccagcttcatactacaagctttctttgctgctttctcaaagtccatgggacgaactgtagcaacaggttgcttcgggtcaacgaatccagcctgtgtcataataattaataccattataccgagattagcaaagaaacctgttgtgtgtgaaagatttgataaactgtgtttttggttgaattacctcagcagcacgatcgaagaaaaaagaagcaacaaacatattcttttgaccaccacctcgaccaccattccagactcctccgaatgtgcatttcatgtgtgtacacagtgtatcattcacttttagtgcgttgatggttatccttcggcactcgtcaagactcgcacccgattgtgaagcaggggctttaaattcttttcctccatacttgtacatacctacagtgaataaagtatcttagaagaaatcgaaaactgttgatccaatatgctaagagaatttctagaaaaggatggcgaagataatggcaataatgaaaacatgtgtcatacgaggagaatttcagagaactctagtttaagaaaaaaaaaacagctctcatgacaaaacaataatctcttaccatcatagcctgccacgatgcaggggttctctgaatcttcagaaactttcaaaatctctgctcgagcggccagtaatccgtaatgtaggtaactacaagcacgaaaaaagccaataacacctcacattaaagattttgaattaataaaaatgtgtgctagcatggaaggaagaccaaatatctaactagtacagtgtctagaagatatacagatgacatagaatagcctaaaactgcctcgctctttgagagacgtaagaggtgacaaacctgtgaacatagaggaaatacttccgtcccttcagatacatctctctgacatatgaatcctctccttctaatggttttggtgcacttgcagcatcttcctcagatatagcatatgccatttgaacagacccccctccaagatcaaccactcctaccgtatctgagtatggttttcccaagttccttagcaagtagttaattgttacctgcaaagttaaagcccattaagacaaaatgtcagcttgattagaggttggtgagagtccaacagcttgagttttaatactattttacatactagactttgaactattacaattgccatagtgaaacacttcttattgaataattaagaaactagaaaggataccagtccagaatttacttctccgaatggagacgatgaatataaaggcataaacgcagacacatgagaaatacagcaagatgatttcatataagacacgaacaaatgtgggacaacatacccactgataagaaccttcctgggtaccatccagtacagtaacagcatttgcctcagttttcagcatgcttctatctctcaggagttccctaaccttataaacaaaagtataatacagtataagagctaagtgacctggcgaatgtgcatgaaaaatttatggatataaaattaccgcttgcaaaatgttctcagatgcatcatgacccagcgtcctcaaacctgcagtagcctgacaagatttagagaagaaaaacatttcaattgattcacaaaaaaacaacgataatacaagatagcttcaattattctacgtaaggaaagaattcgtttccataccccaactctgacatgtgtctttggacgcagctcacggggaacagaagcttctgctttgtcaagaagagacaccaaagagtttgctgcttgtcggggatcagtaggatatgcgctcaaccctggttttagctgaaatcaaatcagtaaatagcttagagataaagttccaagaagcaccactaaactgcaaattaaacaagaaattcaagccaccgcaatgtgatgaaactagtaactaaatgatgcaagcgaggtgagttcaagttttatcttagaattccaggaacacagagcacaagtcaataatatacattgaaagcaaagttctaagcttcccgtttatcctattgagctttacctcagggcaagagatattaccatgatcaaatctagaggaggatcaaatattaaaaatccttcatcatccaaacgaataatcttcttctaatcgttttcgaaatgcgttctaatggcaaatttcacataatttcagtttttaaagatcgtcgcatcaggagataaagtttcattgtatctcaaacaaagtcatattagccctattcgatccgttgggagatgcaagcttcttcaccaagctctagcaagtaagctacacagtgcaagcctttccacacacaaacaaccatattaacataaaataacacaaatgtaccacaaatcaccataagcaatgaatcaaatctcgggaatgacacaaagatctatcaagcacttattaagccatagattatgatccagaaagaggagaaaaaaacgaaaccaatgtatcacctgtaagaagagctcaagttcattcccaagaggaataagatccaaattctgatcaaaacagtaaacatgtacacggctaccagaacttccagcatcaaaaatcacagcgtaattcttcggacctctcgaattaggacctcctttgcgattatgcacagaatactcttcaacgacggaatcagaaatcgatctcccaggcattagcagaagaacgagaccgatcaacacaatgggaaccgaaatcacaagtataatcccacgatggcgttggatcttgtcagcaagagattcgtgccgtccaatcccacgcttcgccgtcatcttacctccgtcaacagagtcggatgtaggagaatggttaccagactccaggagctcagtggaagaaggcgaacggtagcgtatcttaccgttgccgttgccggtaccggaggacgccgtggtctgcggcggatcctgtaacggctccagatcgacggtgaatttgggaaagcggcttgaatcgccggatttgatctggaatccgaagcttgtgtgtgcttcagatctgaattttgtatgagagagcgatggatgcaaacaaaagacgttatgggttacgattgcgggagatgggtaactcccaactatgtttaactctcacaatgagcttacgcataaattagttaaagttgatttttttttatattgaaattaaacagtagtaataaataccaaaatatttaattaagtacttcctctgttttaatttatttgtattttaaagtttttgttgaaaaataaatgctattcattaatatttttttgcaaaaatttatgattatttatttcttttgattatattggtattatgcagaatattttgttattggttgcatatattattttaaataaaaaatgacgttatagtataaaaaagataaacaatttacataatttatgtagtgtcttaactttttatgtgtatgcaaaattcttaaattataaataaattgaaacgaagggattatcactaatattttcactaacaactcctaatttttcatgagatttttaatttgactgtttactttttatatttattttttttgcaattttgtgatagtgaaacttggttgaatcgaacttggtataatttgataaaaatcaaagctaagtggatatcaaaaccatataaacctgagctgtatgaaattcggtttgagtactctggttaatagaagttgtaaatcgaaaacatgaaccttaaccggattaacccaccctgactctccttcacgtaccgaacttaaccaatactactcaaccggacgagagtgaatttgtagattacgcactaaccgagaaaatgtgaatccataaattttaaaaagaaacgaattttttttttgggctataaactataaattaagtacaaatacgacaacagcataaaacatacaacaaatgggattatgattcatgaaatttttacttagatttttccatttttttctcaagctttcttctgttttttctgaaccagaggtggagccggaaatataattctaaagagcatcgcagataaaatagctccggtgtaggagctgatccaatacacataaaaatggtcccatgtgttgtgagacttgtagatatatgcccacccaaacgcctgcatcacaatatataccacaagactatatatcaagattcatttcaaaatgtaataaaaatgaattaacaattcttgagtaggacgagtatgaacttacaatggcaggattcatgaatggtctagtgaatttagaacctacgacaaacaccgatacggtagcgagtgcgagcaagaacgttttcgcgagcagttttcgaggacctcttaggataattagtaaaaccaaaaatgtaacactaaaacttaggaccacttcagaaatagctccattgtgtgcaccaaattgcaatgaaggctttcctccaatcctagtcttatacttttccggtatcatctccatgatcgttatcgcaccgcctgccgcaccaattgcctaagatatataaaaggttacattacatatggaaacaaatatgccagtgggtacttgggccaaaatctccaattaaaaaagtttgtacgttattcaaaaacacacatggaccacacacaataaacttcacatagatccaacaaacaaagaaaatacattgctctaacaacaaaataaatgtaaagaaattcataaacaatgtgtaaggataaaactttaatagattcttattcgaagagacaagacacaaaagcaaatactcatatgaaaagatgtcacaagtatatgaacaaaaatctttctgttcagaacaaaataaagaacaagaagaagaagttggtttggtttcaaaagctagcttagatcataaacacacacctgagcaggagatctaatggccaaggagaagagagaatcactggaaacaccggcggtataaaacgctgcgtttccacaaggattgaagctagcaccaccaagaacgtttccaataaccgtaaaaatcgagatggagacaaaaacaaccaacgttgagatcacaagaggagcccaagtgataccatgaaaccctacggcggaaacaatcgccgccgtctgtatcccaaacgtcgccgagagaataacccacaaaaaggttatcaccatatcacctaacgccgattttaccgcactcatcgtaagtatcgtttttttttctttttcttgaacgtttgggtttaagaagattgttttcttcttgttgaaaagaatatatttatcagtccactcaaaactaatattctttttttatatagaaggaagatatgtatgactatgagtgactcacctaacggttagctgaattttgtagaaatgtagatagactatcccaaatttatatagaaaacaaatatacttttgtaactcttagaaaaagataattgaaaagtttgtagagaaaaagatgaaatccttatgctctgattaacatagagggcctgtttaattccaaaatgggtttgttgtacaaaatatgtaatgagttcatttccatattctctgccacctcaaatgaccatggttcctttttggtgagctctgactatggaaagtctatactgctttttttctttttcctttttagtgtactagtgtacaaattataatgatcaaatgaatgtagacactattgagaacagatacatgtaaaaattaacttataggaattgagcacaaacaaaaaccttttttctttcctttttccagtatatattagagtaaaaaaaaatgatatacataggctggtatatagtcaagatattataaaaaaagaaaaaaaaaggacagaacctaaacgagaaacataatttatggttctgcagaaagtatacccaagaggccaagaccccctcttgggacgaaaaagagagagtttgttgcatttcttgatattcaagtaatgagatcgcatgttattattagcataaattcgttaaacgatattagctaaaagaattaggatatgcttatgagcataagtatcaggggtcggccctgagattttattgttatctaaccttagaacccaaacttgtggtctgtttagccaaggttaagaaagaaaggttaaccaaaccattgctgactattggactctagataggcccagcccagtgcgaaaccatacaaatttttttgttttccttttgtatctcctctacataattttttttttcaaattgatgtgtttggaattattgggccacaaaataaatgtctttagttttttgaaaaattattaactattattcgtttatttttttgacatcattattattcgtttggtatagccctgtgcctattggatttatttttataaaaataacatgaaaaacttgtaaactttcctttttgtatatttatatatatccaaaactaatccaaattagataatattcaatagtcggttctcaatcatactccactttatataaacctcattagaggaggttcataattaattctctctcatttgactcgaggaaatttcagaagaagaagatgatgccgatgactgaagaattttacgatgaagaggaagagcttggttgctttagatttaatccttcagaagaagaactcatactcgattatcttctaccaaagcttggcttccaccaaccaaacacgatatatttgttagaagacagggacaacatctacgccaaagagccgtggcggcttaatcacacagagaatgatatctttgaacctaacgagtggttttatttcgtgaaaaggacaaatcgcaaagttaaaggttggaaagccactggagagttaaaagatgtcgtgtcgaagaaaaccggtgaagtgatcgggaagaagaggaatctcaggttctacgttgaaggtgatgagagcaaaacgagtggttggaccatgagggagtattcttccattggcaatcaaaaccaacgtctctgccaccttaaaggaccatgattctgtttggtgaatatccctcaaaaatatgatgattatggaaaacgatgacttcttttttttttttttttttctaaaggtagttacgttactcatcatcattttatttcgttgtgtttcgtttgaagattctcccgtattcttatatctttattagtatacacattataagtcaaggatctgagagtctcaatgttttcttgtttatttaattaaagattattcaagttttttatgaggagctttgcagctcttcgcatgttacttttttcatagataacaataatggtttccttttttttccgaggaagacagtacgtattattcatataatgtatgaaaatataatgagatattaatattttcttgagaaatatatgaaataaagcttgtatctaaactctaaatccaaaccctagagtagaagaggtaaacatgtttcaacaaacttttatgataagaacttatcttttgtacgtagtatatatcaacaaaaaaggaagtttgctagttttcttgctctatttagtcaatctataaaagatgaaaaaaaaaaaacgatattgctatttgatttcctatatttttgtatgaattgattgtagaggattcttcttcttctgaacatattgtagtaatatatatatttttaaagaaatattagatcgaatctcacaaacggaagaatctttccacgttttgaggaatacggtctgtcactgtcacctacacatatgaaatataagtctgtttagggtttttagcgtcggtcttcagattttgttggaataggatgtcctaaacatcaaagatctaaaaattaaatcaaaattgaagaaaaaaccttagatacagatctatttttggacatttagtcactcttttggacgcttctttggacacacaaacacacataccttagacacatttttcaaacatttaaaattttagatcctctatatttggatcccatcattggacaatgtcaaatataaatctagttcaaatgtctatttgtaaattttttattgtaaaatatggatcccattgttgtagatgctctaagggaaaatacgtatggtcaattttgtcaagattgagaaagaaaagttgaaccatatataatataacttaacattgattatgtttttcttgtggtatgttttgttgttttgttgtttttagttgtagttttcagtcttactctcttctttgtttgattgtttccctattaatcgctgatgcaattcaaaaatggtataaatatttaacgttataaattaatataaggtgagcaggaaagctttatatttctttattacttgcaagtttcattacttgtatttcatttcaatatttataggataaagttttataacataaaaaatatagtagcttcaacttttgttattatatagtctatgcaaaaccattttaaaccgacagataaatgcacacaactgacaaatttgttgttggttgaggtatggattggcagcaaaaaggaacttttaaaaatgtgaactttgactgtgaatctcccaaaaactcccaacttcttcaccgtcatcgtcaagcttacgccaaccacttaatttattacacatagactatcatttttctagagacaacccataaacaataaagctactttttcaaatgtaacccccatattctttttgttttgctttgtcaataaatgtaaagccattttttattttgtaactgaaacattttcattactatttggctaaattagctaaacttttcttcaatcgtttggctcacgcttctttttttttttttttaacgcgtgcgtttaattaatctaaatgcaaaccataaatctataaatactttttactaaagagagtcagttactcaaatggtgaatagctttatcattcagtagctacaatttacgggaaaagaagtaatggtatccaaatatttaatttatagtgctctgaaagattcaccatatattgaaaaactagaaatagaatttttctattaccattttaattatggtagacaatgtaaagctcatgttttttttcttcccaaatcttgaaaatgagttgtttagatttttaaactaatagatgtagtattttttccaaagtcaatagccatggtttagttacagaaaataaaatggctacgatttggtcaaatgatttatggcttgtagattaatattcgatatttaaaattacgaggatc

SEQ ID NO: 719 - DNA, 85421 bp, Arabidopsis thaliana
gatctgcttctgttggtgttaattgcgtttggtctcttttgattaaccttgtttgtagtattggaattagcattgcaagtacttattgagtagtttagttgctggacttagggtttgtggtgttactgttattgctatttagagcagattcatgcacttttgtgtttatgtttagttaaattagtttctgaattttgctatgttggaattggtaaaagttgtgtctatgcttttagatttcagcatagtgacagtatgatgctgataggatttgattctgttcaattcgttgatgtatttaactgttcaattttggtgactttattggcagctgaagcgtaagacagatttggtaaaccaaatagttgaggtcaatgaattgaataccggtgttcttcaaacacctgtatcagggaaaggggggaaagccaagaaaacttctaggtctgcgaagtctaataagtctggaacgctagcttctggctctaatgcaggtgagtttggttctaaatgctctgtgttagtatgccaatgagaaatatttcttatgtgctcatctgagctaaatcttctttaaagagtggagatattgcaatgtagtgagaaggatcttttgtgttggcaggttctcctggaaataactttgcacaggccggtacttgtcgatatgatagttcgttaggtaataacttatttcattaactaatgtttaaaaaatgtacttttggataataagtttttttaatgatttaatctgcttcaggtcttttgacaaagaaatttatcaatttgataaaacaagcagaggatggtattcttgatctaaacaaagcagctgatactttagaggtgacatatttgaactctagactcccatattgatgtattactttctgtcaaacttagctgtatgttcctgttgatgcaggtacaaaagagaaggatatatgatataaccaatgtgttagaaggaataggtttgatagagaagacgcttaagaacaggattcagtggaagtaagcatgtcttagaactgtcaaatcttggattccttccatttgatgactcatgtgtgagcgacagtactctgaattttcttgtctgtcttaggggtctcgatgtctcaaaaccaggagaaacaatcgaaagcatagctaacctacaggtacagaacatgcctatatattctttaccttttcattgcacatttcactgcgaactctgttatgcaatgctcagtattatcaccagttttattattgttttcacgttaagggtatatcttagcttgcattgtcttcttgaacatcgtatgaatctgcattagtatgattcttgttatgcctgttttctgagagctaaatgtgttaggaggtaactaggatactagtaaatttaccatacacacaaacatcgatgacatgtaaccacaagctctgttttgtatacccgtactggcacctttgaatgatgagtttctgttttatgtttgaacctgttgaataagtggaaattggtactgcagtttttcttcgatctcagtcacttgcattgatttcttgttttgggtttttggttcgaaaaactattcatgttttataattcctgttaccaatcttacaggatgaagtacaaaacctcgcagctgaggaggcaagattagatgaccaaatcaggtattttcgcagataattttccttcccttttctgctgttttgtatcatctttttgagagtcgacctggttgcagagaatcacaagaaagattaacaagcttgagtgaggatgaaaacaacaaaaggtaagcgtcccctgctatttcttctgccgaaaggtacaataaaacatatctgtttgttctgacgctccactttttaggttactgttcgtcactgaaaacgacattaagaacctaccatgcttccaggtctggtctccttctagtaattacgtgtttctctttgccttgcattcttctcactggggaaacatgtttttgtggtgcctattttagaataagacgctgatagctgtaaaggcaccgcatggaacaactcttgaggttccagatcctgatgaggtaagcttaagagcgcacaaaaccaaatgagcgatgcactgtctgtaacgattctcacctcttatcctgccattaatcaggctggtggttatcagaggaggtacagaatcattctgagaagcacaatgggaccaatagacgtgtacctagtcaggtaacactgtcctcaaacgttatgcttgccctggataaatctgtaacatggaagtgagactgacatttatattgtgcttttttagtcaattcgaagagagctttgaggacattcctcaggctgatgaaccttcaaatgttcctgatgaaccctctaatgtccctgatgtaccttcaaatcttccatcaacatctggtctccctgagaaccatgatgtatctatgccgatgaaagaggaaagcaccgaaagaaacatggaaacacaggaagttgatgatacgcaaagagtttactctgacatcgaatctcatgactttgtcgatggtatcatgaagattgttcctccagatttggatgtaagtcccaactgcttcctcagcttaaaattttcaccaatgtacataatcacagtctggaaaagtaaccatatctaaaaaatcatgcttgacttaattcatatttacctgtatgttacattatatacagatgggtgtagattactggtttcgatcagaggtaggcgaagtcagcatcacagacatgtggccagatgaatgtatccttgatttctatcactttctgtgatttaatctaatctctctttgagcttttgagttttttcctccccaaatatgatatctgtttagagctccttgactctttcatcattagctggaccagactggaaccagatgattacatttgatcaagaccacgctggaccgagcgacaacaaaatcttggagcagccacaaactccatcgagcccaacaccagaagaatccactgctacgagatcacctacaggtagctgaagttaccataccacattacaagcaccaccatatatctgtacatagaatctgatttcggtgaaaccagagttaatgttgtacttgtacagtagctgcattgcattatcatagaatagagattgcaaaataaaagtagagaaaccaaccccttcgttgtattcttcattttttttctttgttagcttctcaggcttaatatagaattagccttagcccattgatttcttaatattggtcttgttcatgtgaaactgcaaaaccttttagagttgtagacgggtgcttagtagttttacatgctccatttccggtttaccaaaaaggtaaccagatcgaaactaaaacatatttccgttcatcaaaaatcttgacgaaaacatattggttcggttgtggtttgagagatttctttttggttcaaatcggtttctatgtccaatcctttgatatcactcgagatagtttcttacaaatgatatcatatataactttgaattcacctcaagatggtattattttccttaaaaaagaaatccatcaaaattgtgcatctccaaagcaatgagcaatgctgaatctccaagctaagttaaatgaaaaaaaggttcctcttttaacaaactttcccacaccaacatcctcactcaataatctcaacttgttttctcttcctctagtaaaaaaaaaaatgtctttcaagaagatgatgaagtatatactcaaaaccatattcaaacccatttttatggcatgcggttgcggctctaccgttccaccttcctctcacagccactacaccccgggaccaccggtttctcccacggttttacgcagcccatgtcctaagatcgatgagagcgtcgcgatggctaaagaatcaatcaatccgttcgaagattacaagaagtcgatgaatcagatgatcgaagagagatatatcgagacggaaagtgaacttaaggagcttctaaggtgtttcttggacataaacccttctcctcaacacaatctcatcgtccgtgcttttgtcgacgtctgttcacatctccaaccaccacacgaccgacgtgggaagtcacttgggagattgcttcgtctatatgttaacaatcctcttgataacaatgatgatgactcacaccaaacttcttcaaaatgaggaactaaatcctcctcatatctctctctatatatagatgttacaatattgtgaataatttcaatttatgattccatgactagatgtaaactattaaacaacaccaacaaaaatcaaagttatacctcaaagcctagctctaacgtaacgataatattttactgcacaaaaagttttgaagtgtaaattggttaaacaaaaccaaattgagttatttcgttttggtttttggatttggttaaaacgagagatgaataagataatttcgatttcgactgtataaatgattaacaaagattaattaaattaattaattataaatccctcaaaaaacctctaaaccatacaaaactccggcgtgtttctccgccccatcctcaacgaaatacaaatccctcatcctctgaaacgcctgccacgtcagcaaactatccgaaccggcttgatgacatttcccaaccgcccggttaacttcaagagaccgagcaacccggtccaaaccaccatacaatctctgctcacaaaacctcataatatgtttcacatcataaaccctatcaccgaagaaagctctaagcaaccctaaaaactcacgcaacgccaccggaagctgccggcgcgtgagaatcttcacaaggtaaccaaaatcatacgcgctgtgaaacgtcacccagctcacagactcgttacagatcaaccccgatgacatcatcagctccgcgaacctctccgattcaacaccttcgcgacggttccgctcgaaatcgatcccgtgacgacggagtagctcgatcgaatcaggagcgtgtggatcacgctccacgtcgaagtcacggaaattgaattcccagatgtatcgacggtttttttgaccgccgagatctgggaggtttccgtcggcgtcggagagagtaagaccgacttggatcaaacttaaagcgtcaacgttggatttgagaagattgtagagataattagggtttccacggcggagaacgtcgagatccgccttgtaaatcacgccgggaaattctgtatccattgagatgaatgggtaatcttcgacgattcctctgattaggtcaaactctgactcgagattataagcccaaacgtcacgaatcacgatcacatcggagagatctgcttctgatttgatcatagtttcaagtcccgatcttttaggtcttcttcttcgttgtgaatttatcaaaagtctgtttttttttgttgatttggttaatctgcaaggtttagttatatatatgaatgtgagtaagagagtgtttacgaggaaggagaggagaagaagtgtgagaaacgcgcacgtttatgattcaatgtgtttcttgacttagtctaagttggcttctccttcgtgtatcgaattattgcaattcaagtcgttgtatttaagtaagtacattaagccgacaagaataagaaggccaagtacattaagattttctattggtttttaagagttgaataaaacatgtaaacgttacgacttacgaccaatgaactttatcaggaatattgctatattaccaataaacactgaatatgtaacgacgcactaaaaacgcattaaagggttgaatcattagattatgatgatgtctacacgtatctgattgtgctttaatgttttcacgaaattgtagcaacagcgaagcctaggttgagcccttttcagttttcattgttccctagtttactcatcgaatctcatgactttgttggtagtgtttagaagattgttcttccagatttggatgtaagtcccaatttctagaaacaatatcacaaacgtagatagtccgtggagttttccatcttcagtcaatataataagaaactttttaggacgttgaccttgaacagagttgttaaacacatgactgtttttctttcatttcctttgtttgcaataacttgatattgttccatgttaatgaagaaataatttattaattccaaatgcatcaattgtaaaactaaattatttaaattatgtaaaccttcttttgtttgtaattttgtttttgcatcaattgtaagcctaaattatttaaaacactacacacttctttctccgccttgtgttgtgaattattttctgttaaaatttaactgccttttcttggagacaagccttaaggttgttgtcaagtaaaacttggaatcacggttggagtagatgacgtcacatgagtcatcaggggaagaggagagcgacatgttgataatgatattattagaacagtcaggctccagaggaggcaaggatatgactttgtgattcaacatgttggtgatatagacgcaggagggatcattagaattcacgttgatcgaggagtataatttatgtattatgacgtaatgatagaaaaaaagaaggtttaatataacatgaatgatttagggtaaaaaagagagaggaataagatgttgatcacaactttgacaaagaaaaatgcgaggcacttcctcattgtgttgaacaccaacacaccttgtgtgttgccatacttcacaaatatcacaacacaccattctctctccatcttcttccgttgctccacactcacactctattctcttatccttctttttatcatcatcttcataacatttcgtcacttcaatgttcatcatcattcctacgttcccttctaacaccaatcccttattcccattcaaggccatttcatcgacccttgtgatctctatttgaccacccaccactgactccaccacgacgtctcttagttcccaatagatatctctaaacactctttctgcctctccgtacacttcactcaatgttgcatctttcttcactacaatgcattcttgtggaggaacttttatctcgttgttatgatgatgacatttccacgcgatcgtgcagaatattcctaattcttcccctcgatctaagtgtaacgttttcgccgatgtatctctaatgtagtgatactctttgatgaagtacttagcgtcgaggattgctcttgaagccattccgatttggttcaatatacctcctatggggcctaacactcccttgtagtccatgagaatgtgtttgtaaaaataaaacatgtctttcataacttgacctcttgtgatcttattgtgaccgtttgtcgccatcttccccattgagttttggttttgaagggttatgagttcattgttactacttggtaacaaatttgatatatcctccaaggaatactctagcactttcttcaccggatttagactacgtcggaccaaatagtttccaaccacctggttcccaagcgacttcaacacaaaatcaagcaaaccagtgtccccaatgtaatttctagctgcatccctcacttcttgtctcgatatccatcggtattcgactcttttcagtgactctatgaccactttgatagccatttggatccgtttttgagaccatctgcagttggtactatcaatggagatgatttggtttcgggagttactcatgtagttatctcttggaagacgtgaatggagatgaagcatgaacctgaagaggtcactgagagtgatcaatggctcggtggataaactttggtactttgacaagaggattggagtttctcggttaaggctggttaggtgatggttaagcaagcacaagggtatgttacggaccgactcaagtgccttctcgtaaatcttttgagtcactccgtatgtccctgacccgaaccggtagccccaacgaccgaaccatggctctccttttgctaccccatgcagcagcctcaactccattccttttttgtgcgacgcgtcattcaaccctattttcctatatgaacaaaaataaaatgactcattatgtgtaaatccaaattaatagctaggaataatccattatgatatgaaaactaacagaattgtgttgaatggttattgtgttgaatggtttatatgatatacaaatatataaagtctaattagtacctggcctttaaaccggtgcagagccggtcccacaaatccatgacctgatgaccggttaagtcggagccggtttcaatgccgttgagagagagcaagtgaccaaatccgttggagtgaaagaagccgtgaaggacatggccttgaagctccacaagatgggagaaactttccttttcgggaaaagcgtagcctccaccttccagttttaaaaaagccgccattgtttcctttgaggggatcacgaaatggtacttcttgttgcatatcatttgatttccccaacctgcaaggttccgtataaaccattgtataatatatatttttgatctttacataaatgcatcacttttaaccatatattaaattattattgctatttttgttcataagtacgtgtaagcttgtatatagatatatatgcaagaaaaatgcttacatgttgagctagctaggtcaactcttactaaattttcagcttatgatcttaggtcatatatagttatatacgaatgtattcacatgcatatatagatagatacgcaaaagaaaaattgtatacagagagagagaagggaaaagagagagaggacgtcaccaacatattggcaatggttgcaacggagattgagagaggcttcgatgggctcttctacgacaaagagaagaacatagagaggatttggatttcgttgaatctcgagctgaaaagaccaacttcccattagaccggagctctcaaagtgaccaaactcaagtagtttagcgaggttatctcgaaaagacaactcgttcatctcagctggatgtccagactctccgaacgtcttcagcctaaaaactctactttcccctctcttcctcttctttggaatatgttgctgatggtctgttcgaatcagattcgccatcgaatcagaaatttggtttgatcttgagaagagagggaataggaatatgatagatttggatatatattatgatggggtttgttataagaagagaccgaaaagtgttgaggaagtgtgttaagggtttagagatatagtagtcattaagatgatggtcacacaattagtgctttgtggtgatgaaaaggaaaagtgagtgagagaaagagaaaggttaattaaactgtgaattaacaattgttaccattggattgtatgttaggtcttgatatgtgcatgacttgtaacattaacaacttttctttcttagccaaataattaactatttttcaaaaaaacattcaaacccttcttattcccaaatctaatttcatttctaaaaatacttctgtaatattcgaaactggattgataattttaatacatatacatgtatttgtgtaagaatatgtgacaaatggcatgcaaaaagatcgagggtgaggaatgtcacgtgacttgggaacatgagaagataatataataaaataatgaagacatgcatttgagcttctcacatttttaaagaatcagattaactctgtgttccgtcaatttctgtcatgtctacctgcacatatatgcatctattacataacacacacgtgtgtgtttgcgtggttggacaaactcaatttagtcgattatcaatgttttaattgatatgtagtttattgatttgtgatagtgttgatgatttgtcatcactatatgttcaaacccacatagttattgttaattaaacataattaatatgttacatcaatagaaaaaggtgtttacatcaatagatgttttttagcggtttaaagaaagtttcaaattatgttctcagaaaaagtggtttgcaaattgcaatggtatttacttaatagttaatatattacattcaaaattgtactcaccttaatgattgcagtgatcacaacaactttgggtacttacagtcacttcagtgcttcaaatatatgtttttagtgttacaatcttcgtaaaaaaaaagagttaaaagttcagaccaatcaaattttaatctttttttaaaattaatgatatgccttgttaaatcccgatgctaacaattgcaatatttgagtttgaatcaatattaagcatatctaactaaaatgttgacctactatcacttgtttagtgtttaaagtttaaactttgacagccactaatagtataagtaggtatatacgtacgtagactgaataattgttgataattttgtatcatttttgtttcacgattcttagtaacaagtaacaacgaccagcgaggcagcgatacattatattgttagttgaatagtagccaacaagtgactttgattcgtttttatagttgttggttgaatgatagatttctttgataggtcttacgtcagcgaaaaaatatatatttggttttggtttgtccaattgaaattgccagtagcggtaaatataatgataaaaatgtgagaaatctacttaaaggatacgtgttgtttcttttgatagttggggaaaggaacaaaacacacgtaatgttgaatccgacattaatgtaaaaccaacatgcattttttttatagtaagtttaggtgaagatttttcacatttataataagcataactctttttcatgtttttataaacatttaatttgttagttcaacaactttggtaacaagtaaaccaaacctatttattgtttgacgtatgatgtgtatatatttatgtatatacttcgcatttaacgctagaattacatagtgcaaaaaaaggaaaagaaaaaaaagtcattgttccacatttttcatattaaaaacataattaattgtgccatgtacatatacattgaacttataacaagtcaacaacgaccattttccatttataaaattaaatatcgcaatagtccgaatacgtaaccttttgatgaggacacaatgacacatccatcatttatactagctattaatccaagtttaaatttttgtaatcacccgttgcaaagaatcaatattaatattgcttagttttctacaagaattatccatcgttaagcagtcaatattacaaatgaagttaaggatgttttaaaaacataagtatataggtttcgattttatgaacatatccgttcattgtggattaattcaaactatcaataaatgtggcaacaaattaaggaaaagaaaaaagaaagaaaaataaaagaacatccttaatttaatattatgtattttttttttatttttttttttaactagtgctcttcttgctatggtttcctgtgagaaaatcaagcaaaacatggctgttgcatctagggcatctagggtcattctctaaagaagtgatgatgtacatgatgcaattagggcagccaacgaccaccattgatttagcctctcctcctccaccctcagcttcctccgagcataacgatgacgatgaactctcagtgagcaaagatgaatccaacgacggtgaaatatttagtttcagatcaagtccaaggttactcgcagcttcttgattcatgttccttgccttccaagaagagtatactatgtgtgttgatatattattctacaagaatcagaataagaaacacagtaaaacaaaactttagatggagatccatggtttataaaacatgtatatatataaaaagaattgatcaattgaatacttatttttctatcgatcaatcaaaaagtgaagatgacaataacaaaatttcaacatatgagaacaaaaaaaattcgatgagaacaaattaacttggttctcgggttccaaagtagctttaccttggtgaagactagtagtagtttagttcttgttcttgagatttaaagagagatagtttgatgtctgcatgttagtggctgttatatatatatagatagaggagaagatacacgcaagatgagagagggtctcattgaatgtatattaatgaattagtaggattagtttcatctagctttcaaaataaatattcttgtagaaaataattataatatgaggtgtttgtaagcaataaatgtaatttgaaaataatagtatgcaaaagattgagtatatgacttgtgctttgaaattgcatttattaccaaatagtatttggataattacaaaggagatatttttgtccattttcataaatcatcatattattagtatgaaaatcgaaattcaaattgagagggaagaagtagacaatgcatttgtttcaaacttggaaggttgtaatgtagttaaaatcggtgttgacaaaaacaaattgtagtttaatgggtagttgatattattagatttctaaagtcgtatatgatgatactttttttaataaaccgaaaattattgttgaaaaattgataagtattggtgaatatgaatttggatagcttgacggctagacgcacggccaacaaatgatagaaagattgaccaaaaacagatgaatggcttttgactgttaatattattgacttttagaatgccaaatagtaaaatggaagaataataaatgagtatgtgaaaattcatgggagatttggttttgtttgacttagaacaaatatggagttgtggttggtgtctaataagagatttatttaggctctgactagtgatgaaatcatggaaagaatatgacataagattgcttttgtcatcttagactttcgttagcctcatcagtcaaagtaaaaatctaactacacacaaccaaagtttgactataccaagacatcgacaatgatagaatcaatcaaccataactaaagatattacaagtaccctaattctcaacttttattacaagtacttaaatatctcaatcttacacgtgaataaagtaaatcatccttctaatcaaaacatcagcaaggtttttaacacaacaaaagtaaattacaacagtttttacgtaccatttgggttatttattagaattgatgtaaccggaggaaatactagtcttccacgatgtgtttcctctcgagctcaatgaactgtttgttattatgggaggtttcagtggcgtttcgtgtctcgttctctcctttgcatcgctgtaactgcatttgaagacttcgtacaaggtcgtttagcctctggatatgtctctcttgtgacaagatgatctgtaacgattaacaaactaagaattgacaggtcttcttctattttcaggttcaaaattatgctgaagttatgaggttcgtcatacatccaatggaactttaaggttgcaagaccaataagtctatgtttctccactaacctcatctatttgatgcaatcagggaaaacacaacagaaggcaaaaaaaccccgaatatttctatgcaacattaaaaactcagatcagtcattgatggattccatagacattctcaaaaagaagaagatagagatatgaaagccagttacaaagaatgtttgtccagagactcatgagactagaatgtcgaggataaagtcaacaacacaactactaaggcatagttatagattgactcaaaaggcaagtgaagcagatataggaatcttaagcatcagagcattctaagttaactgacactatccaattatgcatatctctgctacagttgtactaatctataagtcacaatcccaaaacgaattctcaggtctttctcatacaactgaacacacaaaacttcaatgaaaaagagtttaagaatgaagtaagtaccttctccttgacagcttcttccctctttgcaatttgctgatgtttctgagacaagctaggagctgcatcaagctcaagaagtggttgcctccattcaaactgagaagtgactataagtataaccagaagaaagactagcatgatcggcctcgacattttctattcagctcttacaaaacctgttccaaatttcacaatcaatccatttcataccatcctaaacacacatccaaagaccacgcctaatcgaattgagacatatatcgaaaatgagatcgatgcgacttaaaattcacctactcacttcaaattttctaattaaaaaccaaaagtagaacaatgtaaacagtgtaagctgatactataaaaagcaactccatcaaatcaatgacctagggtttcaatacgaatctccttcatatgtaactaacttactaaggataagcaaataacacatactacagaaaaactgaatttcctcagcacaacaaagcaaaattgaagcatcgtagaagatataacgaagacgattaagtatctccaacttacagatcgatttatcacagtgaaatcaaacttcattatcgaatcatcagcttttctagggtttcttaaaccggaaaaattgacgaaactgatcgagatcaataaaatcggcttgacggagtattgaggaaacttgacttctccaaaatgggttctcgtatagaagaagagagaaagaaacaaaagcagaggtttaatggcggcgagaaaattctacaaatcttagtgcaacaaccatctggacgagaaagataaacagtacggatttggaaaatagtcatttactaatttgcccccatcatttatccattctctgattctcattaaacacaccacttaataagccttgaagtgtaaaaactatatccactagttcttctgtgcttgatatttcaggttttgatttggttgcacagatttgaagtagaagtgtaaaacataaaccgtttacacaaaaacatcatataatccttgtcaatgtccgagaaaagatgatacaaacatagctaggacactgtttttcgctacttccataagcctcttattctagataaaacaacattgctatcagagccactacacctataataacatcccatcgtgccttgttcactgatttgatcgagtataaacccacgaagcagctcgacaatgattccgtggcgtcttttcctttcttcttctgtgatggtctttcctctaacagtgatgacatttgtttgtctatcatgtttggtaaaggaagtacccttatctccattgatgctgattctagtgttggcacttcgtttggtgtgttccctgtcatcaccgcttcatcgagattgatgatttcgtctcttaggatatccgcaaagaaatcctcgtcattatccacctaaaccacacacacataacattcattaagaagaacgacaacaatcaagaaccatcatacaacaattagaagccaggtgacaaaacctgtagattttctgatgactctgccatctcagcgagtagtttctcccctgattcacctgctaggtaaaaatcaaccaagttgtcccaatcagacgggctccctgaactcgtagcgccattttggactttcgcatgcttctcggctgatgaatttggctttggtgccttctgacttgtaccactattgtattctttgttcctcctaacccggcaaacaaccatagcatcatcctagaatttacataaacataatcaatcaactcaagccaaagacaaaactcctaaaattttactgtattcctcttagagactcaaaaagtagccaaagtcaccacctcttatgtaatggttaacaattaatctataagaaaaaacaaactctcgagaacagttttaccagagatactcctttcacgcagtactcgtgcataatccagtcagttctttcgccttttggtgcacgaccaatatggaaaacaagcgtcctctttgttccaatgacctcagaaccagacttcacatcacgctctttcccagttgctttccagtatcccatcttcgttgctctcctgttctgtgaaccatgtggatactttttcccacgcgcacagaagaagaaccactcgctatcagatttcacaatcgacttatctgcaaagaacaaacacacaaaaaaaattgtcaattccaatccaagagccaaaaaatagaaactttatatcttaggcacccaaaatagagatctctcctgaagcctgaagaacaacaaaatcaaattccaagtagaagaaagacacaaaagaatcaattggttcgaattcgaagacaaaccgggtaaatcccaaggctcgaaattgtaaatctcaaggtccggtataacctcaacggacctctccaagccatccatcttccgcttcaggtaatacgaaatcaactccacatccgtcggcgagaatttaaacccaggaaacaccgtcgacgcttccatcgacgccgccgtatccttagaaactccaaccgccttcgtgtccatgaaggctcgcgcgtatacaacagtcgccacaaaaagagcgcgtaagaaatcggccaccgcccaaagagtaaaatccgggaattttcgataacctgaaggatttttcttctcagtgtggtctcttctcacttgctcagggagcttttgaattgttattggaacacttcacaggtgcacacatatgggtttttgcatacgtgttgccaaggcattgcttaatctacgtgtgcatgccacgtcactaaacctagttatattataggttttatttcatttagacccttaatgtttttacgtactcccaatttacgacttattgtttagtgttttcagataaagtcccaatatatatccgaaatcttactatcgatcaatcgctcacaattatatatcccaaaatatcttgttcaggatctcgtaatcaacaagcgttacctcaaagtttttgttgatttgaagcttaagggttaaccacttatcattacaagaaaacttatccttcttgatggatttcaactgctccacaagactttccatatagttaagtttaatcaaaaactcatgttcaaaaaagctaaacaagaaaggtgaattttcgcaaatctccctccgtaaaacctcgtacgtcttcgaaatagtattagtagtaaaatctgtggactatgtttctgtgtcaaggtacgacagggaaaacgaaatgtatgagtgaactttattgttgtttccatgatgaaatggggttacaaattacgatcaaattatactcaaatcattatttgtaaaaaaactaaagtgatattaacgtggttaactctgttctgttaatttttttggtgatgtgaatccaaaaattactttgaaagtttctcgtacaattaaaagtttaaagttgatgatgaacggaaactataaacaatcataacaagaaattctccaaattatttcagcaacaaatttatattttgtcaagatcaacaatgatcgataacgataatatgatttaagagttttttcataccaaaactctttagaattaaaaatcctcctttcataggcctttgaactaaaaaatagaactcttcaacaatattttagtcaaaagctaatgatacgtgaaagagttcgataccttttataacaccatccaaggatatagatcaagtctaaaactaagaaaagagataaacatctaatcttctaatcctcataccttcgaaaagtaaacaataattaatattgaatgctaacaagtaacaaccaaaatatataaacaaacgctttgtttggtttttaaggttggtttgttatcgagggggtattttatcttttgaattttgtaaaaaatctataaatataggtgatgattttagaaaaaaatgaggatttttttacacattttggcatttccccctacagttaaaaagagagtaaaaatcaaaatatatatcatgtgttgtacaagtaaacacctaccaaccaagcccatcaagaagatactactactagaatcactcatttcctctatatatcttattggtgacaaactgaccagtcaccaataaatgtctctagtcacggcggctcctccggtcaacatcgatcaaatctttcccgtggttgacgtatacacttgcgattcttcctccatcgtacaatatgcatgcatataaataccaatataggtgatggttattgtaaatgtttttagagaaaatgaggattttttaaacccatttttcccttcactaaaaaagaatcgacacacaaaaagagagagtttataaaatacacgataatatcaaagttaaacacacaccaaccaagtaaacaagatacaacacaattggaatctttcttctttgacaaaaaaaaaaggaatctctctctttctctgattctctcatgtccatgcaacaagaaacgtctcacatgacggcggctccacagaccaacggccatcaaatcttccctgagattgacatgtccgccggcgattcctcctccatcgtacgagctacagtcgtccaagcctctacagtcttctacgatactcccgccacgctaggttcgttcctgttttctcgatttttgattcactatggttggtgagatcgctttcgatgccttatccacgaaattttgtcagataaggcagagagactgctttctgaggcagcggagaatggatctcagctagtggtgttcccggaggctttcatcggtggatatccacgtggctctacctttgaattggctattggttctcgtaccgctaaaggacgagatgactttcgcaagtaccatgcttctgccattgatgttcctggtaataaagtcctccaccatatctccgattatgttctcactttttttctttcgattttggatcttagcatgaataccagggcacgcacttattaccacataaatccattgttctctaactagctaccaacatagaacaactaggcaaccctcttttatattcacttaggtcgcgtgttcgattcacgttcactgcaccatttgataagtttgaagctatgaactcttatcttttatcacttctcattccaagatacaaactcaagaactaccctaacaatggagattttttcaagagatctcctaactctcctccataaaaccatacgtttgttaaaaacacatcaatacatgcataacttcatcaattctcttgacaagaggttacaaaatctgtttcttcttgctctgttttaactccttttcacatgacttctatgcttctctttgcttattcacgtgtctcataacctccttttcagctaccacacgtatctcctagcttatcacacttaagatctaataaattctcaccaaagccgtctttaaaacagcttctgttctactacgacactgtaacagaaactgcaacaaacaaccaaggtggttcttgtttttttttggtatcaaggtggttcttgttgctttgagggagatgcctcttccttcttacatgagagcttgtagcatcaccaagatctgaccagttcatcaagagacgtagcttggttgctccacccgtgactccacaacaagcttcattcaagggaggcacagatgctccaagagtaagaagttgtagataagatcatttcagcaacagtcacatgggcttaacttatgaaaggcccagtgacttgggctttcacatgggtcaatctcatagccaataaacccaacaattgttagtgtgatcatctactaacaattgagtgtttcagtctctactagttatagtgtttcttgaatcaccaagtgtgtgtaaactgtaaattacattctacttattcatctgtgccatcttgtgttaggccctgaagtggaacgattagcgttaatggccaagaagtacaaagtatacttggttatgggtgtgatagagagggaaggctacacgctatactgcaccgttcttttcttcgattcacaaggtctgttcttaggtaagcaccgcaaactcatgcctacagctcttgaacgttgcatttggggatttggagatggatcaaccatccctgtgttcgatactcctattgggaaaatcggtgctgctatttgttgggaaaataggatgccttctttgagaaccgcaatgtatgccaaaggttagtctctctttagcttctacaaagggacaatgtatcagtatgttgcttgtgatttgatcatgttggtgtgttacactgttgtgtttttttttgtaggcattgagatttattgtgcacctactgctgattcaagagaaacttggctagcatcaatgactcatattgcacttgagggtggatgttttgttttgtcagctaaccagttttgtcgtcggaaagactatccttctccgccggaatacatgttttccggttcagaagagagcctaacaccggactctgttgtctgcgctggtggaagctctatcatttcacctttgggaattgttttagctggaccaaactatagaggagaagctcttatcacagctgatctaggtatattattaattaacatttgttaatcatcatcattcattcttgaacaaaaagttaactaatcatatcctataaatctctaacagatcttggggacatagcacgagccaagtttgattttgatgtggtcggacattactcgaggcctgaagtgtttagcttgaacataagggagcatccgagaaaagcggtcagcttcaagacgtcaaaggtaatggaagatgaatccgtctaacaaatgatcatttgttagacccaaactttctctgtaatttgatgaagtttatctgtagtaaacttcaagacttgtgttgtaattgaaatcgataaaaaatctaaaccgttagattgagtgttgtcttctattcctcgtttatactatgcttggttctgctcgttccatgttcttcaaatttgtacatgaaactagtgattcaataacttgttagggattaagatgagtcatttttacgaaaaagatgaaagaaaaacaaacccaaatggccaaaacaaataagctaccaattctctctactcttccgcaacacaacactctctatgggtttgggccttgtttccttatttatttccctgtctcttggaatgggcttaggcttttctgtttgtatccaccctgtgaaaacctaaaacattcatataaattgtttttttttggtttggcatagaggataagcaacacattcgtaccgaaacaaaccgaaatatggaattttaaaaactctgttttataggtttaaaaattatgtaatcaagttctgggataaaaatacgaagtatattaatatataggaaaactcatatttttaacattcaaagtgttatttggtaacaccaaaatcgaaacgaaaagtctgcccatgtttgagacgatctgtccactgacagttgatttgctagttgctatattagtaacatcaatgtcttcaaaatagtgattttgtaggtaggttcattgtatatatcaatgtttattatacagacaaaggaggagacaaagagataaaccacacacgaacttgataagatcatcactctgacaaaatatctccctataatgcgaatgtttttagcatttgacctttctcattcaatgagagaaaattagttagcctagtggcactatattatgcttcaactttagtagttttattttgttatacgagttaatgatttatccctaaactatgtaaaagtatgaaacaaaaaaagaaagacaaacttttggaacccaaaaccccttgatttggtttaatggtacatatatatatggttctaagctaaaatattatattgagtgggggacatagagtaaggctgattggtatatgcatatatctttcacacgaattgacctattacctaatcatgtgtatatatgatcgaaaaatgaagatccgttattgttcgttattgttcatgtcatcttattaatttttgtaacttttttggttgaattgttaccaaatattcccaaatagggtaaaacgtaacggatatatagttgagacaaaatcacatgggaagatggaacgatgctgtccaaatgtctagacaataatagagaaaatgtcttgtttcgtttttgattcaaaatcttaaactaatcctttcttgaatcaattatatatctcattattgttcgttcttattctcattgttgtactaatcattatgatttaatttacaccaaatcaacgtttccatgtgtatatcttcaatgccaccaataaataagttctttaatagttatatacaatgtacaattcacctccaattcattccaagcatgatttgtttggtttccccttattctctacatctacattatggtctaattagagttagttacaaacataaaaactcgtacgtaatgaattgttgttctctaaaataagcacttaagttccgtaatagacttcaaattctgacaaatcacttgattacaaacttgaaacttcgatcataaaaacggaatattttgatagaaaatgcaaataatgatttgattggatatgtgtagtaaattgaggttaaaccattgtagacgaaaaaatgtgatataccggcaaaaaatattccgtaattgattttgtatttcaaattaaattgaataaattacaaatactgaaatattatatactataaaaaaaaatgatttctttttcttcctcgccggcgctagcggtggtgattacacaaactcagagcttggtaaattccgatgattccactgctctgacgatgaaggaccaatacatctaacatttgaaacaatgtaatctctcaaagtcttcaaagactcatctctctcaccattctcaacaatcactgatctcttctccaccggatcatcatcatcatcatcgccgccggagccatcaaatctccgacgatctttcaggctatcaacataaccccatttactaccactctccatgttcaactcaatggacttaagatcactctcctcatcatcatcagaaccagaaccatcaatcacctccaaaatcctacgaatctccgacgacccttttccttcttcaccatccaaaacccgccggagctccttcttcagccgctccacggcggcgtatttatcttcgaactcaaacttcgcctccgtaagcttcatttgaactctctcttccctcaaaacatcagctatatgcatcatctctctctctttctccatctccttcttatcatctccgattcctttagttagctcatcacaaacctcttcaagaacatctttagctctcttctctcttttcatctcctccttcatcttcctctctgtttctttagcctccgtgagctctctccctaatcttctattcatcttctctgttcttcgccggagttttctctcaaccatcgcctcttcttgtagactctctatcaacctccgcttctcctcttcctcttcatctaattcactcattagatgctttagtgaagatcttgctctgtctagttcacataacaaagcagagatcaaacgattgcttgctgtcttgtgatcatctccgagctcaccgatcctttttaatacctttaccagttctttagacgttgttaatccgtcactgacattcttgaaacgagttttcacctgtaatataattaagaatcagacctttcttcttccgcaagaaaagtgtttttagggtaagattgcaaatcataccgagtttgcgccaatgattttgtattcaattgggtttaatttctgaggatttgttgatcttctacgaatcatatcgtcacagagatcgattctctgtgcaattttgatttttcagacttagaatttcagaaagaaaaaaaacacagaggaaacttgaaactgaagcaaaccctaacctctgagcttagacgagaaatcggatcggatgatcgtggcgggaaatcaatggaagagaactctgttgatttcttcgctctgtatctcgatggtttcttgcttctcaagcaatctttatcagaatttaccggagggtctgcgtcgtcgttgatttcccacagcgtcgcagctagctttctcgccgacacgcagcttttctgcaattgatgatgatctataggaagattttccggcgaaaacgataacagaactggagttttagcggcggtgatggacttaacaggagttcctgagccaccgtcgtcttgagcggctcttttcccggcgaaaattgcacgtttgaagcggtttcgacgagcaagtgaagaagaagaagaggaagaaccacctctcttcctgatcttacaacctttcttccgttgttccatagttgatattcaaaacaacaaatcagaacacaaaattttaccaaatcttgccggaaaacaagagaaaaaaataggattgaaattggtgctttttaggagaagtgagtcatcttctaagatcagaagcagtttctggaagattttgtttttgaatctctaaatagactttaaagtgagtgaaagagaaagataatacaaaaagtgaaagttaagatgatgtttttacttcttcttaaaagcaaaagaagagaagagtaataagattcttgatccctttgaagacgttgtgatttgtgaaaaagaagttttgaatctgggaaattgtgttttattttcttgggagaagagagatgttgaagaagaggaaagaaagatggagacagtgtggtgtttttgtgtttgtgcgttgtctatttgggcaatgtaaattttctttggagggttcatgaaccgatgttgtccaatttcgtcattaattttaacaaaaataatttcataatcaatgagtacaaatattgttgccgctaactcattaatgcaacaatgacttgcaaaaagatatcatggaatccatgtttccaaattagtgctttctaaagagtttagaatctttagaccacaagttaacctggtttgatcggattagacaggattctattaagtttttgtaggcttttctggagaagaaaaaaagaagagcatcaaataaagacaacgtactagattatcaaaactagcattaacctctatgctaacgtcaaaagctaacatgtgttttctagaacttgccaaaagtcgaacagaacacgggtttaggtcacaatttaacctcgtttgatcggattaagacccgactcatttcgtttttgattagtattttttttttgggaaataatatgaacgtcaaaagagttaaagacaacgtactacgtactactataaagtagcattgttttcaacaaacatgaatatgggtgacatattttgaaataaatgaatatgcatagacaaggcaagatacatgagccaagaaagtatactccttttttcttatgttttaggaaaaaaaattgtattgaattagatgatgtttttttatttttaatgcaaaattgattagtttttattgattttgacgatttatatcatgcagattgttcaattatgattgaatagtgtttagaaagataatatatagtatttttgtttaaatgcgaatatttgttatacacaatccaaaaacacaaacagaaatataattattataaatcattttcgtttaggattgaatagttcttcattttatgttttaggattgtgtttataaacttatggcttttgtctagagaggtaggtattaagatcaatacactaaaattttacagacagttgttataagttattggaattgtcgcacatcgaaactttgacaattttgacactaatatatatagtagatgttcaatcattgctaaaaatctctcattaaacaatcatagttacacaatgaatacatggttttagatttttggattcataaaaaaaaatattgctgctctaaaacatataggattttttgaatgtaaatcagacataaaatttcctagatgccttaacgattactactatccaatcataattcacaactcaaaaccaatgattgtctctatactaatttgaacacaagttttgtgattggcatatgaattatgaaagacaggcacatgctgagtacaaataatagtaaatacttatggaacatcccaaagagatagatgccttctctgccagtcaaatcaaatccatcctccagattcttttaactccattacaaataatttaacatattactaatttaaaaataaattaatacgagtaaaaaagaattttaaaatgtgtgaagactagagaagtgccacgatgatagaagaaaaatacaacatagatgaacggttcagattaaaaagagttctagtctgtttctcttttattcctttgagtctttgactactactcacatatcacatggagaatttgacaaaaatgtcatatcactatacttttattcaatatactaactactcttgcagcagcaatctaaactctactttaaaaacgacgttcttttttgtcaaataagctaaactaaaaaaatatcgtttacaatatacaatacatactatgggtaattacatacattcaatacgggtagatacggacattttgaactagcaaatcggttttaacattagcattacaaaacaaacataggaaacaaaagaagatgacaaaaatttctaactcttctctacgtcttcataatatatcacaaatgtagaccacatttacacctaatcggaatagtctgcactaaaattaatttagttttcttttctgaaatcaaaattcaaacttctcattgtccaaactagtgtttccacatttttcctagcatttagcttgtatcattttatttctcttttttattacacactagaaactaacacaataaaaataacaaatattaaagcgtgaatagaatggtcccatggtctagtggtcaggacattggactctgaatccagtaacccgagttcaagtctcggtgggacctattctcctttttttgttttggtttcaatgacacaaacattttataaaattagatatagcttctcaacagtgcagaaaacaatttataaagaagatcgaaaccactttcttcctctcctatgttctttaaccatatcaaaatactccctagccgttggatgttacagacataactgtcccttcttttaaagagtaaaacactccctctgttgcagtttactcccacttagactctcctcctaacccgatctcaacctccatgggaagatcaatcactacactcttgctttgcttcttttcactcttcttcttcttcttgttagctttagtatctatcacttttactaaacctgtctcttggacgctgcttttcttcttcttctcaataccgtcttcagaaccctttggcacattttcccgggaaaagatttctgcgaaagaggtttcagcatcatctatagcatcgagttcctcctttggagtagcccttttctgtttcttctcagcatcatcatcatcatcattgttacttgggattgtcttctctttatgttcttctttcttttttgtttcaacttgatctacatttgtgttgctcttagacttcttcttcttgcttttgtgatcctcattgttgacttcttcttcttctgacttatttctcttagagctcttcttgcgttttcgatcttctttagattgttcctcttctgctgatttattgtgataggcatcaaaggtttcatcatcggtatcaagccgaatatgctttgcattccttgagcttttttctaagggttgagcgttgaatacattcactgaagggagaagcaacgttctcacctgcgacatcaaaacaattttcctcattcttatacgatttcttcacgcagttacactaatcacaatggaaaaaagaagtagaaaaagttgttttaccttcttagctgacttatcgttatcagaaatcgggtttcctcgaatattcagatttcgcaagcaagatagtgtacccaaaacctatcatttgggagcacacaaatttgatggtttattacacgatcaccacaaaaacttgccacaagctagggaaggctaacaaatttgctttcacctatatgaattagactatacctctaaaccagagagttgcgtaatcacattgtttcccacatccaaattgagtagtcttttgttgactgctagttctgctgggagagcctgaacagttaagcgtaaatgaaataacgattagcaatataaacaaaagattgtgagaagaggcaggtttgttctgtagattgcataaatgtaagaaagatcaccttgatttcattgttcgcgagccgcagctctttcaaatcagagcatgacttgagagaagagccaatagcttttattctgcagtcagacaaagaaatctgaaaccgagatgggattagacaaggatcagtttagttgtgattccgaaacgggaggaaaacaagagcttactttggagaggtttttcaactttgaaagtgagtcacctatttcactgattgggttcctagaaagaactgcatgaatgaatccatacacatttaagtagaatgaaattaggtgtaacatctaaacagtaacatgttgattttgatgtaaaagaacataccgagactgttcaagtctttgagtaaatcaagcttgcaaatggaggagatttcattgtctacaacaagtgaaacaataacgagtaagtaatcaaacagtagcttgtggatgcaaagacataaaaccgttgacaacttaccattcaagatcaaggcccgtaaattgacaagagaagagatctcattcatggatttgagcttattctttccagcattaagcacctgatagaaaacaacatcacacagtcaaataaagcacacatattaactcgttttctgtcaaaacaaagcttaatcctggagaacctcactattggtaagtgatacaaatctcaaagaaacaagctcagtgatatcagtggaactaaccgtaagcttagtgagtgcttcaattccatttaagctttgcaatttgttttccacaactgaaagccatttcaagttcacacaagacttgagtccctaaaaaccaattaacacatcaacatataataagctctagcaacttaaaaatcaaaactttggatgctatttatgcttataaaatgagatttatgtatcaatcaacctgaagatctgttagattgttgaaacgaagatcaagcttttccaagtttttgaacttgctcaaacaagacacctaaatatacaattaaacaattagggtttcgtatcaatttctacttgggaacagagtttcagaacagaaacaatactcacgtcggtgagagctttatggccgagattaagttccttgacggaatctgggtcattggtcttcttctctttcaatacttgttcaacggttaacgaattcatcgccgtcttcgtcttcttccttgtcacacaaaaccctagtcttttggtttcaccttattcaaaagattgtctctgttcccaaccgtgataagtctttacccaaaaaccccacagttttctattgtttatacatttgaccttgttattattgtacggatcagggacaccctcttatggtactcctcccactttgatcctcaagttttataatctccgactctgctgactctgttctgataatagagttttttttctttctttttggcgcaacatcaacttttaacagtaaccaaatagacaattacacaatgttatgttccacaaacagtttgatcttgaataagtgtattgtaatgtaacaagggaactcaatatgaaaccaaaagtttgaatctcacgaccatgtatgtgtatacacgtgaaaccatatttcagttttcattagttagcaccacaaacaaaaaaatagcacataaataaatgaattcagagaaaccaaattgtaatcccattagacattctccatattccgacattacaaaataaaacgacagaaaaattatgagatgtttcaacaaaatgtgcgattagtgttcttctcatgagatgtatttttcttgttgctcatgcaaaagctttgctgaagatttagcatccaagtagagtgatgttacttcctctatatcagcctgtcaaaatttaagatgaaggattaataacataacatccacatattttacatttgttttattgttctaagatttcacaagtaaatctaccttgcaaatattgtcacggccattcattttcgctacaatgctggcaggagacagaagctgcacagcgtgcctgagagtgaaagcacaaaaaaggttttagtatttagattcacgaacagaaattttgcttagaaaagcaatgatgacagtaccttagtgaagttctttgcccaatctccccaagtagaaccaagcattcttcatccacggttaattcttcaacttgcgcacgaatggctataatctgtgaacaaaatgataaatctattagaatgttgttcgtagtaattgaaatccaaaagctaaatgacaattgagtaacctggatcatttcagagggatcatagatttgagtccggatgataaccaatcgatctaatagatcaatagggactccatgggggctgggcatatcagtccctctgcaaataaagtaaatcacagtaccaagttaacaaaaactcacaagatttccaaaggaaaatgtctatcaaggtctagcgctcttctcaccttacgttgcaaacacctctatttgttgcaaatatcactatcggagataatgagctctcaagagcacggttcaagtatgagaagcactccatatcaagcatatgaacctgaggttttataattaaacaaaggtattcttactgctcctgagtcctgagcaagatcaatagtggaatgaaaaaaaactttatttgggaaaatacctcatcaataaatagaactcctggaacaagctctgccacaccttcatctatatatcggttcacaacctacaatggcatataaaaatattagaccttgcaaaagagaaagtaagatgcttaaaaaaatcacccatgtactagcgaaaatcaccttgttaatttcttgccgaagcttatcagtgatctcagtcttccgcggtttcatcatttggcccatcaaagaaagtatatcctggccaccttgaggtcgagcatttgctgcatccagatcttggagtgtgacatcctatcagtcaaaagtatatggtctagttgagtaacaagtagtcttaataaacttaggaactaaggttaatacacatacaaactaatacataacagataataaatcaacaaagaaaataattactctacacagaagggagaggtcaaagaaggtaaacctgcactatctctttctttttgtggacctctcctttgggaagtggaacatattcttctgcttccagatcaaattcagtggcaaaagcatcacttctacctacccgtttgacagctccactgtttgcttcgatatagattacatctcctacagctacctgagaggcaaacagcaaaaatataaaaagaaaccaatcagaatgacaaagtaatcagcaaattcatacacaattgtccccacagaatgacatcgttagaaaaccaaaaaggtgaaaagaaaagcaggttttggaacaaactgaaaagcaaaaacttaggggaaaataccacatccaaagcatagcatcgcatgccaagaactgaccttttccttaatcaaggcatcatagatagtgggatccaatttcagatgtttggttcctttgactgtcttgagtgtaattacaacatggctgatgcttttaccataacctccagtgaggctttcagtttcttctggtgacagctcggtgacctagaacacaaggacaacatgtcaaaaaccaattagcgagacatgctattgcataagaacacagcaaaagaaaccgcaaatagcaacacacctccccttcatagacttctttggtttccttgatacgtagaccaatggcacgtctaaaattctccatgagaacctctgttttcttaacctctgatgagtaaacctcagatccaaccattggacagaatggaacctgcaagaaagaaacaatccagataaaataagctaaaagtaaaagaaaaaagcttcatacaatgaagccatgtggaaacaatgtaacaaagaagatacaaaatgagacatccaaaattaccttgcttcccagctcttgagagattccaagagccaaagctgttttcccagttccaggaggtccagcaagcaaaagagccttgcccgccattttcttctgcttaatcatgtcaactacaagaccagctgcctctctagcctcaagttgaccaacaaatccagctgccaattttatagggataccagttggctagaaaaagagacgcaacattagcaacagaaatgatgtactggttatagaacgagatcacacagatgcttgagaaactacagtcagtaaaagaagcaaagatagttaattaaaatcaaagtgccgtgccaaagtggaagagcaaaggtcttcaaacatcggtcaagtactatatatttcataaaatacatgtattaaaattgaatatttgcaaatcaaaactagagtataattgtgctagagccgaaaaaagagtctcggagaataccaaacgaagcaatgagcttgaaacccctaaaaatcattaaactttaaacacaaaaccttaaagaactttgagcaatacgagaatactgcaatgcatcttatccccagaaaagtcgaaactttacaaatgaaaactagggtttgtttgtgctagaacagagaaaagaaactctaagcgtagtaccaaacgaagcaaatagctttaaaaccctaaaaaagcttagaacataaaaccttaactaaaccctaaactcgagcaaactactggaatccactagagtcaaagagagagaggagaaggagcacctcgaggccaaggcctttgatatgggtgtgagtagcaatccgttgtttcttagcggtggactgaatttcttcaatctttactttctccatctccgtcaactacaattactttgatctgctttaggtcttttgttgtattctccgacgacgaaaacgacggcggaaagttttgagctttattgagtttgcaacgcctccctctgactccaaattgccaaaacctcttcctaacaaagtttatatgttaaacatgttgttgcaacaatgggcctttatattatcctttatttacaaaatcaccccacacttcctaaactcagaaatagaaagaaaacgaaaacaattagagaaaagggcgaaacaaaaagacaggactcaatagtcataaatgtaaattaaggggtgaaattataatatatgaataataaaagggtcttctttttggaaactttctttctcttcatcaacaatagtgataagcttcttcttctggaaaaaaaccagaggccgtctcactctctcgctacatggagagtctctcgattcccgccgcttcttggttttccggcggaaccattcctccgacgaaggtgagagtttctccgccgcatcatctccggcgacctcccaacaggaattcccatcgcttggccgccattaatgccgcttctcgctctggtgacaatctctctctctacattgaaccttactactcaaatgttcgctctttgtggaaaatttcatgtcttttgctttgtttttagtgagtgagctagtggaggaggatgtgttgcaaatgttcatgaaagacagagaagaaaatggagatttcatatctaaagtttctgataggctctggttaaaggagattctcgaatctattgatgttaattccaatggagcttcttcttcagctgttgaactagatgatactcgggttaagtttctttcacttgttcattagtaactgtagctagttttttttcttcagttctaagtttgcttttgacgattaaaattgctaactttgtatcgaggaatagtttgatagttatatgatcctgttgcaattgttatgtgagtgactacatttttatgaaatccagtattggtttgtgaatttctgaaatctcacaaatttatagctttcatggcaacaatcttatacttggtactgttactttggttggtaacttggtatagctcctttattaatgtctttatgttgtatatgcaggaaagcttgatagatggcgctgatgatgatgaaagtggtttcttgaaacttaaaccgacacaagaatggattggttgggagagtgattctgcccccatgaataagaaagctctagctaaggttggtcatctatttatgaatgttcttgttctctgtattcattcattcacacgtccttctcattgcaaaactctgctgcgtttgtcctacttccttgattgcaggcactacgagatgacagcgagagaaggaagaagtttaactttctgaaatatgaagctgtatgattattcctttcagtatgttttcttaattagtctgccagtcagatctttatgattcaacaaaacactctattatgcaaaatggctgttcagtatgtaccagtagtcaatttgtgtagaatgaactttgaaattgctgcgtttgtgtctttatttttgtagctgaagcgtgaactcatgtacctgtcgattgtaattggaactggatgcagcggatactgtttactagctttatcagttcaggtaagctctgtcaaagctctaaccagtttatactatggcttctctatacgaaaatgtgtctgaaagaaatattctgacatatgacaggctgcagtcagttatgcagttggggttctattcaggttagttgtctattttaattggtttgtacataaatagaccttgacgttgtaagatatagttctgcaacatgcttgatcgagcactcgcgtattcctaaccaaatctgatcatagtgcagttgcttgtaccttcagcttttgtatggatacgctgatggtctatcacgtgaagctgttcctgatatcttcctgaaaaaaaagtctaaaaagtaaagaccttgacaactttttagtctggtcacgttttcttctcacttcccatactcacattgctctgaacttgcttttgtattgtcccaattcagaatcgggatcagaagtgaagaccttgaggactttgtagtgaggacaatcaggggcagtggcatggctctctcttctccacgcttggtgataccagctgcaatttatggtttgtggatactctctcacaagtatttccagaacgacttgttcgactttcaggtaagctattccacgttgcgaggttttagctatgtttatccgtgatacctcaaagttatcacatgttcttagacaagtttgaacctttatattctccacaacgattgtgctttgcagatagttccagcaatggttggtttgtttgtatacaaagctgcaactctcgttcaagtgtacagagacaaccaagatcttcagttcatcttcccagatgactactaactgcaaagttcacaagcggccttccgagatagaccaggaaaccacagaattgtgaattgttcggtacatattttgagagaggaacaggaacagaagctagactcatccgctaagaccgaggatatagtgagttatagatcaaaacggcgtttttcggctttttttcaaaagcaaagcaacctcttctattttttaaaacattctgggttacttttctaacgaaaacaataatacaatgtttatatgcatgacttgaatgagtttacaataaactatattggattttgcttctttctttaatattttatcaaaagtaagatcagaggcagcagaggcagcttcgagagtacgagaaatttggttgtttatggatctacaataaaggatcgtagcttgtagcttgttaaaaagcctagttcctgttcctctctacaagctagagatcctttacaagtagaaccataaacaaccaagaaaaagatcagagacattctatcgactcttctctttgccttcttatggagatgatgttgtggtgtctcctgcttacagcatctcctagttcctccccattcatcaaatcatgcatataaacattgtggtaaaaaccctagttccttattgttttcgttagaaagtagtaacccaaagtgtttttaaaacatggtcaaaacttattttactcttagtaactaaatgtcttcttctgttctctcctctttatgcaaattatacagttccctgatattcattttactcctacatctctcaaaatgtttagcatttggtcttttaattttctcatggtaagagttaaaacaccttcattttaccaatttggggaaattttatcaaaaggaggtcacgtgcgtgaaacattgattttttatacacactcaaacggtcaaatctcgtcgacaaaacaatacaaacgttaaaaagattaaaaaaaacctttccgctttcttttatctcacaaaggcctctccgattaagtaacagagattttttttagtatttggcctattggtaaaacattatcagcaaaattttagggcaagctagagtaaaatgaccctttttaaatgatatcttcaactattctttctttctgcacaacatccgattctcttaggcttctgtttctccagctttggacaaaatgtgattccgcaaataagtggtacagcaaagaagagtatataattcaagaccgtaaactccatccacgtgcagccaattcacgccgtattctcgtagctgcctctgctgtgtcattcaatggcggataactccaactttccgacatctataagaaaaccattagaaccaaaccaatgaagacatggaggatataacagaactcccaccagagacctctcttattttttacaggatccattgacatgaagaaaaataaggggaaaagacagctctataatgtaaagatacttacatcttcgaaacctgtaaatgagcggacaactcctcgctccctcaaagacttttggaattctgcaatcttccatttacagtgatcggctccaacaacgtacactggtttcctgcagcagagaaggagtactaaggttatagttcaagttgttggaagaaagaaagggtttatgtcagcatattatatacccggtgctacaagcttcgcttatcagactgactgaatctgctgtcaccacaaaagcatcaccccaagctagatgccccatgtaaggatttggttctgaattagaattttaaaaacccattagaaacttttgtggtcgcattgtacttgtgcacaaagctcaagcaaaatttgctctggattgtaggtaccttggccattccatatgtaaactttggggttatctccaagttctttgaagattactcttgaaacctgcttggatagtaaagttccaggtgaaactcaagaagaacatcagttataactctgggtagaaaaagaaaaatgtgtaagagacctttgcaggggttttgtaggaaagagtaattctgacacttccacaggtagcaaggacattaagaagggagtctgttagctgttttgcgaggtctgctccataccgacagttacctgtttagaaagacaaaacaacaaaccaagtcaataaggtaaaagcctcagtgttcaaagaatatgggagctcatgagttctatgcaaatgtaataacgccttctattaacttaacaaagtaaacagaacatacttctaggccagccgatgttaaccacaactaaaggcttcggaagagcagcaaattcatcatgccaggcactagctgctttacggagtgaggcataatcgatctggtgtagagctccagtagtcaagacctgaaaataggcgtgtccattcaaggtaattacaaatgaaatcttcacaacagtggagaagagcattgagcaaaaagcatggtactggatacttactacatgatcctgaggaggttcacgtggagttatccaactacgcataaatctagggacctgctcctgcgcttcgagtgttagaggatagtagtcgtgacgaggcgtgatcaccatgtcaaacctatttaaatgtgatctaggatgttgtatctacaaaatgaagaccaaatagtactactttagaattcacaggaccaggaaaaaattctcattctttagaaaatcacaggattcagcaacaaaattcttcccaaagatactaagtaaagtttgtctcgaattgtatttcagagcttagtctactgtgccttaataactaacataacaaacaggttaaattttataatagacctgaacaacgaagacgttttcagaagccaaacgtcttatcgagctagcaatagaaatagtatctcttccacatgcaatcacgatcaacgggccatccctgcgaaaaggaaataaagtcgcttagatacccattcccattccatggacaaacagaaattcgtgatgatggaaaggcatacactcaggcttcgatttcgcttgagtactacttgcaactcatagaaacgcaatagtgtttaaatgaataagcaccacaaagaaatttcagaaagattacatacttttcataggtctgacgggccaaatttacaatgcccttcacatcagcctctagaatagaggccaaacctacattaccaccattctctgagggtacagatgagatgtatttactttgtttggatccaagcatcaatctggagtagaggtaaatatgcctgaggataaagtccaacttcttgtgaaaaccaactgggagccagtgcagccactcatttagtcctcctttaggccttgtcactcgcttgcataaagaaaaagagataatctcagctaaccaaaaatcatgttaaatgtaaatttacgtgaatgtcgagtctatgaatgatcaagaagctagagaaaccagacacagcaaaacagccttatatgcatccaaactgatctaaaagaagcattaaagactccactaccagtgttccttgtaaacgaaattcagtaattgcaccagcatcatgctccaccaatgattcaattctctttaagatttaccaaaaaaaattataaataaaactgacaatataggtagttatgacaccccaagaaccttccactgtttaccctaaatttgcagaacttgagatattggcaaatttacatatttaccaattcattgtttccataaaaattcaaatagttcctccttctctgaacattcatacactctaaagaagtactaaacaatatgaaatttccactcctacttagactgagacctaacaagctaaaaacctagaacacacgacgaaacaacaaagtaaaagaaactcctatccaaaagcaatcatcaatctctcaactacatcatgcgcctagcaaaaactgacgagaatttcgagtatagtatcaatggtttatagtcgacgaaatgaaagcactaagcagatgctaaaaacgtctagagcctagatcaaagaaactcacgtagagaaggtgattatcagataagccgagcgcacgaacgagaccgatacactgattctcggagccagggaaaccgtttccgatgacgacggcgcgtctgacgacgttatgggaaccgccttgttcgaaaatatcagggacgccggtagatagactgggtggatccggcaataggattggcctcatgccggttagattatcgattccgattccgatcaaaaaccctagaggaaccacaccgagatttggggggattgatctcaactccgtagagagaaggtcgtggtgctttgacaagttgcgaaaggtcacagaaagagagattgttttccttttctccttcaagagattgtctttacgctaaaatttggtataacaattaacaaaggacaaatttaaggtcttaaacgaattttttgctaatcaataaaactaattttgtcaatacaaaacatacaattgtttaaaaaaaaagaaattgtatggtattttaaaaattttgattttagaatttgaagttttggaattttgttttgttatatgatgattaaaattaaaatttcaccgatagtcatccaaaattagaataaaacactatttgtcacataattgctgtttttctaattgtctattcaaatcttatgaacctcttcgtaggcccaatatgtagaatttgattgttaaaaggtgaagccttatctggaaaaagcccaactgttattgttcttcctgtgcctcgttttgtctcggtctaacttttttacacacgactttaccaatcatagtattcaaagaaatctagcgatctcaagactccgagtgtcacgatagagaatatgaaattgcagaaatgattcaatataattatatatcttagctgttgttaacacgttagatgttgagtttaggaaattaatttattgggtattttcatactattatattcataggtagctataacgatgataagataatttaatgtgtgcaggttgtaaacagttaggaatatgaaataattcaactatatattataatcatctcgtggaaaacaggatcgattgcacatgattcattggagacaagaatcgttaaggtgttcacacattacgtgtctttgttatattggggttacaaagatgcattcatatgatgtagtattatcttgagatctccagaaaacaaaccgcatttgaatcacaaaatggatctaccacccaaaatactaccaactcacaaatatcctttgaccatttcgactcgttttgttaatgattcttgtaaaggttgcaatataaaaggtcccatctatggcggctaccgttgcaacgagccttcctctactagtttgttcttccacaaagagtgcgcagaggctccaccggagattatcaaccatccttctcatcctcaacacactcttaaactccacaattctctaaggaacccatgtaaatgtaatctatgtggcaagacttttttcgcttttggttatcgttgttcatcaaaatgtgacttcatcgtggatctcacttgtgggataaatccattgccggtttctatcgaacatccaaagtctcatcatcatccagttatcttcttgaaagaacccgcaaagccgggtaggcgcagatgcggaatttgcaagggctataatggtggatgttcttatgcatgtcttgaatgtgaagtccactttcatgtcgagtgtgtcaatctttcccaagaggtgaatcatccttctcatcctcaacattctctcaagttacttgaatatgaatcactaacaagtgatgctgaagagacatgtcttttatgtggagaacgaccagacaaagtgctttatcgctgctcgatatgcaacttcagcgtatgtcgattctgtacaaaagatccaccaccacttgctatcgagcatcataagacgcacgagcatcgacttgtcctcttatcaagactcatctcatttgaatgtaatgcttgtgggatgcaaggtgatcgaagtccttacatgtgtgttcaatgcgggtttgttgtccatagaacttgtattgacttaccacgtgtcataaacatcaaccgtcacgatcatcgcatctctttcacccatcatctcggtgttgggtactcgagatgcggtatttgtcgcaaagatataagtcaataccatggggcttatttatgccctcgttgcccgaactatgcagctcattcactatgtgcaacaagaaaagacgtatgggatggggtagaactcgaagggacaccagatgatgatgacgaagatattgtgccgttcaaagtggtgggtgataacttgatcaagcatttcagtcatgaagaacataatctaagactcaacaaggacaatatcaatcgtgacgaaggctcacgttgtgaagcatgcgtccttcctatctattccgatccgatctacaactgtgaggaatgtcgtttcattctccatgagaaatgcgctaatcatccaaaaaagaaacgacatgtattccacacaaaaccattcacactatggtccagaccacctcgtacattccatagcaaagattttagattctacgatgtctttcgctgctatgcttgtagaacgaagtctactggtttcaggtacgtttctgattggtgggttctagatgtacgttgtggttcgcgttctgaaccggtcattcatgatggtcacagacatcctctatattacgaacataagaaagatcactgttgtgatgcatgttataaagagatagatggttatctgctttcctgtgacacttgtgactttgatctggatttacactgtactgatttaccaaaaacggtaaagcacagctgcgacaatcatcctctttccctatgctatggcgaaaatgcaaccggaaaatattggtgtgatatttgcgaggcggaaacagatccaagtaagtggttctacacttgctctaaatgtgtggttactgcacatattgaatgtgtgcttggagacttttcacgtctcatgccaggacgcatcatcaactacaataatgttagagttgaagtggttcttaacagctatagttctcgccccttctgtgcaaaatgtcactccagatgcagagctcctatcattctaaagctttgtgatccatatactggatacatttgttccgatgcatgtgtagtgcccgactatcaatacagctaagacaactatgtagctgtttatttcactctattgtttctcgtaattttttggatgtaagagtttatttccaactacaagtgctaagcattctggttatattcatactgtgttcatcagtacaggcaggattaaactgtatcgatgacatatataaagtcgtaacaagttatgacaaacttgctaaaaaggtagtagcaactaatatgatttagttaatgaaaacatagacagaaatgatggaaacagatatttgtgaatcagaaatgttattaaacaaagatgaaaactgaagtaattttaacaacaaaaataacgaatatgtgatgtacattgcaaatgcaaaaattataaagacacagcggataaagttttggaaatacagagaacaaactcactcacgtgactaaatctaaaagacaaggcaagagttcaatgaacctctgtatcattttgattttgacatttacaagagttacataagcaaggaggaccatgacatgtaacttcaaactcacagtcattttcatgacaaaaccaaggcttcaaatcgaaatgatgcgactgagttgatttacaaaaacagtggtccgtttcagtataccttagataaggccgccagattttaagatctgcatgatggtaaagtgattcctccgcagaaagatgcgattattatgtacagcaagaaaactatcaagcatgtcaacaagaccctgccgaacacaaacaagaaaagcagttttgttgattaataaaagtgatctggaactcaagcatcaaaacaaaacaataatgaaatttctttaagcagaggtggaatcaaggcagtgtagttcctatcagccaaaaattagatattttgtcgaggagaatttcccaaaatcgaaaataatgttgaatcttagaactactgtatctctagtttaagaaacatatcaataaactatgctgcaaaggcgagttgaaacacctagaatgtagaagagcgtatctcttagttagcaaagaaaaggaatgaagagaatctagaagtgagagagatccttacaggagcttagcatttttcatccaaagagctcggcgaaggcgcttagattgcttcctgaagtgaaacgagctatcttgcattgttgctgttttatcaacaagaagctcaatcctatcacctctttccattatcttctcaatgttctctaccatgaccgatcgaatctgtaaacacgataacacaacaatgagataacaaacttcatctttcacccaagacagatttaaagaagcctgtgtgagccaagaaggcgtaataactcataaaaattcaaccttttcaatggatatagctgagtaatatctagagatcatacgaagaaacaattatacctcactgacttctcctctaacacgattgagagtatcaacactaggattactagagaagaactccatctgctgatgcaaaacccttgagaattcatcattcattgcataagctggagcattatgagccactttgccatagtttttcatgaatctcatatgaatctcttccaaatacgaaaatggaaccctccctgaaaatccaatcaccaacacatcaaaacataaaactcagaatcaattacaaagactaaatcttcttaagagagattacgattcggagaaagtgaaaaatacttacttccaaaggtatcattggccatacagagaaaggtaagaccatcagatctaagaatatggaagatataacgatcttgagagaaacaaagtctttcatcggagatttccggtgaaagcttctcgaggatccgtcgcaccacggcgcctgtgtttcccgtaacggcgctgaattcagctaataccacggtacctctcgctacaacagcatagacaatcgccatcggagaatcttcaattagagtgattcgatgacagagagtggagatcacgcgctccggcggcgagaaagttcaacgtcggctttgctgcgatcagaacagagtataaaaatgcgaagttataaggttaggtgcaaacgtttcgaatataaccccttgttttattgttacgtttttaattgtcacctaaaatattattttgttacattttaaaccctgatgcatcggtttacggtttaccaatttattaggccttggtaacttatccgaaaacaaaccgacccgaaattcacttttcggtttgggttcggatactccaataataacttgatcgtttccttctttttaatttcgattatccggttcggttcgagtatagcacgaataaaccgaattaaaattaaagccctaatttaaatataccgatcgagtcttcggcgagcttacttcgccttgaatcgagtcttcgacgagtctccggctgcgagtttctcttgctccggcaaacagacctgtcattgcttctctctccggctaactacacaggcgagcttctctatttattttcttctgtgtctccagttgcttctgatataatgaatatgctcttgaagcaaattgtttctctgcttctctttctccagtgaattgtttgttgtattataaacgaggtttaggaattgggttaataatattggaggattgtgtttgtattctgtgtccgacgaacaaatgacatttccgatttctattgtgctacgagctcagtgtttagaagggttttgatgttctctattgaatattcatgttatgttagtttgatgattagatgattttgctttgcaattactgtgtttttttgtctgactggctctgatattatacaacgtgtttgactccgattggtatcaatcttcttcttcgtcttcagaagcatggtgtttggacaagtagtaataggtcctccaggatcgggaaagaccacttattgcaatggaatgtctcagttcctctctctaatgggcaggtttcatgttctttctcttctcttctctttttggatcaaagaatgaagcttacttggcttttgtatctgtaattctgtttgtattgattgtttcgctgtccctcgcattgtaaagtttacaagttgcaaactttagtaaataatagtgttgaattccagaaatttgaattgtctgacttttgagcagagtcattgtgaaatgttgttgccttgtctttgtttttggtagagagatttgcagattcgtgagaacttctctgtaagtaaattctcttaacgttgagttactattttgttgttgttgcaggaaggttgctattgttaatctggatcctgcaaatgatgcattaccgtatccttttcaagccaaatacaacaaaattgttaaaaattgcaggtgtatgttgtttcttgacattgattttagttatgagtgtggtgtgaatatagaagaattgatcaagttagaagatgttatgtcggaacactcgcttggtcctaatggaggtgaattttgccatcttgattttcccttttcttcttacttttgattttaatctttggtcaaattaacaaagaaactttctaatgtgacaggtcttgtatattgtatggagtacttggagaaaaacattgactggctggaatctaaactaaagcctcttctgaagggttagcaacgatatgtcccttcttcttcttcttcttttcgtggtcataatatctctttcttaaagtaaaacgttttgaattgtttgcagatcattacattctctttgattttcctggccaagtggaattgttcttcattcatgacagtaccaagaatgttctcacgaagctgattaaatcattgaaccttagagtatgtgctttacttcacttattactaacttgctaaatgaaccttacttaggagtctacatatctgatgaatttctttgttctgcagttaactgctgtgcaactaattgattcccatctatgttgtgatcccgggaactacgtaagttcgctacttctctccttatccacaatgcttcacatggaactcccacatgtcaatgtattgtctaaaatcgatctgattggaagctacgggaagctaggtattaataatctatctatggttttgttctcataacatcgaattttcaaatgtatactgtggactcactaactaggatctctgtgcatgtagctttcaatttagatttctataccgatgttcaagacttgtcatacttggagcaccatcttagtcaagatcctcgctctgctaagtacaggttcgatgtaaacatcatctgaatacacattgaacggttaataattatccatttagaagcatgctcaatatctcatgagcttgatgtttctcattgcagaaaactaacaaaagagctatgtagtgtcattgaagattacagtcttgttaattttacaaccttggatattcaggtttgcgatttcctttacctctctctctctttctctctgtacaagcatcttttcgcaattttcttttttgttttcaggataaagaaagtgttggggatctagtaaagctcatcgacaagagcaatggatacatatttgccggcattgatgcaagtgtggttgaatacagcaagattgcaattggtcaaactgattgggattataacagatatccttttttagcattttggatttcttaaccattacttctctcaataactcttgagtttagttttacgtctactacaaaagaattgtttctttgacgatagtcttcacagtcgcagctgtacaggagaagtacatggaagatgaggaaatacaagactgagaacagtgcttgaaactttatatagaagagagctggtttaaaatatctctgaaccaaaccatttgacggtttgtatgaacctttttgtgtatttttgagttcggtttaagtctaaacaacattgatttacacaacttcctggtttggttcactggattatgctaattttccagacgactaactttctgccaaattttgtctttagacttttgagtttctgaatcacacgtgcccatgactccaacattctctagaaaacatctcaaatgtcactgtctaggtcatttattatttctcaaattctcacgttacaaggtaaagaaagaaaaagaatctttcgggtcataaaattcaaactaacaataagcaattgaaacaagtttaaatttgcttgattataaaatctatatagcttcaaggccaagtcagctgttcccagtcccacatcggttctgatagtccatcaacaaactctgtgttcatagagacatcaatatgttctcctcctgaaatcgaagtttccagtgagctttccacacggaacgatgtctcagctactgcaacatcacttgttagcattctctctgtctgcaaaactccctcaggacgtctatcaaaagctctggagcttcctgttgttatgtagactcgacataaactgaactcacgtctcagctacatttttcaagaaagcaaaaacaaaaaatctcgttattaaaagtaacaagaatgttctaatttaaaagtttttaattatatgcaagtaccttagggattgtggaagcgttgactgtttcgtcaacggcgtggtactcattcattttccatttagtttttcttcctgtgggtgcttttccagtgtagaaaaccatagttttctttgctccaatcattttgttgtctttggaaaagactggaccaggtgatccagttgctttccagtatcctgaaccagtagttctactcggtctgcctcctcttgcttcgcgttcttgtcgtggcacgaagaagaaccattgctcagcgtctcctcgacatctcactccagcaacatctgcaaaattgtgtgagtttcatatataaaaacattacgcatatatagtctttatggcattcatgtattttaggggtgttcaatctgattataccaaacccgaaccaattcaaaaccgactaaaccgatctggaatcgggttactattttcgtaaaacaagaaacccaaacaccaaaatggagaagtttacgtgctataaaacctaactttgtatgatgtcctaatgactctcaagtaatattaagatatgacgattttgatgccatagtagatatatatatcgacaattcaggtgaggttaaccgttaacgtacttggaagatgactaggctcgacctcaaagacgtcaagtacgggaatgacacgatgcattgagtcatcactccttccttcgagctggtttcgtaggtagaacgaaaccagttcttcttccgtgggatagaagcgaaacccgattgtgacctcatcggccatttttgtacgatatttttaacaacaagaaacactctaattagttgtagctacctatattattaacttagatgccatggattcattgtcattaaataagaagtagagattggtttctccgagtgaaaggagaaaagttctctacgcgtttttcgttttttttttttattttattccctttttgtacggatattggtaaagacaaggatgttttgtgtgtgtgtgtttgattactttcgttgttatgtgtttactgtttagtaaactttttacgagccacgtacgtccattgaatgagtcaagcattcgtctttgccgtcaagtttcagtctcttttcctttagttttcctatcttttaatttggcttgccagttttagtaaatagtttttttgaagcaaactcagattagtcataggttagttttctaatgcctaatcaaattgtcagaggacaataatctttgtaatgaggttcattaaggaacatgtaatttctagtgaaagtatagtaaaactgaaataatgtatgtgtaacaattctcgtcataattttagttaactttatttatttacataacaaaaaaaaaactgtgtaagtatataacaagttgaaaataaaaaaaaagatgaagaagactttgccttggggtattttcgttaattcgttacataaattcggccatttgcaagtacattaacgttatcatggtacattatcttttatagatgcaaattactttccaaaatttaatcattgagtataattacactagatgactttttaaataccaagatactttgtaatgtaccacatagatctgaaaattataaattttgaagatatttgaatgtaaattctaattgttcacaactatatattgaccattgaaaaaaaacacttcaattccttcctctaaataacaaaagttgatacactttaacaaaaaagaagaagactatatatgccccatagtgtattttgaaaatctccacatcatatatgtgcaagttagaaaatggtaaatttgtgtattttctcaatctaggttaaaatgcttcctatatcgactagttttgtgataccgatttcgagacactagataacgatttttgtgtacggtattctagataattatggtactcatgtaccagttcggagaataaatgccactttggttaggttcgtctccatgactagtagagtatttgcatgcatcactaatattaaacttaactgggcacataatttatatagtttgggggtcctctctaatttaaatcactaaacagaaaacagatagataaaccaaccaatacgaaaactaatcacgcaccgttatggattgttaggtaaaagtggtcaacatcaataattcgttttaagtatgttgcgaccttaattaatctcaaccgtacctttacttaaaaaataggtcaacccgagactctttcttctattaatatgaaattcattacagaaatgtcaaattcacttaaaacaagttatgtaacagcccaaccaacgaaagtaaaacaagtttttcttttttggccaaactaccaaattctttttcaagtgttttcaggaagtacaaacatttgctttaaagaaatgaatgatccaaaactcaaatgcgttcacagataaattaaagatctagctaaaattgttatttctccagttaaaacttaaagtgttatagagtgataattttggcaaaaaaatatttaacacaattggtactgtatcaaaattgtgacaaaaaaatcgtgaaaagcaaaactaaaaaggtgtatggccgttttaattttagttgaaaaacattaccggaataaaacttaatcgacatagaagacgaacctattaaattatcattccttataatttcttatatattatttaatattgtttttattagattgaaactttagaagctggattgatatttaattttatttggtttctctatcaaatcaccaaaataaaaatctcgaaaccaaaaacaagttttgacaacccgacaatccgtagacttctttaaatttttttaaggcaagtcaagaagagcaaaaaaacaaatccatggagccagaatataatcgaacaactaaatcttatttacgacagaattgtcatcatactaatacttaggtgtcttttcttgtggtttgcatagatttgagacttggtccgctctcatcagtactcagtgggctaatactaatacaaatgaattacgtaacgttttactctttttagagcatttagttatgtcccatggccatttataacgtgtgattattatttgtatttctttttttttgtcaacttacgtgtgatgtttgttaattttaatcaagttttctgtgattattcttttcgatcatatgttattcttttgttgcatgcgtgcagctgaagtccgatatattccttttatgtcactggtaatattgtgattatcatcattttctaaagggatcacgtataaactatttttataagagagccagagcttatcatcctcttacatgttcatcgtttcacaatatggttaagttttgatatcaatctttatcttcagttccaatatcaccaaaaaaaaaaaaaacgtaaaaaccagagacaatccgataagacttcttcaacgaaagacaacaaggttcttatctttttcggattcgggactaattaaacacacaaatagtttgcccttttaacaaataaacactattccgctatgggttactcttttttttgtgttcaaggattcttttaagagaatattacattctatggcacttttagaaaagtatgtacgaatttagacactttgaaaagataaggcactttgtcaaaccaaattgtccaatttaccctttttaactgcaaactcattttctttttcatatcttctcagcgtttctccatcgtttttatttctctatttccaaaaccaaaatcaaatcttttactaaaaatcaaagctcaaaaacgagggctttatcttttaatctccgacatatttgctttgattccttgcgatgattgtttttgaaaagctaaccaagatatgatggcgttattggtggtggcggtggcggtggcggagggagctttataccttattcgtcgctttgtttggtgtctctctgctcctaattactttggtatctctgatctacaaaactagaaagttcttaatcttattccacatcagatctataaatttgagagtattgtttctgattgatttgatttcctgagagtaatcacttctaattcaaagtcaagatgaagaaagaaacgagaggttgagacatgatgaaaatcaaagtaacttttgtgagtttatgacgttatacaatcgatgtatatttgttgaatttctattgaataaaaatttgtaatttatggcaagggacacatccttctctcttctacctattacaaatgattaatatggacgtatcaaagtaaactaatggtcttcattgagagtgtaatacaaataagatcttcgttacattctttataaaagctatgtaactgacattgtcctactgatggaattgtttatacacaagtgaataaatggtcaaagaaaaatggacaatgtactttggattggcgtttattggtcatgtatagacttgtttattggtataaaaataccatgtgaatcattagataaccatatggactagacttcttggactgtcatcaatggataacaactatgtctttgatttgctgtgaatgtgtttatagctcggtaaattagcactttattttgtttgcgcattctacaatgatacatcatatggtcataactctaaccatttacaagaaaattgtaattgatccctacaactatatggtcaacatagaatggtcgctagtggatggctacttgtaaagggttagaatataaacccaaagcatcgtaatggacatagtttttgaaattggtgattattacttatgctttctatagaatttgtgtatttttgattctacagcggtgtaaacatggttgtatggacttggggtgatggataggaattattgtatatttgacagggggagtcgttatatattttagtaaacatgagatattaggtatcctaggtttcaactaagtatctgattacaaacttgctttttggttaattaacagaaaatgaaagcaatacacaagaggaacataatcacttaagatgattgtagttttacaaatatattcgtgtagaatttgattatatgagccttgaatgaataaaagcagacttatacattaactttggtgtagaatggatatgcttagtaaacaagtttccgtatgaacacatttaaaatggacacattattatagatttgataagaataacaaatgcagagaaaggattacgtgaaggaaagaatgttaataagattttgggttttagttggtatggttttgtctttatatgaaagcatgtttgatgggtctcgttcttttgtgtaagtaatgtattgttattgtagatattgtgttgaataagaaaaagacgcatgatttgttttgactaagttgtgattattgcatcaccatgacacgctttttcattcgaaagaaaattgatgaaagctctacacgtgaattatttgtgttcaagtgtttgtcatgtttcaccattactccacatgttaaagtctaattggacaagttataatggacacaaactatcattgactaattgggttttgagtgttgctatttgaaagcaatgtctacatattgttcttggggcttggagacctataggattattagtttatatataatgaaatcgtgttggatgctttgatagtttatctccataaaaacttgtccaacaagatgtgaccatgtggaaataatttattctcatgtgcgaagtaaagtgctcttagcttagaggttaaacgaaacatcaatttatcaagctagaatcaaatggtaccaaacaagttgatcatatggatatgaaattcaatactggaatttgccaatctggtgctccatagaaaagaacagagtaacgaggacctcgcatctctgtaaccctgtaatatcgaggttactccaaacaatttttgttctcacggaatctcttccatgtacgatgccatttcttcttctttttcaagagagagttcgaattctcagatcgaatttcaaaacccaaattaagtaagtcgagaaacgtcccacgttatgttatcaccgcctctctcgtcgccttcttgcaacagatctgaaacaaaggagagtaaggaaagaggaacttttgatctgcaaccgatctcatcgtctttacaaacacaatttcgctaatatgaataagatatttacacaatctaacaaaactctaaattctattcgtaaaattgaagaatcgtcgcaaaacctggatcgattggttgtaagattgagggaacaaatcttcttcttctttcacctctagatgttactgtctgctacacttgagcttccgtcgttggccacaagcgctgccactccgaaaccaatcgaataagcctaatcgtcacttaaatctagagaggcttctccgtaaaggaagatacagaagctacatgattttgacaaagtctctcatgtttgattttgcaagaaagactaaaagatgaaaaaagagatagatagagaaagaaaagaagaagaagagtcgatgaaggaaaaaaagaagtagacgatgaagaagaagaaaaaaaaagtaaaaatagagaaagaatatattacttttttgagtaattaaattatatatataatctgataatcagatcttagttacaacttccatccaacgacccactcatcatataccatctgtttcttttttcctaactacattgaaactgtcaaacgctaaagtattctcgttcttcatttgtaggggcaaatttgttataaattcaatgaaaaagttggaaaagtgtctcatccctataaagtgtctcaaaagtaataaaattctctaaatgtgcttaaacgtgtcacattcacttcttttaatgtaaagttgaaacgaaaatctttacatattttttttttgttatcggcaaaataaaactctttatttttatttttatttttttgtcggcaaaataaaactctttatttaaccgcaaataaaagataaaaatttttttgaagttgaacataatatcaaaataaaaaaaacaactgtcaaaactaggagtctttaattagtgtggaacttttcataataaatgcgtgagtgtggggtttcgcagatgacgaatttgctttaaaaattggtactagttgtgcgagcagtaacaataaagatgttatgaggacttaagtaagtcggtgacaatcaatagattgattacctgatcgaatattaaatgaaattcacataaagtttaaatttgatatatgacggacataactttttgtttatatccccgttgttacgtcattcgagtttaaaatcgcatattgcatataaaagaaaaggtagaataagaagttgattgtacactgcaaacgaaaagataagtgatttcaacaaggttaatgtaacagttagcttatcaaatcaaagcaaactgtatcaaagcaagacctatatgagtttcaatttctgcctctatatatctcacgatcctatatgtttcatctttaggggacatggaatcatttctaggaaatatgtttatctgacttcggaagtcctgatgacaaaagaagactctgattaacattgaccttaaaaacagttcttttttactacaaaaaaaaaaatcaaattggtaacatctattgactccacttaaaacgaattttgtttgaagcaacttcaagtaaatcaagaaatacttgattgattaaccactgcttgtttatttagttagcatcaatattcacttattaagcatatgaaggcatcacttagattgaacaataaaaagtaggattagatgatcgcacctcaatatagctcacaactacttaatcctatacgatcattaacaaaacaaacaaaaaaaacttcttaatctatatatactcgcttacgtactgggtttgaaacgtttagcatctgggctttacaacgtcaaggctcatctctgggcctgtgtactacgatctttagactcctacaaaaaatctttatattttggttaccatgattccatgaattccagagtttatttttaattatactttctgcgttgactccgaagataaatatttttttacaaaaaaaatacactgtaatctatatatacatttttgcagccattttgtgaaataaatcgtgtagttgagacttatttacaatggttgccactggattttaatatttgtttttgataattagaaaaaaaaatttcgaattaaatatttgacatttaacaattttcctaaaatctctctacattaactacacgattggttactaaaataaaactttcaaaatatttaatatcatttaattactacaaaattatcattattgatattgtttttctgcatgactattacaattcaattataatcatcaaaccgcagagatatttgatagcatttaattactataaaattacaaaatatttagacaatgattcataaacatatgataaataagatcaacattaataaaataaatgagttttttttatgggacgggttggcgggatgggtttggcaggacgttacttaataacaattctaaactataaaataaaaatattttatagatagttacataaattgttacaaattgtaaacttttatatatactaattttaaaatataaattgttctcgcggtataccgcgggtgaaaatctagtttattacaatttaagaaacgatattttatggtacagatgtaatttactaagatatgcttcttcttctttctgccaagaactatgatttgtacgttatttcaatattttgttaatatttcaatattattctttttgtttttgtttttgctaggcttgttctaaacttatcctttatgacctcatgggtcacagaaacatgttttctctgtgtgtcttggcttttaatatttaaagaggtttttccaaaatctttaaacaaaaccaattatatcttactcaaaactaaattagtttccttgccattgcccattgatagaatggtagagaagttgtaaatgaaaaaaagaactcggcagaatgattaagcgacaagagctagattcaactacaaaacccgcataaagaagcttttacattcataattgacatttatcttgcggaacaacggatacaattctatgaaaattcacaaaattattcatcctcgtcgacatgtttatctttctcattctcttcctcttcgtcatggtcgtcctcaggttgaaccaacttcaacctgagtcgaccatcttcgcggcttgcacgaaggaactctctccttggaatcctaacttcttccaacacaagcctcccttcttttctataagtcttgaagctcatcctagtcatcgccggaggatactctttccgttccttccttcgtggttcccactcctcctcatcgttgcttccgttatctttacccttcacttcaatctcatcatcatcaccgtcaccatcaccgttgactttttcatcttccaagccgtaataactctctgaccctagaccttccgtacacagctgaagactgctgttctcggctgaggttttctcgtaagaagaatgggatgattctctgaaatgaagctcaccgaatatctctgtaaacggcggtggcgtttcgtcgtggtgggttgtgacgtggaggcctttgcttgggttccaaggtgaagaagaggagagagtatcaagaaacgactttggagagttgtcttgtcttgggttatcgaatattcggtgaaagcttccataagctgccattgttatggagaaagaagagactaagaatttgctctcttctttgttggtttgagattgggagaaagagaaagggagggcacgagatgagcatgaaggagaagatggtattgtcaaatatatattctttagggggaaaattactcgaataaactgatgaatatatattactttttgttatattcaaatggaattattggttgcacatttattatagttttgtgtctcttttcagtttaaatttgacgacggtgatgactgacgaaattttctagatgattctgtgacttcgataataatagctagcattggttgcagcctacgaacaaaagcaacttcaaagtgaaggaattaatattttactcgtcttaattagtcgtctacactgagtatactttttgtacgttattatatagcttaagttttccacacatataattactatattacatgatattataattaacattttcagtttgcatgcattacattagttaggtttaagaatattttgatgtgaatattttaacatctataattcgttttggtcaacaacatcaataatttaaatccctagaatataaatcaatttagctagtaaggtgagacattctggtactagaatacacagaaaaaatggcgaaattaatgtgaatacaattcatattgcatgacagacaatatacaatacatgcattcataagttggttcagtaaaaatattaaatagattggtatcacatgtccatggaccataccataaattgtaactgttaaatcatattttataatacacctccaataaatcaatatttaacccaaaaaaacaaatttcatcattaaaaaaaaatcaaagaatgaggggaataaagaggagcgaccaagtggtgccaattttggtggctataaatatttggacgcggccaaataattttattttggactacttatatattctttatatcatggaatcataccaccattcatttttcttttcaaatttttgatttgatttttccttaaaatatcgcatcttcatataaaaatatacaaatgactgaaacacacgttatatttataaaacttgggatctattatgcttcaatgattgtaatagaaaatatagagaaaaattagatgaatcgtaaacggtagctacgtggaagttttctacagattacaacatttttatttatttttctggacaaaaaacaatgaacttcccatggtggcaaaccacgacagattcgagatgtagttgagtcgatgtgattggttggaccgtgggagcctcgtgatcctcaaccacataagctgatttcatgatattctcttatatccaggtgttatggtgactaatcacaaatatacaaacatatataacagtatttcctaagtatctatatattaaatgaatcgagaatagtatgaaaccagtacaatattattatggcattattcattcttttcaatatcaaacacagtgacaacaaaaataaaacattatgcagttgtgctagtaggtatgagtaagaccttatgttaatgtgggacggtcggtctcgttaatcccgtttcaccatgggctggatattcattttcccaccgtgcatggtagaaatatgtaagcacatttgtatttatttatttttatattttatattttatttgtcatatgtaagcacatatatatgtatgcttaatgcttattgcatgtcacataagtgtccacatgtctctgatcatgtagttttgtttaagcatatatacaaaaacgaaatctgtgtttagttctgtttttaatatttaaggttgaatgatttttgttttgtttttacttcaatcgtgagagtttcaaacttttatcccataatctctcccaatatccgaatcagcttttaaatattttacgacatttttaaaacgtcagttttgttggagtgaacatatatttctaataaggcaggtatgcggttggtaatggtatcatttttctcatatatataactgattttattttaagaattaataactttttcatgtatttcttttttatagatgtgtatttgtgatgtatgacgtccgtctccataacagtggtccgtggagccctgtccgaatctatccacccaacagatatatcacgacttcaccttttccacttggtcaatgaccaacgacatcttcgtccttacctcatttatctatatctttattatatatgctctcaaacacacgtagatcaataaagttttactttccgaataatcttatacgaatatttatcaacgtccacaaaatatgatttaatcgttagcgactgactagatacccaacccatagaatggagccttgatgtctcctagtacgtattggagcattttgctcctcgtaagatttatagccattaggaatatcactagaccaacgaatcttattcgtgaaagttttaggagagttgattcaacgttttctaaactttttttaaaaagagataaagctttttctcattttttttattttcgttgattattaattattctgattcttgttgtatataatgtttctacctactctttacttacaaattccgactctcgttggataccattaatcaataaaagggattattttttatttacaaaagtaaaactcatgaatatataagagggtcgtattggtatatgaatggataacactgtagatattcaaattaaatggtcaagtcattatcagcattatagcgaaaatctttcatgcagaagaaagctacaaccataacaaaaattattttgaaaaaaaaatcaaaatacaaactataacccacgtgagaaataccaagtgccaacaaacaaagcatgatcaagaataaaaatcgtaaatcatggtttcaagatatgattccaatgtagtgcatgatttatgaaatatattttttgttttttagaaaatacgctctcgtggaagtgtctttgatgcaatgatctaccgaaatactaagaaatttagaaaaagtatttaaagtttgaatttagaacgtatattcgataactagtaaaatttgtgttcctaaagtgagtattcttttgtaatgttacatgttaaataatgaagaaataaaagtatttgtgtatagttagatctatttgtagtatatgatagcttcccacttttaaaactttataatctttgataaatattgatatatgatcattgataaaggtacatttgattccttaaacaggggtttaaaaacaagaaacacatgcttcaactaattccaaacccataatttctcctttctcaaaatactttgttcttataatccttttactcatatcccaaaaactcgatttaagacacgacgataacactaaaataccaatacacaatcaaaatattccaattaatattttgattatattaaaaaggtatgttcaatagaatcattgtttgggaaaggcgtatccaaatacgtgtataagtatgcaaatgacgtgaaactttttttttgacccactagaaaaagttacatgactatacaatgttgaatatatagatattctcctctacaatatgcttttgtcatgcacttttgtcccttggtccattgaagaaccaattttaaatccatctttctcaattgccattatctcaacttttattttgtacactattcatatcaatatttcaattttgtgactagtatcaaaacaagtaaaaaatagttacataacaatattaatatatcatctttatttggttccaaatatgcaaatttgtagctttcacgaccaataccaaaggtagacaggaagaacatgcttcaccatttcatcgtgagaagcccgaaagagacactggttcaatacggtttacaagtttggttaagaatcggtatggacggttttaacacagaagaagccaatttagaacattgaccaaaaaatatagaacaatgacaccaacagaaccacattaacacatacaaaacgaatcaaacaacatttgatttcgaagaacagcttaagtctcctcaaggagctctctgctcctttttcttcaccgccaagcttcagtacgctctaccctcgatcctacacggctcaagttggtcaacccctttgttctgcccactggccactgagctggaggatctagattcagcaccacctgttgactcgagtcgctcaatcttcctgttctgtattttccaaagtctgtttctctctgttcacatgcattgttctctagggttaattcgtctgatatctcactgcttgaactctgattttcagcattttcgatgttgtctgattgcgtctcttcactctgctcactggtgttaaaagccaaagattgtgaagggctttggtgaccactctcatcagacggttctaaagggaatgcatgagcttgctcgaccactgagtcttgcctttctcttaaagttttttcgattagtgtcttgagaaagttcatcacttgaaccgcatacatcagtgctgtcagtggatcatccatctacaatacaagtgtttctcaatcattttatcccatctgaccccgagttaaacattgataatcaaccttgttgttgcagactcacctgtgtcatatttggtgcgaaaaccatagcgatgttgcgtgaattcatcttgtttagatgttcatactgaacaacatctgccattagattgatggcccaatcaagtagagcagcttctgtaggtggaagaagcctaacgagctcaacattttcctcttctgtttggcactgcatcacctgttcaggcgacaacgaatcaagaacgcttgtcggcagttctctaaaccatgcctgaaaccgaaaaccagaattaaaaaccaaggttcatatataagttttggaaataagatgtgcatatgttacataccttgataagccctgccaaacagtgaacatcgattcgctcaggtataaatcctcggtttaattgttccctaaccgcctcttcctcactattctcagcagtgagtctaaaaatgccctctgcctaaaaaaataaatgaagaaatgattacatggaaagcttataatatattcactttggagtaaactcgatgaagcaatgtacattacctgcaagcctccttgactatataaacagttttgcatcagcaatagtatggttggtacacaattgcctcttgaatcatacgataattgcattgattcggttgataccccaaagactgttgcactaaagtaatgagataccaaaagaggtaagagatgggatagcacacgagagacaatttatacttccaaaacaaatattccgagaagagcaaagttacaattgcataggcgcagtttcacccttttcaacattgatcttatcgattaagcatgtaaatagttggatgaacaatgcaaccttcacagaatctaacaactaagagatagtatctaagacatcaaatatagatgtttgaagacaagtaactatagtataactgcaagaatgaacacattggttcatggctcaatagcccaatcttgtaaatatgaagtgtttagcttccacggaaacacatagctatgagactgaaaaaacagagagagacaagaacgtgctctaatcacttcatgtactgactgataaaggaatcaaaaatcaaataagttcttctcgttttggtttcactaattccacataaaccttaatctgtatacaaccaaaacttagaggttctacaactcgaaacaaggaagccttaatcagaagcattctatatccatctgctcacccaccccaaaattgcaggacaagatcattgttgtgaggagacttttaagagcaattcaataaaaaggtaggatctttggacaatgtacctggcgcttggagctcttctaggaacttcaggctcgaattcaacaggcaaacccaagaagccattgaaacgatcaaaggtaacgtgcgccacgtgtctgacattggtaggccatccaatctccatgctacaaagctccctccggttactcttgcaagaaatcaaagatctcctgaaaatggcaacaagaagagccaacaacgaaatctgatcttccccaccatcgtcttcttctcctccatcggtactgctccgtcttctcaaatcttgttcttcgattgaggcatgaaagtcaacatcttgatcgaatctagcaactgggtttctccggttgtggtcagagctaatcaagagagtcgcattagagcgagaggcgtaagataaagaagaaggtgaaggagaagaagaagaagaagaagatgaatgagaagcgcttggagatgaaggaaagtgaagaacttcagtcatggcgcttcagattttggcaaaggaaacaacttttttggttcaaatcatttgtcaatgaaagaaaaggttttgaattgaaggaaatgtataaacccggaaatagagctcaagatcgaagattagattgttgattcaaaaccctaattagatgaattcggttgccactaatgaacaaaaaaacagagttttgttactactaattaaatttaaataaatgactaaacattgaccataaaaagtggttaaaccatataaaaatagttgaataagataagttttggtaacacaaaaaaaaaagagaatactactgattgttacatatttatgattgattttagttaaactattggaggttttacaattaaattagttaacattaagtattgatataaaaggataaacattgatatattaatgtttacaagtccttatcacttataaatgtggatttcgtttgggggaaaatcagtatactttatgatttttgcacgttttctaaaatgtgaaaccatgttatgttcttagattagtagtatccacgttttcacaaaatataccattcaaacgcttgctctatagtacataatccctatgttgagccagtagttaagaagcattttgctgaatttactaaaacaaagatcaaggattttattgcgttttaaagataaactcgtgttatgcatacaagtgatttgcttacaaaaaattatgtgatatatactcttcctatgggagaaaaaaaaaagaattgaagaaaacattagaaaaacgtatcttattatttgcattcggattgccaattttattataaaatagaaccagcccgacattagaaaatcataatgtgatcgcatgagtgagctagaatcaaatactatatccatgaacgcacgttagagaatcgtgcttgccacacatttggtaacaaacttgaacactataaaagttgttaacaatttttctacagttccccacatactagaattcatatagaaatttcaactaaaaatggccgtgaagatctcgaccattgaagtattgatcctctcccttgctctacttagcttcggccatggttgttatggccagcttcgactcggattctacagtcaaaattgccaaaacgtcgaaaacatcgtatctaaagttgttggagaggcattcatcaaggattcatcgattgcacccgcaatgatccgcctttattttcacgattgttttagcaacgtaagttggttgatacttcattatactacaaatttctctagaatatcctagagagtctcaaaagaaataaatattgatctttaatttgttgtatcaaaaatgtatgtaggggtgtgatgcatcgcttcttctagatggttcgaacagtgagaaaaaggcgtcaccaaatctaagtgtacgcggatacgaagtgatagatgacattaagtctgcggtcgaaaaagaatgtgacagggtcgtttcttgtgctgatatcatagctctcgcgactagagatcttgttactcttgtaaacacctctcttttatctacaaccttttattttacataatatgttttcctaatcaacttcaaaaatataatttacatttttgtttgaaggcaagcggagggaaaacacgatatgagataccaacaggacgattggacggtaaaatctcttcggctttgcttgtcgatttgccgtctccaaagatgaccgtcgcggaaactgctgctaaatttgatcagaggaaacttagccttaacgatatggttctacttcttggtatgtgaagtaaacatattaaattcaaatcatatattttttgttgtttacaagtcaaacatcaccctaccgaatttgaatttagtttctaaaatgactagtaaaaacaactactaaatcttttggttttctaaatttatagtgacatttgttttgcgtttaactttataaatgtataggtggacatacgattggagtgacacattgttccttcattatggacagattatataactttcaaaacacgcaaaagcctgatccatctatggatcctaaattggtcgaagaactaagcgccaaatgccctaagagttcatcaaccgatggcatcattagtctggatcaaaatgctactagctcgaatactatggatgtatctttctacaaagagataaaagttagccgtggagtccttcatatcgatcaaaaacttgccatcgacgatttgacaagtaagatggtgacggatatagccaacggtaacgatttcttggttaggtttggtcaggcaatggtgaatttgggatcggtgagagttattagtaagcccaaagacggggagataagaagatcatgtcgttctacttgcaacaatccattatgcgtataaacagttgaataaagttacgcgctatattttttgttttgtttaatgttattgtgttcacattttttttattcatatgtcattatttttttatttgggttgttaagtattttatattgttatggcatctaagtttttttgtttattgttattgtgttaactttttttttgtttatctgcctttgttaatttgggttgtactatcactgagtctcacagttctggtgcttcaacagttcgactacaaaatgacctcctttttgcatcaatctctatttatagattcacatgtggatgtactacaatgttttaatcgactagagtcaaggaaacctaatttaatacatttaatgacctccttgaatgggaagttaggattggtgctttgtcatatttgcttttgcagccgaagttaggattgtcaattctgctctagatgcagaggcagtcacaatcaatagatcactattaatgatgctcatagatcaccatttctctcagattaatggtataaggctaatcgaaaatgacagagtgatgcaagtatagccgttcgttatagttacgagtgttagaggtaagactgtccattgttggtatgacgcatgaaagatttgtcagtaggagattcgagtactacacgtgtagaattgtttgcggagtcgttcatcataattgcatgatttagatatagctagatctgataaattgatcatcatatttgtaatatgattatatcaaagtatctatgatgataatgtggcagacgtcacaaaaaaagtttcgaagtaaaaaaaaaagaggtaaatttaacttgtttgtattcaaatcaattttcttcttgattaataattaaatccccacccaacgtgattcttttctttaatttttagtaagaagcaagaaatgtgacattcctagacaattacatcaccagactctttcctaactcttgcctttattaataggacaatattttggtaggatttgagtaattgctagggtcgtggttggttgttaataataaagttgttgtccatgtgaccaatagtacttgattaattcagaaccaaccagatctaaagatagaaactatttcgaatcactattgaggtatcagatagagaggccagcttatttcgaatggcttacaggtttctttacaacatcttgagactcgaggttattgaatgaaatcgagtatatttttactttcatatgaggtacatcgatcctaacattagatttcttgatacttaggttattaagaaatgggccaattttcaaaaatttcgacttggaaggatatcttacatttacttctttatttagtaacaaataatgaacttacattggtctggtcagcaaccatctagaagtttagaaatcacaagatttcaggtccacttatacagactctggagaaagattccatgtgttaaatatgatgatcatctcatcattgattggttttacaataacatgcatgcttataagtgatcatgatatcgattagttcccccgcaatttgcatatgtttgatatatactaattatagaaactgttctgtatctctttatcacggttagaatcgttctagattacaaatatttatttttaacgtttgcggtaacgaatgatggctacggttttatcttatatattgaaaacaaagtacaaagggtaaaaaattatatgaatttccttcttttttatgaaatgaaatgatatcatcttttatgatatcaaagtcttatatggtctgatacattaatcaatggaagtagaggctgtaaaacaaaaacaattaaactagagaatgtgtgtaacataaaacaaaggttcaattctatttatcaagtattttttacttagttatatattttataataattatagttttttttctctaaataatacattttttataattgaattcttttatcattaggccatccgctgataccaattagaatgtcctgtaaacgcttccgtttataagaactagataaatcgtatacatagtttaataacatttgaatcttcatccggctagctaactcccacacaccccctataaataatacatgtgttatagtgcaataatcaaacactctcaacaaacaaagtaacaaacacttgcacttactctttgttctcatatagccttttgggtataaactatggaaccaaattgtgttcagtttcttgagaacaggacaattctcgtcactggcgcttccggtttccttgctaaaggtattgtttgttgagtatttcttcagtctcatattcctataccacgaaatatcagttgagtacatattacaggatcaacttcttaatccatgcatgtaagttgtaactaattaaccattaatttgtcattattgtttattaataactttaatttctaagcatagttctcgtggagcggattctgagattgcaaccaaatgtgaagaggctctacctcctcgtaagagcatccgacaagaagtctgcggaacaacggttacaccgtgaggtatattttatatacatatgtatcgccaaattttttgtagactaatagactattcatacgaatgtgaatctttataacaggttttcgagaaagaattgtttagggtgttaagaaggaatgttggtgatgagagtctaaacgccttaatctcggaaaaagtcgtcctgttccgggcgacatatcactgactgatattggagtgcatgactctaatctcttacaagatatgatgcaagatatcgacattattataagttctgctgccaccacgagattcgatgagaggtagtactactattgaacatccgcttattttatagaacaaataatatatgttattcgggacaatattaacttgtttcatgtttgcttacaccttgtatgtgtaaaagatacgatgttgcacttggaatcaacacatttggagcaatcaatgtccttaactttgctaagaaatgtgtgaaaccaaaattgcttctccatgtgtcaactggtgaatcatcattttaacttttaacaacaaaatagattgataatcatatattccttccgtttcacaatataagttgttttagataaaagcacgtagattaagaacatttacttttaaaaagttcaaccaataaaaaaaaagactgcataatataattaatcataaaatattaaaatattatataatttgcatagaaacttgaaaacaacttatattgtgaaacaaaaaattttatctaaaacaacttatattatgaaacggagggagtatttatctacattcgttataattattttttactttataaatatacttgttttctgttctagtttatgtttgtggggaaagaccgggacacatagtagagaaacattttgcaatgggagagagccttaacggtaaaaacaaagtagacattaataccgaaaggcgattggcagatcagaaatcaaaacaattcaaagaacaaggttgttccgaggaagaaactgaacaagccatgaaagatttcggattaaaaaggttgttatacaatatcaaatactgaaattagaaaatagatactatgaagtaactcgaagcattttcattattcatatatataatgttaattagggcaagactttatgggtggccaaacacatatgtcttcaccaaagcaatgggagaaatgcttcttggacactatagagaaactatgccaattgtaatcatacgtcccacaataatcacaagcactttctcggacccatttcctggttggattgaaggtttaaagtaagctatccatttatcattcctcattatagtagttactttagattattcatccacgtacttgatttgtttctgactcaacttctaatgtgtttattgtatgtatgaagaactgtagacagtgtgattatattctacgggaagggaattcttaagtgttttctcgtcgatcaaaagacagtatgtgatattgtaagtttcactagcacattaccaactttgaaaaatgtaaactaaaattctatttttactagcttgattgctaacaaagaaatatctctatataacaagataccggttgatatggtcgtaaacgcaatgattgcaatcgcagctgaccattgccatgattctggaagtcatacagtttaccatgtcggctcatctaaccaaaatccggtgatatataaacaaatttatgagatgatgagtcgttatttcatgaaaagccctcttgtcggacgtaatggtatgcttatagttccaaaagttacaagaatatccacactggctaggttccgtgtatacacaaatcttcgctataaattacctatacaggtaacagcttgcataaattgcacacgatttttttttttttctgtttgagtgttattctttttattattttaatagcaacctctcattttggctttgtgttttttcttctttagatattgggattacttagtgttatttccctatcccaaagagataaatttgcacttcacaaccgtaaattcaagatggccatgagattggtgaaactttacaagccttatgtactcttcaagggcatgtatgtatcactctcatatttcctccaacattccttttttacaagtattttcttccacttttaatgtatctagtagatatttttcatgccttagttcacgttttaactatagtttgaaattctattgtgtattcaatgcagatttgatgataaaaacatggaaactttacgtatcaagaatgaagccaaagatatggagaaattgtttggcaccaaccccaaatgcattgattgggaagactattttatgatacgcatatccctggcctcatgacacacgtattcaagaaatgaacttcaaatacaagttaatatacgaagtcaagtccaaagatattgttttgcatgggatgaagcctactatatataattactaagtatataaataataaatcgatggaaaatcgacgacaagtaatgttgtctttgtttgcttcttaatgtataatccatatttggaatttgcctatctaaaatccctcggcttgtctttggttatatataaaattggactactcattttgacaagtaaacatatactactttttaagtcaagaacatatactacttttccgacagaatcccacatttctttagttcttttactttgataagcaacgtcatcacttttaatgatattttaagtgaatgaaaaagagatgttgagtgaaggaaaaaaaagaagaaaaacaactagacgtaagtaaaattggactactcattttgacaagtaaaggtgggcttcggtgaagcaagaggttacaaagcaaatggacatcaaccttaaacactagtatataaaaagattttacaagtgacctgcgcttgtagttacctagttcagctaaaagtaaaaaaatgacacaaatgtaatggacaagtactgaaagataattttattggatataaatgatgtaaccactgacactgttgagcaaaccttcacggctcattaaagatttataaaggacagtaagaaaaaaaatatgtttccccactaggctttctatttttagtatcactctaaactctagcgagtgaagatggctaaagtatagctagttaatgcttaatgcgtaatataaatatagttggtatatgattaaatactagtaagtctggttttcaagtaatgcagtttaaatggttcactgatgaattaaaattgacacacaataaattgtttaaacataatataaatgaggaaattaatgttttgaaggaacttcaatacagtataagaatatatgtgtttctcaaaatggtgatttatgtatagttttctagggtctctccttaactccgttgctagacataattggtgttcgtgtataaatgatttgaatctaacaaattgttaggttgaataaaattttgcagcaaatttgaaggtggatgaatttaagagccgttaatatagaagaactgcaaaagtacgttatctatttgtgtaaagccaaccaccaaaaaacaacgcattttggttcctttaataatcatttctttcttttatataaacctaagatacgttccccatatttcactcactcaagaagacatctaaagccatcaaaaatatatccatagaagcttcatcgaaatggcgaatcaagcagctgctgcagcattcttccttttcgctttagccgtcttctccaacttggagctctcagcttcttcacttgtcagtggcaagatctcttgccttgactgccaccgcgatttcgacttctcaggtctactcttttaactagtttcatcacttggattttagtgtatgtcatggaagtttctaacttatgaatttcattttgcaaatcaatcacaccactaatcacatttttatgtagctttatttaaaaagggttataacaaagggagaaatgatatctagttagactatagttttcttgatatctaagacattagtattgcacaatttatttttcaggcattaaggtcctccttaaatgcgacggagagaagaaacaaataaccgcggtggcagctgcagacggatctttccggtcagtgcttccaacggctgacaaaaaaggctccataaattgtcttgcaaagctcttgggaggccctgagcaactctatgctcacaaacacaacttggtctctgaattggtcaaatctaaacacgattccaaagttttaactacctcaaacccacttgccttctctctctcctgccccaaaccatcccgagatgatatcggaagtatgatcggagattccaagactattaattttccgggggcaggaggttttggattcccacctgccagcttctttcccttcttaccaatcattggtatcccatgatttaaataagtgttacttttaagtccttaaagacatatgtatacatatgttttgttgtttacgtgaatgaagccagccaagacaagacacaaatatttagcaaattacattactttgtttagtgagatataaggtttgtttatgtgctaagaaaatgttatttattggctttatttagtttaaatcagttgcttttgtatcaagtttgtaataagaaggttgggttaatccaacaacatacgctttattgtgaacattcatgcttctatgattatataattttgcaactaaaattaaagaagataaataacctaaacacaacctttttttgttcaaaacctaaacataactttgaaccctagtcaatggagttgatggatttaataaagtcgtatttcgtctgatttgagaaacattgggacaagtcaaaagacaaacttaaatgatattgatgataacaaagatagcaaaatttgagtgcttaaatggagaaaaaatccactaataataatagcaacaaaagaaacaaaattgtctttaaaaaaaatcttgatcctacaaaagtcgggatactggaatttgaagtttaacccaacaagaagaaggctcatgacagcaaaagaaaatcaaatttcctaaagagtgatgataccttagagaaactttgtaataataataaccttagaaaactcggtttggtggacccattgtgctcttcaagtacaagcacctcacctgcagtcaaaggaacaactcaggttttagatactgataaatgtatggagaaagatcgagaagttcaagagggtgttgttactaacattttgccagtttttcttcaagagagaaacgaggaagttaacactcatctgaacattttgaaagatctgcttctcctccatggaaagattaccgacagcaactcccatacatagaaccttcttgagctggaacttcactgttgcctttgtctcattcactttggattccaaagactcttggtggctaacaagagttgggaattttcctgttcattgttcataagagtcaagatttaatgtagcatcatatagagaggatacaagaacatatgcaaagattaggtaaggttagagacatgcctgccttgttgagaccaggaccaagaagacgaggaatctgcttaatgacagattcagaagcaaggaaagcatggaatttcttagcaagcttcttaacaagtttcttgttcttgttcaacttcttaagagcttcaacatccatagattccaatccaatcttctcagcctaagtaaaccaaccgcaagttatagtactatactactaagtactaatcataacattttcaaaagaaaaggcggaaaaaagtgaacctcttcgacgtgctgggcatcaccaagcatgcaaatcttcatctttggcctaggaacgtgaggcaatttcacagaaccgctaaatctcttgtccttttgagggtcatagttcttgagaccaatctggagttcaatagtctcagtgaagttgcgtggctttgtctccttacagtgagtgataatggagcttattgcctctctcacggcttcactctgaagcttactacaccattaaaaaaaactcaaatttgtaacctttctataaacccaaaatgacaacaagatcattactatgaaatcaacaacttttgttccctcctcatgaaaacaatcaatgaccaatagttttttgtataaagaatcaaactttttcacctcaaatcctatctaccattataccaaatcaacattcatctgaatcattagcagaaaacaaaataaagttgatttgagtaaacaaacctcattttggtactccctgaaacaaatttgcttcctgtaaacggagattcaggaaaatgagatttaacagtgttgtaacgaaacgtattgagaatcctccgatggacggaaagacaaaagtattgaagaagatgattgatttacctgtgggaaggtcggaaacagagaaagaacggcgtcacaagcaatcgtctgttacttatatgaaccactagtgacaaaactctagccctaattatttcttctcattaaagcccagtatttaggcccacatagaaacgtataaaatattataggccttattatttctgcgaattaaagcctaatttcttcagaaaggttttaaacactaaacaaaacttgtttaaccaaatcaagaaatgttaagtagattgtactaagcttttttatacgcaccacagggaaggtatgaatgaaagagatactctgaagaagaaaatacatatgttatatatatattttaaatcatagttgaaacaatactcagcctagaaggcagacaatcattcctattcactacaaatctttctttatatacaaaactagttagaaaacaaaatcataagaatacttgtgggtgtgggtgtttgtgtcaagagtcaagaccaatttcgctcctgtcaaatgtggtttgttttctccttatccaaacataaacgagagatcatccataggaacctcatcaagacctgctgtatcaatatcctgaagaccctcgaaccagtttccaagatctgcctgttcatctatttcgtctagatcacggaacgctaatttcgagaaatctatgggagcttcgtcgtcgactgcaccatctccagaggtaactcctcggtttgaggcccctctgcttgctggtcctgttgggtgtgttgatgttgttgtcgaccttgattggtttccgttgttgttgttgttgttttcttttggttttggtttgttcttgttcctgaaaccatcttctctctcgcttcttttaccttgagcccctcctccactaagaacggcactgcctttgctcgttgtgactttggaggaagcgcatccgataacatcatctatcaatgcttctctcctctttgtactagacactgcacctacaaaacccaaataactcatcaaattttccgtcaaaaagatttaaagtataaccactgtcaaactattttatcaaggatgtgctctcgcattaatctgaaataatcttatcgatgttgtcatacaccatagaagaagaaactatagaaaaatcaattatagaatcaacatctaaagttcagattttgggtacctgaacccttggcctcagcctgatgattagaaggttcattgagcgtgttactggctgttccagagccgccattttctgatgattttgcatcgttgctgggagaactaaacaagatatcttgaagtgcgggatcagaaaaacagctaaacccagtttcttcgaacttacgacacctagcaactgtccgcctaatgaaccccagcgccacttgtcttgtaaccttgttgactttagctgctttacttccacggcatgcctgttttcagagcaatatcatataattaagaaccccatttctcattccacaatcattcatccaaattaattttcgtttattaccattcttttcttgtgggctgtttccacaagttggtccatagcaagatgctcaattttcctgcaggtaaacctcaaatcttagcgaaaataaaggtgtaacttggaagatatgaatctaaaaaagccaaagctaaccttttctcaacatctttccccttctggatggtaatgataagcttctccagctttttcttcttgtttaggatctagtattggtcagaaatggaatatgagaaaggttactatgcgtcaaagacgaaagtttaatgacgatctgacaaaaagtcttcctcgtaaagcatgaaatatttgttttgcgtttacctcctgataaatgccttccttcaactccataacatcagtgctcatagtttcttcagccagatcaggctgtgataaaaataaaaactggaaatcagtgaccaagctagagtaacaagtttttttttatttagctcaagttctttaaagattaaatgactggatgcaaaacctaccattgcctcaggaaacacaccaatgctctgtagttccagaagaagtcgctcatccaaagacataagctgatactgggtgtcagaaaccgggaagttgggaatgttcacttccctagcttgcaattgacccagactatttgaatatgtctcattaccgagtgcagcgtctgaatgtgaaagatcatcatccccaatccactgttcattgctatgcacagatatagacatgccaccatttctgaaagggttagacacaacactcctctcactggaaaatctgtcaaacaaaccgctcttaggggtctgaaaatccccacttgactctacttcaaattccattctgtctctctctctgaactcggtgtcaatataggtacatgaaccacagtgagaatcgtcactagcgtaatgaagagacagattcttccctccattgaattgtacaacttcttctccatcatcttcctcaattaaagcagaaagtaccctcttatacaatggagtactctcatttaattttctcatgtccaatctctcgaatgaaagaccagatacacatgatgaggttggacctgaatagtcaacatttcccacaccagggcgatgtactgctttgggcaatttaagaccctgaaaaaaggactctttcattcattctacattcagattataaaagagactagaaaactagacattgctatagaaatttgcaacttaccaagatgttataaccatctaagattgcgtctgacagagatttatcgagttcttgcgcaaaattcagctgttttcagaaaattataagttaacaagagtgggcatcctagagagaagtcatatatgatatagtatcaactatcgattattacctgatctttcatgttttgcatgtcgtctacattgacagcagcaaagatgtggtccatcttcttccaaaacttaccagaacaagcaagatctacaaaaacgatatatctagttagaaggaaatttgcggcaataaaaattgaaagacatgacatatggaaggatgaatacttgctgccttccgtgccgaatttgctgctgcaaaaatatcttcacgatcatcatcagattcacctgaaaagccaaaatttcacttaaatttatgcttaggaactgacaccaccagaagcacgaggtgctcttaaaggaatcatacagctgacatgcatagattacatccaactaccatcactatcatcttagaaatcaaatacatccctttgtacaaatgaaaataactgagaaagaactaatagttatcaaacctcaaatattcagggtaagtcacgttcaggatataggtagaatttcccagaaattagtttgataatactatccaataaccatgaatatggttaaagattggaactcgaaatgcacaaagaaaataactacctgtaatatctgaaggagtatttgcatttgaggcaagccgagtagcaggtttacgatctttaactttttttgcaggtggacgcccatatttgctgtccagagagagagacaagttagaacaattggttcgtgtatttgagaagaagtggtaagtaaaagaactaattatgtataaatcaccttctattcttatctgaggcaatcttgatattgtgaaaaggcttctctactggtaaattctctgacttaaccatgataggatgaaagccaggagttgtcaacgacgagacactttcactctttccttgcttccatgcaccacctcctttatgactggtttgaatcttgtttttccttgtcggaagtaatagcgaccctgatttaggagttgtgaacaagtcaccactcgcaaaagcacgctctcttgttttattgtctccagctcctgagtcctcactttcagataacccatatggcgatgaagcattcctcaactcccttttcatttttaaagggctactatcaacaactgagagtggcccagtggttccaggggatgctctaggactaaaatcagatgttgcaaaaccttgacctgagatcttgctttcagaatgctttattacaggcgaaactacatttgttctccttgttcgagaattcttatgcggtctctggccaacccattgagccattgcatgtgcagatgaacctgctggatatggaagcgttagcttattcccataaacattacagatagtgtatataaacaacacttagattattcctaaccttgtaatacaccggatggggaatcaactttggctgaagattcaacacccataatggctgctgttcttggagccctagaaacttttcctttcaatattgcagtagagctgtttgtgggactatcatccagtaagtttctcctggatattcacaattatgcatttatcagtcgtaaacaatttattattaaactgaaggaaaatctataacgaaagcttgagtatctccttacttattatttcccttggctagcctctgctcagcaagtactgaccgatcccttgcaatggaaacagtctccaactcattcctggataatgcacccatacatggactgtctggctcaaacgaagtatcaagtctgttgatcccactcaccccgggtgaagatttcgatctgcaacaaatgggtcacattatgtattcttcgggaaggaaagttaagcaagagggatcaatctggaaaactatataaatacaaatgcatgttgcaagaaaattccacagcatcaaacataacaaaattatcatgctaaagtaagatctaccaaaacaaattcaagatgaactccagtttaaatgagaaacttgacaatctctggcagtaacttaaatagctcatggacaatagaaacttgtagactagcatagctcaattagaaagcagagtaggatccccactagaaaatcatgaacctgcgacaacaaccagtaaataaacgcaatatttctctcttgtaggtccacttctggcccttggactagaaaataggtaataacattctcaaatggggttcagtgttatatgtccggattcctttaagttgtactttagctaaacaacagggataactaccaggcaggcttactaatcttatatctttaatgcacacctgaaattttgggagtcacaagaacgcaacttagagtcagctgttggctttggctgcataacacgttgttcaggattcataattctgttgcctagagtagcaacagaccgttttcttttcattcttgtctcccatccttcaccacccacaggtaatctgcgtatcttctcttctattcgcactgattctccagaaacacttggaggtgaatcagagcccttttcaataacgtgctgccttgcaagagcagaaattctagcatccccctgacagcaataacaggcaggaaccaatcaaccattaaacaacagtgacgtgggagaaatgcttttggaacacaatgattgaacaatcgagcaaaatattcaaatcttgtgtattctaaaaagatgttaaaactcactaaacatggagtggcggatgaacagaatggaaaaatagcaatgaaagtaaagtaataagcaatctattgtagagtaataagcagcctctagatctaaagtgaggtttagatacaaacccgcacatctgcgacggtcgtacgagcacgcttgtttaatccaagcatctttttcctttcctcggatctttgagccataatgtcttgtgttcttggaacctggtttctgaccttatcaaaggttgctgcgtccattctctcaccgggtggtatatcatttcgccgtcgcttctttgaatttattgtctccgcgtatttgtccaacttgaatatgttttcacttagtttctttactagatccctacaaggaacccaaggttttagtaaatgaggaataagtagtctagcaatcacaacttatgaaagaaagcaagaagatccatacccagcttctctggaagtatctagcacactttctttaaaatgcttaagctcctcagttgccacaggaggagaaggtctgggatgagacatcccaaaagaattatcttccgatgaagctctactaggaacaccgagaacccttctaagctctcctgaacgagtatagttctgattccctaatctaatcggttccaatgttaaaacttgagacaaatttggggtatcagatgacaatcctatagtacccctgctcaaattgttaccagaacctagcattatgccctttggtctacttgcttcactccaaaagcaactcaaacctgaaataaaaaaacgagagtttcgtaaatccataaatacagtaacatcatcactcttacgcacaccacaagagcgatataagggaagcacatagtagcaataaaggtgttaactttgaaactagtaaaacggattcttaaagaccaaaaaatcgcaattctcaagaattgaagaacgatttcgagaaattctcacctttccatctaagcccaagccatgaatcaaagacaaacaacacgaaaaccctaaaattcctcaacgccggcgagaaattggaaaaaccctagaatcgcggagaagaacccaaagaaacgaactttcgctattattaagctcggagaatccaaaaagcgtaattcagacaaagaccaaagctttgaaaaatatctcacccgaagattttcaacgaggtcaagctttcgttgttgttgttttagatcagacggaaaaaaaaaagttcccttttagtcggattgttttggttgggcgaattttgctacgtccattaacatttatgtacacagattgatgacgtcatcattctctctcagtttcacacggctttgaccaatgtgacatttttggttcgatttaatgactattagtggaagataacaagtattttatagtaaattaatgactttcaagtggttttcatcttacttacaaacttataatatgctataatattataatccataaataaaatctattaaatatgctatatttttcgtggcatcttgtgtagagatgatcatcagttgacaagaagtgccttgataatgtctttgcatttctcctcctcggcgtttagaagatgtccataacctaagacctcatggtacttaatccatggaagcttctctgatatatatcgattaatttcgtatggaatgattctgtcttccatcccttgccaaacgtggaccgatccttcgccttccgcaaacggattttctaattcagtcgggtcgaattcccatgtcgcgaatccggctatcatgtcccggtgaagacattcatggtctccttgttgtctaactttttcctgtggttaatatagatcataaaataaaatgtattaaatctaaataacatcattgtcataaaatgcaatattgtataaggttaatcatattaccaagccagggcgtggattctccattttcttctttatgacgaccaaatctttgtcgctgcataacgcattgttccccgtgaccatactcgaagacggaaatagtttttgggtcaaccaccaatataacaaccacggaacataatgagccactttaaacgtccattggtctttctttggcattagctccaacgctttactcaatttttcttgaggcactttagtccaccaatagttcacaaatggaaccattaagactgctccagctagtctatgaaccccacaaaaaggaacattaaattatgagacacaaaaaaagtgtaaaaaacagaacatgattccaactctttattacctgtggggaatgtatttgaggcaactataaaccgagtaagcacctagtgatataccaagaacatagaactttggtccgatcttgagtttatcggcgagttcttgaatgtcgtatgcttcactcttaacagtgcgtgatgggtgtggatcactttctccatatcctgctctatcgtagaacacaaagtatatcccaagctcctcaattacatcctgcaaaaaatttaaaaagacacgtcaagaaagaaaaaagaagaagtaatttttcattgcatttaagattgtggttgcttcaaaagtcaattttgcgtttgcgtctagatgtgatatgcctttctataaatagcaaaaaaagtgtatattttcaataaaacgttttcagttcttgaaaaaacataaactcaaatagcgtttagcgtttaccattaacaaatactttttttttaagaaccaaagacactgaattctcatttagccaaaaaaaaaacccaaagaaattaaaacaatatcctcaattacatatagcaaaataaatgcaaagtaaagtatcaaaactgtatatctaaaatggtgaaaatgggcatgtgacatgtacgagagttaatattgagaataagagtgaaccttagggatgggaaattcagtgtctttggagctgttgaagccatgaacgacaatgatcttgtagttagcattgtctctatcaaccccagattctctataagcaagatatcttccatcactgagcttgattctcggagaagtaaccggaggaccgttaggatggccgcagattcgcggtggtggaggcttaaatgatcggtaaatgtagccaataagacaaacaaggatcgcaaccgtcaccgaaaacatcattattcttttatattaacctgaaaacacttttaaaagattggtgttacttaacaagaaatccaaaaaatatgatctgatataagaatgttagagatataaagagaggggacctgatttttaggtgaatatgatttgagatggagagatgcttgtaggcttggtgaaactaatgaactcatatttatactagaaaatccatatttgggaaaacttacaaagagtcttaagttagtgtgtatgaaaattcctctcttgtttttgtttttttttcttaatatacattctcagtttaattatcagagaaattagtaaaagagagagaatgaaaagagacacaatcaccgtctgattgcaatccacttgttgacgtagcagacagtaggaggatggtagtagtagcacgcattattgtgacgttgacatgcgtaattgctgtcttataatcaccatctcttttgactatgactcttagagccgtactagtattattgttgcattgtcatcacgggtcagattcatttcatacaatgtatcttgttaacagaaagccaaaaagaaattctaatttgttcttttctcatgaatcttcatgtatggctttgttgttgacgtaatattgaatggaggcttatatgaagtcgatctaaaggagcataaaatcgtgaaaaaatgttataaaatctccaaatagaaaactaacaatagtcaataggatttgcagtaatattatgacaactatataaattttcagctacaaaattgacatctaagaaaagaatagataaaaaaaactggaaattgaataatacaacacataccaaaattataatgaaagtgaatgttgtgtggtgtgtctgaaaattttatgtgcttgcagttgtatattagtgtgtgtgtatccattattctcacttttctattttgttctatactttctacttttttttcttttggtatttttctaattattcttaaattgacaccaactaaaaacaagaaatgtttagctgtcgtcacatagaagaaatataaaattttgttttgttcatagctaggaatgacaatgatataaacaacctatgcttttgtataaattggtactcacatttaatttaactaaccaatctagaagaatgtgaatatctcttaaaatttctaatcacgtcattttgtataggcttaaacaatctgtatcgaataaatcacaatcacacgaaagatc

SEQ ID NO: 720 - DNA, 57031 bp, Arabidopsis thaliana
ctaaaatgtctaaaacgttctaataagtgccgagagactccaaagcctctaaaaatttcatgcgtggtccggttgattaggattgaaacaacgatagtcgattgttttggtactttccggttaaaaaaactgatttaaccgaagtgaactagtacagaagatgatgcaaatttaaagaagaatttccatagaaacaatgacacgacacacatataaaaagatggaagatggcaacatgcagtcatgcagagattgtaaagagataaaaacaaagaaataactcgagaccaaaaccacctgtccacagaatgagactccatttcgacacgtggctaatctctacatgctcgagaacacttgtttgttttcggagaagacagagtagcattctcgttgcaccgttacaaaggaccttccatctttctatattatcttttgcaatctgaaaaccaaagcctctaaaagtgagagtctctctaaaacactcgaaaacaaaacttagttgtgtgatctttggtttccttgaaatcatacagttcaaagagtttgctcaatgaaggttcacgagacaagatctcacgctcacatgtctggagacgaacaaaaggtaatttctacaccattttgttctttaattttttttattagtaatgtctttttaacttaatctattgttttctttagaagggaaatttgcggaagcacaaagcagaagggaaacttccagaatctgaacagtctcagaagaaggcaaagcctgaaaacgatgacggacgttctgtcaacggcgccggagatgctgcttcagagtacaatgagttctgcaaagcggttgaggagaatctgtccattgatcagattaaagaagttctcgaaatcaacggccaagattgttctgctccagaagagaccttgctagctcaatggttagtctctcattatttgaacaagtttttaaaatagattttaaagatttcttttttgttttttggtgaccagtcaagatttgctgttctatggggcattagctaaatgtcctttatgcggaggaactttaatttgcgacaatgaaaagagatttgtatgtggaggtgagataagtgagtggtgcagttgcgtgtttagtacgaaagatcctcctagaaaggaagagccagttaaaatccctgattctgtcatgaactctgctatatctgacgtaagtattccaatttaatgatttcaatcaatcatgttttgtttgagtcttcatttttttcttgttttgatgtagttgatcaagaaacaccaggaccctaaaagccgacctaaaagagagttaggctctgctgataaaccctttgtgggaatgatgatctctctcatgggacgtctcacgagaacacatgtaatatgccctgactttgtaatgatctttattgtgattccttgctttagactctcttaagaatggttttcctctctttgttattgcagcaatattggaagaaaaagatcgagagaaacggtgggaaagtctccaatactgttcaaggcgtaacatgtttggtggtttcgccagctgaaagagaacgaggtggtacgtcaaagatggtggaggcaatgtaaggttttagggttattactacaatttgtttgtttttgtgtttttcttcaaatcgttaactcggtcttgttccttgtgcctcaagggaacaaggtctaccggttgtgagcgaagcatggttgatcgacagcgtggagaagcatgaagctcagccacttgaagcttatgacgtggtcagtgatctttcagtggaagggaaaggaattccatgggataagcaagatcctagtgaggaggcaattgaatccttttctgctgaggtattgattactcaattagtaatactaatttcaatataggttagcttcaaaatcttgatttgtgttttgatattttcagctcaaaatgtatgggaaaagaggagtgtacatggacacaaaacttcaggagagaggaggaaagatcttcgagaaagatggactcttgtataactgtgccttctcgatatgcgatttgggaaaagggcgtaatgagtatgatactgaggaacccttaagatagtctctccttttttgaggcaggatgggttttctgatctgttggtttttgtaggtattgtattatgcagctagtcacggtacccgatagtaacctgaacatgtacttcaagagagggaaagtaggagatgaccctaatgccgaagagaggctcgaggaatgggaggacgaagaagctgcgatcaaagagtttgcaaggctttttgaggagatagcagggaatgagtttgagccatgggaacgtgagaagaagattcaaaagaagcctcataagtttttcccaattgatatggtctaatcattgtaccttgatcctcaagtcacttcttttgttacttgatttgctatgtgattgttgagtattttgatgttcttatgattctgcaggatgatggaatcgaagtaaggagtggggctcttggtctaaggcagcttggcattgcttctgctcattgcaagcttgattcgtttgttgcaaacttcattaaagttctgtgtggtcaagagatttacaagtactatttttgtaaccttcttcatttctatcaagaatccttctctatgtgtgggtgttctgatcttgggcgtttctttgcagttacgcgttgatggagcttggattggatccgcccgatctacctatgggaatgctaactgatatccacttgaaacgatgtaaggcttggtggagcaaactatttggttatcactttgctattacgattttgacctgtgagtggtggtctctgtatttttttttcaggcgaagaggtattactcgagtttgttgagaaggtcaaaacaacaaaagagacaggtcagaaagctgaagcaatgtgggcagacttcagctcacgatggttctctttgatgcacagcactaggccgatgcgattacacgatgtcaatgaacttgcagaccatgtaagtaaagttactatcatctatttgtttttatgtgttgtatgtcaatacactgaagttatatagtatttgattcatgtgacaggcggcctctgcttttgagacggtgagggacataaacacagcatctcgtttgataggggacatgcgaggagacacactcgatgatccgttgtctgataggtacaaaaaacttggctgcaagatatctgtggtagacaaagagtctgaagattacaagatggttgtgaagtatctcgagactacttatgagcctgtgaaagtctctgatgttgtaagtctccgtctcctggtatgcaatttataaacgttttagataatttgctattaatgatgtgttatcgtactgtttcaggagtacggtgtgtcagtgcagaatgtttttgcggttgagtcagatgcaattccttcattagatgatatcaagaagttaccaaataaggtccttttatggtgtggtaaggagtcaaaactctaaattactgttctttcctttgtcgagtgtggtcagattagttattggtgttttctttcttatagggtctcggagctcaaatctattgagacatatctacaaagggttcttacctgctgtatgctctcttccggttcctggttatatggtaattaaaaaagctgttttacttctttctttacactaggtgtttagatcataataagtgtcttgtggtgtttctttgctttagtttgggagagcgatagtgtgttcagatgcagctgcagaagcagcaaggtatggttttacggctgtggatagaccagaagggtttcttgtattagccgtagcatcacttggtgaggaagttacagaatttacaagtccaccagaggatacgaagacgttggaagataaaaagattggagtgaaaggattagggaggaagaaaactgaagagtcggagcatttcatgtggagagatgacataaaagttccttgtggacggttggttccatcggaacataaggacagtccacttgagtacaacgagtacgcggtttatgatccgaaacaggtaaatattggaaaaactgaatctataattttacttcaacttgttcaacaagacattcaggcctttacttataaaatactggtttgtttgacagacaagtataaggttcttggtggaagtgaagtacgaggagaagggaactgagatagtcgatgtcgaaccagagtagattacagacagccgtttctgattttttgaggttacaggcggcgagaagccatggaagaagatggttttttggtgtttcgtgttttcatgttttcttttctaggttgtgaatgtaaaagaaatggcttcttctcttatgatggttttaaggaaactagtttagctatataactactgctgtgtaaagcttttggctatgtaaatagatttacgcgataatatgtactccctactgttttaaagttctttggtaacaacaaaaagtagactactctttttggaaagaagtttatgataattgttcatcaatcatttgttttctggttattcagttccatctctgtttttttaaaatacagtcagacagtcggtagtttcaggcacaaaagctgtcacgtcagtgtgagaacatttttttagaaaataatttagccacaatactcgaaagttgtgaatttacatactaacactaatcaacagcattacaggaaaaacttaacagattagagcaatctacagatgtatatagccaacattacaactcaagttgcaaaagatcttctcaaatttctgtatccctagtctcacttctccattctctcaagactcaaagttatcttctcttgtcttcttcaatcgtagataagctttaaaagtacaatatatgtaattgcattgaagcatcaagtaaatttctggtggttttttttcagaaaactggtagaatatggacctggacttggtgctggatcgagcaaaattaactcaaaagttttttttttaatagattaaaaagaggaatttgttctttgattctttaattgttacaatacaacaacatatggatccatcagtctgatcatcaccatctaaaattaaatcatgtaagaccaactaatcttaaggtaatttagtcgtctctgtggattcataagcagcatcagctgaagaagtatctatgtcgttgagacccaactcctcgttttgatcccatgacctctcgtactcttcaactgtagttcaaacataacaaaacttgttattcaaaacccaagtcctgtcctaattcacatattgattgagtcctaatttatgtctcagtttcattataaaattcatcaagaaaggaatggataagtctgaatatttgtttagttcgtattcatatcccacttaaggctacataggcagggtaaacgagtaacttacatgtgagctgatggtcatctttgatatcatctgttactggtgcaataaaggaatttgctaattcatcatcaagaatcaatgtccacggctgttcaaagcttaggagctgcaagcaaacaaaacacatattcattattgctttttcttccacatcaagcacacgacaaaggctaataaacagaaattcaatcaagttcctaccttagtgagcctggctccaaattctctccatttgttcaacttactctcttccatactatcaccaaaagtgaatccgtgaactctcgctaggcctgtgagaaccaaccataccacacttgggtcagtaatagctaggagctataatccatcattggcaataacaaatatcgaatcgcttccattatccaaacaacaaaagctttgcaaggcagaatataagatacttggattactgagttatgccatggttcaatatatgtgttctagagtacttaaatcacttaaaatgattataacaaggataaaggataatgttgagattttgaagggaatgtagagattttgaagggcacactcactttctctgatctgtgtaaccaacccttcaactgttgttaccattccaccaagtgtaccaccagctagctccagatcaagttctgggattatcactcctgcagtgtccgactaatacacacgatcaaaatttaccattaatgacatagtagaaggtgttgctataaaaatctaaaggatcataaggttgtctactataatattgccatcagatgtgttatatagccacaccaaaggcctagaaagatcaaacaagcctgttttacatctgatctcgaagtttcgacacttatctgccactacctagatatattattttctgccaggacatgagaataccatatataatttggcagcgagcaagattccttgtcaaacctttacccaacttaaactacatacattctgtaaacttaaactgtgacaatcttagctacttttaaggtacatagaataatatgaggaaatatctattgatccgccactgagagaactggtgcaaaacaaaatgaagcgaaaactgaccttgataacatctcggctaaggtctgtaatgttcctcacagagagagtaatcttctttcccttttcaggaattgcaccaccaggcttcaactgctcacgataacccaaaaaaagttagtaacctaaacaccaggcatatatcagaaattctctaacaagatcaaaccaacgaaacccaacctcagaattacgatagccacaactgtcacatgtagatgccatgacaataacttcctgaaagtacgggatttctattttctgttaagtggtaaacaacatctaggaattcaccaacaaacacaaatatggaaacttgttgcggaaaaccaagaaatgaacgggtccaaactttgaaaggatactagtcacgaacatccgtgtctcacacggctccgtacatgctccgcaagttgaagggaaagtcatcacctgttagagaaattgtaacgggatatgaaattatattactatgatctaagtattcactctcacaaatacaaccttgggcgctgattattttctcgagcaataataaccttgaaacagaacatccaacaaaaactatttcaaaagttacagcgtcagaagttacctcttcaggcgcagagtatctgaacaagttgtcggaaatatcagtgctattactctgagcaatcgcgcgatgaccagcagttgctccgattgttccattaggtacataagctgttttagtagaaggtgcgccaaggcttccttctgattgtccagcctgagatgggttagcaacatatccaagtgttgcttgttgctctggtgttcgctcatagaatttgatggttagagagggatctggtgatggagcatgtctgtcatgttgtaaacttgtcataaacaaataaaagaaacataacttcttccatatctttaggtatttccaaattgaatatacttacgggttctcaatgaaactgtttccagcaggatcatccaaaatgaaggtgaaggatgtctctgctttagcacaagctctcagtttggacaagaattggtctattgcttcagcagttttaggatcaactttctgtgtccagcaaaatatgcattactattaatgacttaaacccaattaaatgggcataaaaacattaatgtcaagctccagacagaatttaccttgcgttcttcttgaagggcactcagttcatcagcagcccgtgctaatatcccttccacctgtaaataaaacaaaaaaacgggagctgttgacaaggacgaggtaataggaaacctaacaatctgaaacgaagttgcataggactattatacaccaacaagatgttttccaagctgctaacaccgggtggaagctaacaaagtaacaaagatagggttctcgctcttcctaataaattactacccaagtgacagtttgatgattatattgtcattaagtgcaccaccaatatgttctcacgagtagaccacacattttaggttgttctaagaaacgaagacacccaaaaatgaactgtgcataacaagatggttaagatattaaggacttacagtagacaaacttccacgttgggcctctggtggaatctcaaaatccagttcaggaatctgaagaaatttattcgcaaactactgtcagtttccagcttcaaatcagtccagttttcatggtatgataagcaaactaattcacagttttcaaaaacgttaggggaagcaatttcttataaatgtgcaggaagcagcttaggtttggaaaaccagtattttgattccaaagaagcaatgacatgcccagaattaaaaagaccgctcaccttaatagtggctgattcagatttcacaacttgccggtcaaatatctgcatatagacagatataagaaggtaaaaaataagctgaaggagtgagagaccactaaaaacaaatatctttatttcttaaaataagcatggagggctacattctactacatggtaagtatatcaccaaatgaaataaaaaaaatatgtatagacaagaacagaaattctaccttcacatcaccagctagaacctctagattgtaacagcatccacggggttgaatctcgcctgcgaactgaacttcattattcctataaaatagatcaaagataaaataaaaggttacttaaaatattctagtgattcttttgaacaatgagtacttaaaataatctcaattcattaaaatttgtacctttccccgcaatgcggacattcaaatgcagatattaagacctgtacccacaagtaagttaacaataagcttgtaagctcacacaaggtatggaaatgtataaatacaacaaagaaaacatgtttctttaaaccaactagaaatctatagcccaagaatgtggtcaattcatagggaattaagtatgaaaaatttgaatctggaaaatgaacagaattggttatcttcaaaacagagtatgacatacctttctgaagtgaggaattaaggtcaatagaaatctggttgttccctggaaaaaaattattattagctatttgtgcatagaagaaggatcaggagaaagacaagacaatttcatacaacagcttataactaaaagaattcggtaaaaatacactagtaactgaaagttcacaatatacagatcctccaattaattgccacagaaccataaatatcacttatatcacctcaaatttctcagcccatcaccaagacatgccaataagttgtgtttcatccttactacagttcatagcagtctaaagaacagaaagaactaatgataatgctgaagtacacaacagctatgtgcatgtacacaattggaaacaagctgcaactaaagaccaaaggctacagagaaactagcctgtttcctagaccttatattagttaagaaaggttgcaaactctataattctgcctatgaaaaaggataaggactacataaccaccaacatcaggaatctcaaagaaactatataagtatgtgcgtgagagggagacatacattttcttggcagcgcatgcacatgctctcaaccacatagaggggagcaccaaaggaaagatcggcggaaacagcttcaaccactgatctaacatcaatatcctgatcatttttgttgtccatcacctccaaagtttctccaaacaatcccaagaaatccgattgaccgcaaagtcagctgattccaagaagatgcacacctaaatggtttgtgagcaaacacatcaggaaacaaaaaagaagctaaaagattgaaacttttctgcccatcaacagctaactctataagggtctctactgaattcatatttgaaactaaagaagaacaaaattttcgaagacgattagtatttgcaatttcctggaaaagcttatagaagtttaaaccatatagcattatctattggttcccaacctaaacactaatggcaaggttccaaggattcgtaaagattaaaccatataatacaaagtagagagagataagagagtctcgagacagaagagagctaagagcagatacgaaacagagagctttgtacctcgagcaggcaaggaacagaacagagacagagaggttacgtcgccggtagagaaacgagcagaggagcaaggaattaaaaatcgaagagagggaatcaaatctagctttggctctgctgctcgagattttagggttcgttcgtacgacgtcgtttttgttgaaaacgagggaaaataggtcaaattatacacgaactaaaaattgaccatatccgatttcgacgatatagactatagtctattgtaaaatgatgttcgtagtttttactatctttttaaaaaaaaaaattgttactatcttttaaaaaaaaaaaattgttactatctttactacattaatagttttctcaaaatctccatcgacaacataagcaaatcaaagaaacatggaagactatatttggttatggttgagaatgatccttagttccttaccaatatcgacatgagtttcgaatctcacatttctcaaagcagattcccattttcaaacactattaaaagccctcaaaacccggcttcagcaagcatttgggctcgaggccgactaatacgcccatctcttaggtatcatttgttttattttgattagtaaatttcttgagattttcatcgtcgaatctgcataataaatagcttcttagaacctagatgatttgtttcgttaagatcagttttaaatacccggactgagaaggaaactttgttttcttttgatatgttgaatagaaaatttcaatcaagataatcctcaaataatgcaactaacatatatcgtctactaacatataacaaaagtcgaagttttactctgggccatgaagtgtatgattagtatgattactgtcgatagccaaaaagtagcattttttacagactgttcagacctggtgaagatggtgtcttccccaaccgaatggccaacgttttcatcttatttggaggaaattcaagaccgataaggaagaattcacaagattttctttatctttaatttctcgaactgcaaatgtaaaggcaggcacgaaaaattcgtattgaactgcttcatatcacttatgtaaacaattttcttcataattgttttttttgagctctaaataaaatctgatgacaaaaaaaaatatatatcgtctaatcattctctcttaatttagaaaaaagagagaggcattcaatccatacttaatgaaaatctaagacggttgaaagtttgatggtattaagacaatgatagtataaccataaaaaaaaaaaaaaaacttttgtttgtcctctacgatttttcgtcaaataaaataagacttatttttgataacatgaaaagaaaactctaatcaagttaattttcaaatcatgaaagtaacaaatatattgtatcacacaattctctcctaatttagaagcatggagaaatgcatccaaagaaaaacttaaatggaaatttataacagttgggagttcgatggtttcaagacagtgacattataaccacgaaaataaaactctttttgataactagaaaaggaaacttcatgaaaagaaaacctcaatcaaatcatgcaactaattctctcttagaaagaaggagaaaatcatccaaatatacttaaatggacatctacaatggttgggagtttgatggtattaaggcagtgatactacaaccatgaaaagataacttcatgaaaagaaaacttcaatcaatttaatcgtcaaatcttgcaactaacatacacatcggctgacaattctctcctaaattagaaggaaggaaaaatgcatccaaacaagacttaaatagataaatggttgggagtttgatggtatagaggcagagaatagatatatctagaaaatttagctatggagtgccaaaacgaacaataatctaaagtatatatttagaacctatatatcctaaaaatatttttttgttcgtaggattttattgtttgtggttgttgttcatcataatcacatatattgtaggttgcagatataactattgcatgtggagtgtgagtccatagaaatcggtcggtattgaaaactgcagaaataattttctagtcatatggaagttagattgttcatttgtaataggataccaaagttaatatatcttcaaatgatgataatacaagtgcggtaaaagaatgaacaataacaaaacaaaacatgacacaaattcactactaagtttttaatacggattaacataacgacggcataatacaaccaagaagaatgttttatttgcggtgataatataacaaagcttgcccttgcataatacaaattaatttgacaattatacattatcactgacgtcttactttaggttttggagcttaattgacatgatttggtaatcctttctctaagatagcaagtttcatattcttgagagattcctctagttcatcacatagcttgtgagcgtcaataatcattggatcaacagcgacggaaattatcatcttgtttgcataactcagataatgtattgtcaatgcctaccaaatcaagaaaaaaattgatgttagaatgaaaggccgaaacaaaatctaaaagcttattgttagcaagttgtaatcaacaacaaaataagtatacttgtggtagtccatagatgcttggagcaaagtaagcgatcggatggccatggaaactaacttcctcagtcggaccgggaaggtttgaaatgcacatcgttgtgttcaacatgattttacgctgaaacgctactgcgacctttgaaaaaagaaaaaagtagatgttttcttgatattgttagtggtgaaaaccaaaagaaaagaaaatatttcttacattgatcccgaaagctttgatgacgaactccgaaaatgtgtatataatataagtaataagagagtttttctttcgatctatcatggatttaacatttgagagatacactaatggatcagattgcaaggcgatggtaaacgggaagagaatgacgctgatgtagttaccccatctgcatttagagcccttggccatcatatcggctatggactatgaaaaagccaagggaaacaaagggacatggacaatattttcatgttattcgtgtgagaataaacaaagtctttaaagagttttacatgtaaagatcaggacttttaacctggcttccagtaggccttaggttcactactataagtgaacgtaatcgaattctatcaagcaaatcttgtcgatttggtgtaagcgatgttccagcttcctcattggtcttgtcttgtatcacagaagcaatttattaaaagagaaaaatatgattatagtttcttccatggttgagactattgttgatgagaaaatcctaacgttaccataccatatgattggtgcagatagcgtgtgagagcggcttctgtaacccccagaagaacgtcgttgatagtcttgtaaagaaacaatgtgcacatgagaagttagacaataaaaaacccacaatatcgtttgtggaagagcatcaagaataattcaagaaaatttcacatgagaatacaatatggaaaattgtaacaaatacgtatttaccatttccatagcgttctttataagtttgatgtcatccaaagacacaatccggtgagaaaatttctttatggcgccaggcttacccttcaggggtgtatctgtatccttcaagaaaaatattgttgccatgcacaaaaaggaatccactagggtattccatatcaatctcactgtggaacaaaccacaagaaccaatctaaagaatgagaacccgcgtctatggttgtaagattcacgacactttgggacagggagggtagaaaatgcctcgggttccgatgtttttcgggtagatgctagtatgagagacaagatagacactccatctcctaatgcatggtgacatcttatgacacatatagcttcggcgtcagaggttttagcgtttaggatatgaacttcccataagggcttagttctgtctagaggaatcatcgttatactggatatgtagtcctcaacgaaccattcaacgtcttcctctgtcaattttggatctatgtctggtacaaatacatgttcctctacattgacaacatcggtccttaaccattttgtaccatcatcgtcctattaaataagctaaatatgtaagaatatttggaagcacatgtattaagaagctggtaagtaaatcaataacacttttcaaaaaatgtataaccttcattagaaaataataataattatcctgcttaccaaaaggctgcagaaacgaggatgcttgaaaacattaagcttcaaggaatcaacaatgacgtcagggttgatcttggttttgcacccgaactttatgacaataccacagtcgatgctcggctcctgaaatgcccgagccatagggctcagtggctcctcctcctcctctttcatcttcttctccatgctcttagtttctctctttttatatttattgtctcttgatctttattttatactttgatcaatgcaataccaatcgtctatttataatgccattgtccttcaagaacagtctaacgactaaagacttttcatgcacatcaaatcatgcatggacccatttaattaaaattctgtcaaatgaaaaaaaaaaaaatctcttaaatgaatttcgtttgtctgtttttgttgttagttatttattttcttcaacgaaaaggttctatttatttattttcttgtttgagtgtctttaggtgtgcgtctctgactctggttagtgatttcagatctatttcaatagtgtgatcaaactctttaatttcagcatgaccaaatctaccatataatgtcatataatatctctatcaaattttcaggtgttggttaaataaactgcttagtttgaaaatactttgatgggtaaaatgattcgtagacaacactttgatgtaaaccatgcatatcagaaaccggtggttgttatatggttacatcctgataataatcaaagacgatgatgatatgacgcctcggccatctaaatttctaaaagaagtaattgtgtacgacaaaaaaatcacatccattcgggagatgcgcaaatgcacgtggaactaaaggtattagggttttggtcaggagcaagactatattgtcggtcgtacgttaacgttgcttttcccgtagaatctctttttcttaccattttgacactttcatagcttttttaactaagaagattgttaccctttccaaatgaatatgtaacacagtggctatgtttagtttgaaccggctctgcatcctatcatttcaaatgtgtgaacaaggttgcttacgagggagcaagaagggagaccgacgttgacgaaagaagatttgatgcagcgcatctatacatcattgatcaccacttcaaaggctttcatggtgctcgatatttctctttgttttacgtctagtcttgttaatggcctaatgggccatgtgttcgtgggctttaaatctatatctcgtcggtatcgtattacattagattagggtttttgttttatgtttcttattatttaaggagcttgagtctattttggaaggcagcttcgagttttaagagagctttgtctaaagcctagagaggaggactctcaaccctaagagcttgtgtgcaagccctgcaaggaggacttgcaaaaccttgtcgatatcgatctcttggaaccgaccttatccttattgcttattcgtcaagtttcggtgttctaagtaagatccgttcgttaatccgagttctcctagagatcttgtgttctcgtctgttatttagcttccgccctctatcaagattcaagccgcatgcacgcactaggagagaaacaaactaattcacagttttcagaaaggttagggaagcaaattcttatgtatacgcaggaagcggctcgggtttataaactcaagactattttaattccaatgaagcaatgatatgccctgattcagaaagaccactcaccttgatagtatttaagttaatagtggcttattcggattttaccatatccatatacaggttctttagttgattgccacaaaaccacaaatataaatatatttcacctcaaatttccttgtccatcactaaaataataagttgtgtttcatccccactacagtaacaatctcaagaaccattggattgcagaaagaattaatgatattacagctatatgtgtaagtacacaattggaaaagctgaaactggggaacaaaggctaaagagaaactagcatgtttcctagaccctttatattacttaacaagcaacgagtataactctgcctatgaaaaaggataaatataacataaccaacatcaggaaactcaaagagactatgtaagtgtgtgtgtgtgtgatagagggagagatacattttcaccacagcgcatgcacatgctctcaaccacatagaggggaacatcatattgggctatatatttgtgtttattgcccaagcccatacacctaattaagtatcatgtactatatggatatgtgtattatacagtcaataaaatcaaaacacaattccgctaaacacttttgtcacatcaaaagagtgatcggcggaaacccatcgtcgttcattcttttttctattttctcctatattatgcttttgataaataaaaaaaacgtgtttatgcaaaatcaattgaaggaatgtacttttgtttcttattaagccggaaaatttatgtatctatgtttcttgttgaatcgaataagattcaaaataaatttggcaaatagcaataatttttttatagatgtcaataagaaaaaatgtgacattgtttttaaatagtctcaagtaaattttagttttgattttgttcttctttctttctttgttaaagcttaattttttctccacttaattaattgttctggaaacatgatatttttcataactatcaaatctgtagtttatcatccggtagtttaacaaaactaaactcaattgcatagtactgttgtatgctttaatgtacactaaagtatgcatgtctctttaccaaaatattggtatatatgcatgcatattgcatgtcttagtacgcattatagcattgaaccattcaaagcgtaaatctcaaatcctactctcggtggtatctcgatcttgatatttagcctattctcggaggtctatcatgtcaatcttttttatgatctctcccgccagttcccacccaaaagtttcctgaactgatttctttggacgacacattctatttcccaaaaacaatatattgttttatttgctctgcaaagctcagaacttcgacagcataaaatttaacttccacctgggagaaaaatttatgccaaagaatatttactgacagttttttgttttttttgcataactaaatctacatgttttatatacatttcgggattaaaagcggatcatgcaatattatagtttttggtatttttttttttttaacctatattacttttatatgttaatataattttcatactaataaactttagcattaaagtacatcaatattaattagcatattgttattattactttagttaaaaaaattgatcccatacataactttctaaaagatgtacctcacacaactctgataacaccaaatattatattaatgtcacaaaatgtgtctgcgtgtggatattggtgtggtgggttcagaagttttaagggtgtctcccaaattcaccccacatgacacccataatctgacttacaaaaatggaaagaatgcattgaactagacattgtacatgcgttatacagttatcaagtgttaaattcccctcaataaaatgtctccgtaagtccactgcaccgatgcccatacctatttatttggagaatgtaatcctttatatatatgtaagactatgtaccatatactttatatatatgtaagactatgtaccatatataatagcgtgttttagtgtcgtcagtaagacaatatttatgttgttgataatttttttatatatatatataatatctgagaatatttaaacaaactatcttattttttgtgtcgatcggcaaaggttttagtcaaagtttaattagtctttggtctcttgaaatgtaattgtaaatcgacctttagttgtatatattttttgttatacaattgtataaacttttataaaacatgttattcgtatttacttctaatctccaattaattggtttacaatatttgtttcagatagaacttgtgatcattcatctatgcttaaataaccactttgtatttatacattttaaaaggtatttacgtgggaatgtgggatggtctcatctatatattaaacattagctgtcatgggggtacgaactatgtatttctttcacgcggtattctttctttcttctttgcttgcgaaaatttcctaaaattatgggttgtgatgtggatttctttgtcttatatatagcgaaacaatatttgatatataatatagttaatactatagataactaggacctccctttacaccaaaaaaaaacaatcttgcttctgatattttagctgcagcctgcatgtctaaccataggatctaagaaaagtaaaaaccatacaacaactttgctctcgtgcataaactgtcaaaaatacggcccatatgtgttttataaatagtgtcttatcttttttttaaaaatcacaaaattcatgtcacttgtttttttatttttttaaacaacaaacaaattaattatgtgttatttattaatgggaaatacatgttggaggtggtgcctaatgcaagagatatattttctataagccatctcatatgtcaatggggccaaacttaaaattctctaaagatgaaagaactagtgggaaagatgatatacctcacgatactattatactacaccaaacattttctgagcgattcacagactaatgtagttctcttatcttgctgtcgatgacttgatgagaacctatagttacaagctttatactaattactacgtacaatcaactttctcaaaggtataatcttaatcgagttttagtttacccttctagtactttttatcttcaaaagaagtgtttcactaattactatatgattttttttttcttaggattttatcaagtttgtatatatgtttcaagattgtgtttgtaattcatctgctcttcgttggtttattgtctggaaactatccataagtttcaatttttgataactatgcgggacagtattcggggaccatacttaggtgccagtggagatggatcactcacgtgtgtggctttgcatagatttcggaggatctaagacaacgtttgaccatgtggcgcctttacttaaatttaaaatatttcttatataaattagaaactatctataagagtataatcatttcaattaatttctctatataaatattggtgtgaagacaaaatgttttactaaatcaatggtaaatattcaaaaaatatctaagattgtgtgcatatcttcatttatgttaatttaaatatagtacaactgtatacctctattaatttttaatttatgataccactttttaaatattactgttatagagcatgttcacaaaatattttatagagttttacagattttataatgcatgttataaaatgtttataaggttttacaaattgtagaaaattttatattgtttataatacatgctataaaatgatatttttgaattttttttctcttagtggtatttttaaaaagggataccataaaagtgttatttttcaaaatttctctaataatggaaaatagtcaaaattagcaagatgagtgaagagtgattattaaaaaaaatctgaaagccgatattaaatcaataaacgtacgaaacatattagcctatttagaaattggtagaaaatcactaggagtcaagactaaaagaagaggttaaatacaataaatattgaccagttgagccaaatagaattatgagagttgagtctccaaaatttaatgtgtgtactgcatgtgaggtggagccagaggtatctacagcttcctcgctttttcttatactgtgagcaggacctacccacatgcatggaaacaccatctgagaaaagaaaaggtgaattaagaaatgagcaaatacttttgtgttatttgggttgattacttgtcctctgatatccagataaatattatcccaacgtattaattttaagaggagatttatggaaaaagattaattctgaagtatatatttggaaaataacttacattttgaaaaacttcaaaaactaaaatatttgaactattgagaagtcaagatgtgtggcttcatggcggtcataagaaaatttgagtacccattgtctttacatcaatgtgttgattatatatctcatgacggttgttgtgcatgattgttatcgtttacaagcgtatcggatagttatttttctttttaatatatagttgcctaaacaattatgaccgtctatgagttttagatgattatttataagacttttcgagtattttcatttaagagattgttcatggaatgttaggatatatgatgatcgttcaagcattatcagtgaataaatatgtgatttgtagagtggtatgtcaataaaatatcactgtgatcatttcgttttgattagccatggcagctctttatgtgacatataatatagctgataatctcagttagggcatttccaatggttgtcttcaaatatatttttaaaattagagttttttcaaatttaaaggcaaaaatgaagcaagccttttccaatggtttccttcattttgtacttcaaaaagaatattttaaagtatattctatctctattttattattaattattgatataccatttactttctaaacttatgaactttaacccatttgtttaataagtagcaaatagtccaacaattttatttagagtacattattataaagaaaatcacattacataacattaattaaaaatatatatttacgatacaattgtagacatataattctcccacaaatgatcaattaatgcattccgaagtgagaaatgagtttctttatccttaatttttctgaatcgagcgagataaaagttgtttttgcattttagtttaattggattaaaataaaagaaataatttgtttagaacaaaataaatactttgttattatttgaaggatcattttgtaaataagaaagttcaccttcaaaaaatgaagatgttaatagtataccttcaaatatgaagatacactgttcaattcttcattttgaagataaaaatgaagtaccattagagaagaattcttcatttttcacttcaaaatgaaggaaaaggtgaaaaatgaagcatcattggagatggtcttagctaggtcggctgattaattggctatcggcccgtccttcttcttgctacctaatatgtgacatattgtggctttttgttttactcctttaagtcatctagaatttgtttatatatcaaaagatatgcgaacagttatagatggattagtttgcttatactaaatatttttgtatagaacatcaaattgcatatgctttttattataaatataagtcttcctacacaatttcgctctctcaccaacaaaatggatgttgaaccggctggcctacttccttgcgagaagaaattcaatgcattttttacttacgttgtgttttgaaaagacatgatgattatgtaaataatgtttttgtttattacatatgtaaattaacatattttataatttgttttttaaaaatgtataaatggaaggccaattaaagtccttgagtatcaatacatgaaaaaattgctacatacatattttctgacaattttaacttttcctagaaatacataccaaatcacaaacccgagctcatttctattttatttgttcttcattttgaatgtacactgatgtttgtccccaaaaaaaatgtacactgataaaataatttaatagaatgattcaggatgtcaacgcgtcatcaaaagttcaagactactggaccaaatggtccaacaccaaccttatcgtaatttatctataggtgtgttttcaaatggataaaagattaaaagacatacatgatccagatagatgaaagcaaatgataagacttaatataaataataaagaatcgtactgattttttgtttgtaatgtgaaatagaatggctcgcaactcaaagtgtcagactctatctatgcaaaaaatgtcaaagacacgcagcttgtttatataccattcatattgccaaacttttggaccaaaatatttttattaagatcatataaacacaaagagccaacccactgtgatcggtgtgataaaatcccaactacttggagcaacatgtagtttacattattaagctgaaactctaaagatcatggaaatatatcaatcatatcactgtagggtaagtccaaaaatagaggtacgtacgaactacgaagacaacataacgttttagtttctaccaaactttattgactaagtacttttttttttaattgactaagtacttcatatagaagtgcaccgattattgcaaacccttattaatggacggcaaagaagagaaaatgacgacagcttccagcttcctaactcctaattgcatatatggactatggtaggtgtccttctcgtcagatcacatgtttgggaagattaatcattggataaacttaaaagaattgaattatgattagaagttatctgaacatttacttttgaaaataatatattacctaacaaactagtattattttggctaacgtcctatagattgtgtttcgaatagttttggaccttttggtaatagaaaaccaagtaaatgaagatagtacagtttcagtgttttgagaaaaaaagctgaactaaaactaaaatgtttaaggacacaatatttagtttcaattagataattcaacagtttgaacaattttttttttttttttttgaagtcatttatttatacaatgttttaaaacgcattaagcatttaggcagccgacaaacgcctattgtctaactgtaaataggcgcttccacttaggttcatattgcatatttactatatgtgtatagtgacaaaaaccaatatttctcttattttggatgaaggtatagtagttgttaaatgttcaatataattaagcattaatgacaaataaaataaaattaatttagttgataaaaagataatcttataaaaagatcgatgaatagatataatggtttactgaattctatagctcttaccttgcacgactatgtcccaaggagaggaagtaccttaactataattctgaacataattttgtctatcttggtgagtattatatgacctaaaccctttaataagaaaaagtataatactggcgtaacgtaataaattaacacaatcataagttgttgacaagcaaaaaaacatacataatttgtttaatgagatatattagttatagttcttatgtcaaagtacaattatgcctaccaaaattaattaatgatttcaacaggaagtctgagatgatgggccgacgtgtagttacgtttcttgaattgtgagagatggtatttattatactgaagaaaacattatttactaaataaattttcatttcacatcttctgtaatcaatgcgggtagatgaagaagttgttaatacgatggccaaccatatggatctcttttttggcgtttctatatatagtaacctcgactccaaaggcattacgtgactcaataaaatcaagtcttttgtttccttttatccaaaaaaaaaaaaaagtcttgtgtttctcttaggttggttgagaatcatttcatttcaatggaatccaattgtgttcaatttctcggtaacaagaccattctcatcacaggagctcctggttttcttgccaagggtacgttctttctacacctcggttcagtacttcgagtcttgcttatgctataagttctaattagtatgatttaataacttaaatgaaaatttcatatgcttcatactatctttgtacgtagttattatagattcttgacatgcgtgcatttggttctataagtgtacgatagacatcaacatagtcttcttatggtgaaaactgaacatatatattgttaatcgtatatttaagatagaaggatatgtagatgtcgcgctaattatgtgtttgtttgtcttgtttaaataaaaaatgagagtgatagctagtgataataactttaagatataccaagaatattgagtcccatactgttcatttcatttattgcaacacaatagatttttatggtccaataattatgatactgatgcagcttacaaatattcaatgcgttctgtatatatatatatctaatttgagaaaaattaattattctgtatcatagtatttgttgcgatagtgaagtactcttcatatttatatattcttttaaaccccaatttttctgattatatgtttgcactgcatttaaaaaccagtatagccatttacgataatgaatatttaaacactctaaaaagggtgaatttaagcttattcatgtgtatactacaagattaatttagtaacgaaaatattgttttcatagttttggtagagaaaatactaaggttgcaaccaaatgtgaagaagatataccttctgttgagagctcccgacgaaaaatcagccatgcaacgcctacgtagtgaggtatggtgtatattaaatcctataaccaaaacactctacacatacacatctagaggcgatgcattaattaattatctcaaaatatcaacaataggttttctttcccttatttacaatgatcaacaggttatggagatcgacctttttaaagtgttgaggaacaatctaggagaagacaatttgaatgccttgatgcgggaaaaaattgtgccggttccaggtgatatatcgatcgataatttgggattgaaagacactgatctcatacaacgtatgtggagtgagattgatatcataatcaacatagcagccacaacaaatttcgatgaaaggtatttacgaaaataattgatgatatatcacatttactttgtataataatattcaaatgtaacttgattttcattgttctgtttttaataaaaataaaagatatgatattggtcttggcatcaacacatttggagccctgaatgttctcaacttcgccaaaaagtgtgttaaaggacaattgcttctccatgtctcaaccggtgagtttgaattattttcttacaaaaacaaccaatatatatactgatgcttactagagaaatgtatgtattcttttagcgtatataagcggtgaacaacctggattgttactagagaaaccattcaagatgggggagactctcagcggggatcgggaactagacatcaatatagaacatgatctaatgaaacaaaaattgaaagagcttcaagattgttctgatgaagagatctcgcaaacaatgaaagattttggaatggcaaggtttgcagcctagtcacaacgtatatgttcttaaacttttacttcaatcatccattaattcttaaattaaaatggtctaaatatagggcaaagcttcatggatggccaaatacatatgtattcaccaaagcaatgggagagatgctaatgggaaaatacagagaaaatttgccacttgttatcatacgtccaacaatgattactagtactattgccgaaccattccccggttggattgaagggttgaagtaagtattggtttattatatccttgttgtatctaattttatctcgtgctcaatattcatctttaatttattttttcttcattgtatatgcagaacattagacagtgtgattgttgcatatggtaaaggaaggcttaaatgttttcttgcggattcaaactcagtctttgaccttgtaagtcctttcaacatctttgtatcacaagtcaacacctaaatcaatttatagcatattaacaatttttatggcatattaaataacgggttacttgtttcaattaatatattatatacaattcattgacaatgtgttgatggaaaaaattataataacatttgcagataccggcagacatggtagtaaatgcgatggttgcagccgcgacagctcattcgggagacaccgggattcaggcaatatatcatgttggttcgtcttgtaagaatccagtcacgtttggacaacttcacgatttcacggctcgttacttcgctaaacgtcctttgattggtcggaatggctcgccaatcatagtggtcaaaggaaccattctgtccactatggctcaattcagcctctacatgacccttcgttacaagcttcctctacaggtaccttaacattataatttatgttctattttcatttcgtttcccaacttttaaacttccaagaaaccctaaattttggttcagtttttacgcacatctataaaagactaaggctgtaaatggtaaccaaaaccgcacccaaaaccgcaccgcaacagtgttgtaacaatatcaaaatctctacatatacatatatatatatatatatatgtattttcgttactatttaaaccgcaccgcacttctcccgcaccataaaacgcagtcactattcagaacctaagaataatattcaacatatatgttgctttttttgttacctttatgtttctcatttgtttttgttttcttttcccttccagatacttcgattgatcaatatagtttatccatggagtcacggagataactacagtgacctaagccgcaaaatcaagctagctatgcgactagttgagctttaccagccttacttactcttcaagggcatgtacgtatatatcactcataaactttcattaccaaactttaagattaattaataagacagtataacatctttatttcttaggatagagaacaaacactagttattactacacatgagttcttatcatatctttgagtcgtcatcacaactttactaagtcatgacatgatattatatattcttgtttgtgcagatttgatgatttaaataccgaaagactgcgaatgaaaagaaaggagaatatcaaagagttagatggatcgttcgagttcgatcccaagtccattgattgggacaattatatcacaaacacccacattcctggcctcatcacccatgtgcttaaacaataaattatgctggtaatatgtttggaactattgtgaatctcgtgtgtaatattattaaagaatacgattatatcattctaatcttgtaatttacagtttgtgttggcgtgtaatatcaaaataaataaaaaaaacttattccacaatggataagactttgaatcatgcatatgatattcagtcgtgttataaatatatttttatgtcaccatcttacatatatgatatatagaagcattttattttttagatttggatttttcaaaattagttgtttattaaaaatgaaaaaaacaaagagaaattcttaaacttgtcatttttggaagacaacttcaatctatgtaattgcaacctttatttatttcaatttaatcctcaccttaaaactgtatatatttgagtttatgtgtaaaaaaagtaatcaaatcctggaaaaaaaaatttgttgcatagagacttagaaatctgccgatcgacaaaaacaaaaaatgacaaatagtactcaactactcattgcgctaccgaattatttagttgtaggtcagttagcataacgtgtaactctttaaatgattttactgtttcaatcatttggataattgactcaatggcaaatctgtatataagtgaaatctgtaaatcttttctaacaaatatgagtcatataatctggctatttactacgaatgctgtaacataattaatctgcaacaaccaccaccactgatgggatccagttaaaatattatcgaaggctaaatcatagccttgtcagttgaatttagttcgataggacctaacacatgtggctctacagcaaaattgtggatgtttcttctaggtactagctactgtttcttattatgtttaacatgttggaccactcactacttgagccaaacacgcttttaataatatgataaaaacaaacatcatctatttttatgtaagtttctaagagagactatttacacaacaatgacacgtttttgtatcaatctgttgaaggtccatgcctcctccatggctcactttgaaataaataagtctgagcctctcatacaataaatggttgttgagcttttttgggtcctcttgtcctcctcgggttagcgctgagcatgcaagagaatgcgtttctcaaatccgaatcctcttcactagtgaggaactttgctgcagctggatttgctaagaggagcttggccactaggtaacctgcgatggaccaagtctggtatagccgtgcctgtttaccgatgaatcttgctcttttggtatcgtagtactcgggccatttgtctaaggaaatccgtctctcggctaactcaaccgccttttctgcaatctctggtctacccattttgatgcttgcaactgtcagctgaaaaaacaacatgggactcagattttaaattagcacaaatgcagctttgcaattctcattgataaaaccaaaccgattatctcgttgtgcaatccaatatgtcaaaatttcagttctagttcagatgtaaatctcagaaacaaggaaaaaaaccggagaaccaaaaagggaaagagagaaatctgaactaacctgccatagcagagttggccatgcacctccattgtgataagaccaaggactgcaacataatcaagatgcttaaagtgataattgggatggtggaaatacaatagtgaaaactttaagacatctattcaaagatcatgtgggagagagaaattacgtattctttggatcacttccggttataattcgccattcttcaccttccatagcagggtaacagatcttaagtggcatgtctgctacaagttctgcccatttggcttcgatgaaatcaagaattgcatgtgattgatcatttgaagccaaactgctcactatagaccaaaggttccccagagtaaagaatctgaaatccatgtgagcaggctgaaggtttccaatcaaatatcctcctctgttcggcataaagtccactaaccatgaagggatctgatctggatatatgttgaatttattaaccgcatcgtaagagtattcctcggtctggtaacggtatatttcattaatctttttcaggtccaaccagtagtattccctgatgtggaaatttaaagcaacaagacgattgttgagagctcggattagatcagctgacccgtcctctggcgtaagcatctcacgagcgcagaccaaagccgaataaaagagtgcctgacaaagtaaacgataaataaagcggtttgccaattgcatagacagcttctagtgcaaactcagattgaaggaactgctcacctgaatctccaggggatgaccatggattcccattcgacggtctatcatgcaggacccatcagtaactaacaaagtaggaaacatatcgaaaccatcagcgagacacagctttaagatcatcttgattccagtctgcacatcaactctttcctgcacggaaagatcaccagtgcattttccatatgctctcaacaaaataatccaccacaagcctgaaaatccaaaacaaatgaaaagtgagttagttattttataccagagtccttttcacatagggatctgaaacttctcttaccagaatcaaccggggcaacacgtccaatagctgcttcaccaaaatcaggatctaacacttcttcggtcattgaatcatcgccatcgagaggaacagttttcaccttgaaactacaaggcatcaaaccttgacctggactatggcaatccatggttttctcccaactctggtcaggaataagcatcatatcagctcataacaaaaccaaataactgctacgtatcaatctacactgaactcggtgcaacaaaaagaggttactactacaatcatatttccttaaccacaaaaacatttgacaacatcatactattgcttccatctgcacttatcaaagaaagactctattacctgtaactggagagtgtaaaggatgaaattgcgaacaatatcatactctcctttaagaagaaaggcgatccccgaaggtatgaaatcacgaataaagacctgatcataattcaaaacactagtagagttcggatcattagcagcaatagttccaataggacttccacaatagaaaacaacagactgcctcaacagatcccaagcttcatcctcaatagactttgttccaactgattgtgcattaccattagatgaaacacttccattaacaggtaaaggcatttcatctaagtcacttttcaattcactgctcaaaccgtcagatggaagtaacgttgatctaatactctcctcaacatcatgtttttggcatttgcatatcgtggaaacaaactttttacctttcaaaacagagtttgaactatgaaatgaatgttttggtacgcttgagacctcatgcgagtttgtacaccggacggtctttctgtttctactaacgggtttaaacgagaggtttggtgttgagttaacaaagaaggaagctagatagcaagattgagatacagatcctaatggaacacgtagaactgtttctgaagctgccattttgaatactaccctatatacccaaagaagaaatgatcaaactttaaaatgatacctgcaaaaattggataagaagacataagaaaggaacaaactttacacaagagaacctaaacatgtgggaatgaatgaatcagacatcgcaaatcatagaaaaatgtcatcttttttccaaatttcgctctaattacagagaaacactgttgatcaagtccaatttcagtgctttgtcgctatatcccatttttgtttagcttcaggaattttcgaagattgcaaatatgaacaaataaatgggattaaagaatcttcacgaagagataaaagtaacgatggagacttactttgatgatccagattcagcttttccgagagagagagatttcgaatcagagtcgtcgagcaccaaaacaaaaatccggtaaagtgacgactggtccaaaaacccttgctttcgaaacacgagcttttaactttcttccatcatccacgagtttacgcgtgtgaaacgacgacgtgtctaatctctaaacactttctttttttttagtttgttcttttaacaggattttgaaaatggacaagcctgatcctaaattcctaatggcgttatgtgtttggtgtggattgattttggatggttccttgactcaaacagagataagatatgacactaaatatggctatatccagttttattttcttagcagtgtatcaaatgagtaaactggagaatcgctatctaactcatggtcgctttcggattctgtcaaaagggaaaatgtaaatgccctgatttcaggatttgtatagagccatgaacagaggaagtagacaaggccaaatgaagatcaactaatgggccttaaacagaggagatagcccacatgtttgttaacacatgaagatgaaacaattatcttggtttaacaaaaactttataaatcttatgtttacaatatcagtgaacaactgtgaagattttatttttttgtttgaatatgtggaagttcaaatccaaagattctacattttttttagaggcgggacccatacctaattaaatttatctatttttggagaaaatatccctcccacctcgaatcagcacatctacctaggagatttaccattgggccaacagctcgttggtaacaactatgaagattagtgatgctgattgaggtaaaagaagttaaagatttcatttgatgtctgatacaaatttcaaagtcttcgaaaccctctaggagttcgcgtttttggttgccgtgagttttctttttctatttttgtagtttcctagcaagtgagtggtgaaagaaaggaagctgcatgggtcaattctgccttcactcaaatcttgataagtcaaagatttaaacatctttaagaaatcaaatctttaagatttaaatcagctaaaacactcatgtctccttctctcaacactgaagatttaaacatctttaagaaatcaaatattttctgtacaatttgtgcttgtttgtacaccctcccccacgaaaatgtctataagatgtcttagttgtttcaaattcatgtttttcaagaagaagcagagcaagaaaggaaacaaacccctgaaagcagagagattgctagagccggttaaaaaaagagaagatggaaaagacaagaagaggcctcctatgcaagaaagcaagtcctattcatattggagctcatcacatgtaggcagcaacgatgttgaaccgaatgtcaacgagttgtatggaccagatgtcatttcttcatcagtgaataatgatttcaacaaagtgaagacctttgatatacgaggagtcacagaagtcgcggccaagtgaagatttagagaagaggttcagagatgcgttgttcataatattatctgtattatgtatcttatcacatttttttttaatgcaagcatatatttctcaaggttaaaaatatcaaaagtggtaagaaaatagcaaaggattgactcaagaatcatgatcatcactgtcttcttttatttaaacttgctttttattcggtcgattacaaatgattggggtgatgatgtatttatagcctccaaagatagcttacaaaggttctagatattctaccatcatttttataagtctactaagaaatttcttacaaacctctaaacctttatgatgtttctagaggaccgggaaatatattgcatgcacccgtaaactacctttcaattttctacataagtcacttcaacacaacatttgatggccaaaatgtaaactgtgattagcttactccttaaagagtgaacaaaagttgcagaagtgactctatttgaaccttactctttatctgataatagagagacattaccaaagtataaaagagtttagtaatcctaacgtgtctttgctaggagttacaaaaaaaggagtcacctttgatggcttggataattaaagacttttagtagtcctttttggactaatgaaagactaaagaaacgacttttgacccaaaaaaaaaaaaaaaaaaagacttaagaaacgactcttggactacggcctaaaaatttagtacttttagtctccaccaactctttcttattatataaataattttgcctacacaattttagacaaaacttcctaaaggtataacataattgcctagaagatgacataatttttacacattttttgttgaatctgcataatgcgacacagtttaagaagaccgttaaagataacataacttcctaaacttatgcagtctacaagatgacataatttgcacattttgaaagcaaaaattggatttatggcattttagacaaaacttcctaaaggtaaaagttttacaaagtgagttgcgtggacttagtatacttttttagtttttttttttgccctctctttttggtaatttcctgcaagtgagtggtggaagaaaggaagctgcgtggagtcccaaaaattaaaattgcagaaaaacaggtcttataataatcagcttaatagctcaggtctctttttctcattctgaagattaaacatcttcaaggaacctaatctttgtctctggttttaccttcgacaaacaagcacacatattgtttgttaaaaaatcatctatcccccaagaaaaatgtctacaggatgtctaagttgtttcaaagtcatgtgtttcaagaagaagcagagcaagaaagaagctaaacccgtaaaaacagagatattgccagagccagttggagaaaaagaagatgtagaaagaaaagaaggtatacaagccaaacctctgagaacagagggattgccagagccggtagaaaagaaaaagaaagatgtaaaatacagcgcgtgcaagaagatgcccgagaaatgcatgttcaaacccaaaccagaatggatctcgcatgtaggcagcaacgatgttggaccaaaagtcggcgatttttatggagatcactacgcagaaacagatgactcttcttcgtcaatgactaatgaattcaacaaagtgaagacctttgatatacgaggagtcaaactagccacatcctaggaataagagaagaggttcagagatgcattgttcatcacatgtaatcttagagtggatatttatgcatgaaattgtacggctatcttaataatgttatcttgtcttgagccactgatttctgcttttatgtatctggttacatgtttatcaatgcaagcatattcttcttcttctttttgacgtcaaagctccatatattacttaacgaatgagaactatcctctaaagagagctaatttagaaccgtcgaacttacatggtaaaaacagaacccacttgcacgttttgcaagatggtcagcggaaatcttaccactaggaaagatgtatctattacgtactaaatgacgaaaaagaaaatcaacatatcgttttgaaggttaaaaaatcaaaatctaacgtgttaaagaaaaataacaaaacaaaatatagattcaagaatcaaaacacttaacttaactttaaagaatcattacaatgagtttatgtttacaaagcatctttcacttttcttttggaggacggaaataactataagctgcaaagaagacttgcaaagccgcaaacagaagaagcaacaacgctgcaaatgatgatgcaaatgtccatggactatcgaaatgcgtatgaataaactctgcacaatgaacatggaatccttgagaagtatactcgttaactccttcaaacacctttgctaggtaactcttctctaagtcgagggcaatgtctttaccaatgcgtttatagaaccgggacacttcatcctctgttccaaaatagttctctaggatcctcctttcgctaaggaacgatgcatcactctcttcgtttataagacaagccatgaaagctacgtagctcgttatgtggttcgatgaatcagcatataattgctcaaatgcgacacagtttaaaaagatcgaggcggtaaaatcatccatgactaccggaggaatgtgaagcacaccattactataactaatgtctaagattgagtctgtgtttttcctcggtttgaatttgattccccgaagatgaagcttcttggcagagagaacaaatccgagatattcatgatcattgaatgacgatttactgctatgatctttgattcttctttgagacggaacaggaacaaaagtcttacgtatcaaatcaagaagatgttttgcttcaagaccataatgtttttcccaaaaggtctctggtttttgtaatgagtagttaaagaattcaaaggcgatttcgtttaaaccactacaagtaactaacttcgatgtttcaaatagagtttgaagaagaacataaggaacctggttttccaaaaggagaagatctgctcgaatcgacggcaaaatccacggcattcgaaaaatcggatcatcaagattagtgtattcaactttcccggaaacaacaaagaacaacgtgaggataaagcaaccatcaagaaccatcatctgaaccaagttttcagaatctaaacctagatcctcggagtaagaacctcgtataactccttccaaactcgatacagctttgaccaattcttgaggaacaaatcctttttcttccattttagccacgaaaaacttcaagaatcggcgtttatgctgctgagtcattttgagatgctctttgccgtgatggtaaggaccaatggagacaatcttcggttcataagctttgaggttgattcgagcgaggctctgtgggattctcacgatgcaacataactctgaaccagctgattctctaagaagcttcaaaccattatcttctgagattaaactctttatgtctacaacaatctgtggatccattaattcaaaccttcaataccacctcagattgtcttctggttaagtggaaaacttgaaatacctttttttttttattccctagaattttgtggaaatttaagaaggaggagtgaaatttcgccctagcaaaatgttgacaagtctccacgttaggtcggcagaggaacaaaagtattatttttggaaaactgacttttcttcttaacttgcatgacatgacaatttttatagtctccacgtgttttacacttaccaaattctgacaactctccatttactttaagtcaacttcaaaagtcacagaactcgcttacagtatacttagccaaaaactagtctatattcctcatttatataaacatcaagaaccaaaattttgtctccgtatacctttgattacaatcgacaagcaataataggttatcaaaatcaagaaaatgtgtagaggatgtccaagttgtctcaacatcatgtgtttgagaaagaagcagcagaagaataagaagaaggagcagagtaagaaacaacacacacctgtgaaaacagaggatatggttgagccactaggaataaaagatgatgaagaagaaagcctggacaagaagatgaacatcacgggaacaatgggatatgtccggcctgaatatatgtctactaatgacagtttttatcgaaaacttggggaaggtgattcttcttcatccttgaaaaatgatttcaacaaagtgaagacctttgatttacgaggagtgaaaaaaacagaggagaagtaaggaaaaagttgggacttgatgagctttatagattactttctttctcaatattgtaaacttgtattgagccactggcctctacttttacctacttgattacatgtatgctatgtcagacttagttcaaagatgttttcaaaatcaagaataaaatcaaagtgtttagcagcagaggcctgagaacaagtaaaaaccacaaatatagtatttatacgtaaagaaacatcctttaaaatatgaatttgatattacttttaaaattcaaatacactagaaacactaaagaaacaactgataaagaagacactactattcaattgtttttgggaggacgaaagtaagcataagctgcaaagaaggcttggaaaatggtaaggagaagaagcaccaaagcagcacaagatgatagaaatgtccatggagtgttgaaatgtgtgtacttgaaccctgcccagtgtacgtggtatccttgtgaagtgtactcattcactccctcgaacacatttgacaagaaactcttggatatgctgaatgagatgtcttttccaatgttcttaaaaaataaagaaacttcttcacccgttccaaaatagttctctaagatccctttctcgattaagaaagtcgcatcgtcttctgtgttgatcaagcaacccatgaaaattacaaagctagtaatctcagtggagcagctcatattaaactgctcaaaggcaacacagttgatcaaaagattgctgataaagtcgtcaaacactagtagtggtatttcaaccaaaccactcttgaaacttatgtctaacggtgtctcaacattctccttccgcataaattttattccccgaagtcgtagttttcttgctgagacaattagcccaagaaaaggacgacgaggaggaggaggaggcgatgatgtttgcgctcccgttatctcctttgaacaacttatcttaccgagacaaatatttttggatgtctctgttcttgaatattccctaggaccattgaaaatattgatacaacattgcctgggggtggttgatggaggcggggcgggtatgaaagtcttacgaataagatcaagaagatgttttgctcgaagattgttgtgtttctcccagaacccttctggtttttttatggagtagtcgaagaatttgaaggccaacatgttcaagctagtggatggagctaactttgatgtctctaaaagaactttaagtagaaagagaggaacctggttttcgagaagaagaaggtcgcttcgaagtgttggcaatatccatcgtagcttgaaaattgggtctttgagatttgtgtattcaatcttttgtgaaaccactaggaacaacataagaatgaaacaaccatcaagaagcatcactttgatcagcttttgttgactaaattcaagattctcagagtaggagtctcttatcttctgttccaatcccgagactagatcgactaagtgaattaaatacacaccattttccttagtctttgacacgaacatctccaaataacgtttcttgtgctcctctatcatcttgagatgttgtttatcactcgaatggtgataaggacctattgaaacgatcttaggtgcataagctttgtcgttgacttgcttgagagtgtgagggattctgtagatgcaacaaaatctatcacctgctgattccttgagatggactggtgggatcactttatctaagagcaaataagcttcttcttcgttttcgtctgggatcgtggcactctctccgtttgcttggctgggaggatccatggctctcttcttattagtcttttttttcttttgtcaaatggttttgttgaacatctaaacacaataatttaatgattaatataagtgtgatcaattttctcttcttgctatattattttaaattttatattacgtttctccacttaattactagtgaaacctttctcagatccagccgttcacacttttttttttttttttttttttattattgtgtaaaagtctcaactaactgattgaagaaaacataaaatatataagtcgattgggactttgttcaaagacttcgagccggctatgtaacaatgcaatctatggtcatcctgatcagctagttaatccatgatctatcgcggacttcctcatcccaattttggtgccaaagtacacctcgatcgtgtctatggccagccaatgttaatccttgaataatgacaaaagacatagtaatatggtattatcatagaatcttataaaaatcatcgtttctcctctcaatgtaagacttcactggttccatcactatcatcgagaagggagaaatcacgctaatctagtaaaaaaaaatcacgtgtactatatccaacgtgacacgttgtaactatactcgtccgtgttattattttatggcatgaagtgccttagttttgtcggaaagcaccagctcatagcatacgttgtttaatcctttttactaattatatttagatatagttacctagaattagttacacatgagaaacatgagatagtaagctagaattaagtaattaactgtgtaactaattctaatcaaaatatacctaatactctttaatagaaagacagctgtatttacgtgctacgttaggtccttttttattagtttagtgtttgtgttcccatctgtgttgacgctttacttgctttgttatttcgtataaaaggaagtgacttttcttctttagcttgatccatctcactctaagaaattgaagaagatgatgttgttttctgtcttaggatgcttcatcctcggagcaattcttcttgttattcttttttttcttatttacgtactccgtaagttatattatgaggccataaaatgtgaaccttttccctaagcgatttcatataataaagctttagtaaatcatattgacataacgtcaccgtaacataaattttttttgtgtggccgacacgcagttaataaggaagatagagcggaagaggaacaccttataagcccgggtgtatcagatgaatctgaatacccttatcccgaatcagtgcccgttgattgtaaatactacgcaggtgacgactttgtgttgggaggacaaaaggatagcgagtcagattagaattcatatgaactgatattttgttcaatttttataccaagatttatgttgtcaactctctttttcagcatttttctttcctctgtagcaaatttaaaatgaatgatcttgatttcatgcatatgattgaaatcaagcaattaggtttcttcactgtttttacacacagtttcggcaaggtgctcgtgttaaaaaaaaatattatagatatgttatttgttatccttttgttctcaagagttcatcatggaactgtaataacccttaactgagtttcaattactcaactagtaaagactcgcactcaagatcgccggtttgagtgggagggcaccatataaaatgttctggttcatagcctgatgaaatgtacggactatgtctagaacctcttagtaattcaaaaaataatataaacttacccctcccaaacaagaatctaagtaaggacctcagtaatagttggaaagagtaggtaattaacgctctcatatagtacaaatatgctttgattaggaatttcattataaaaaaaagaatggaatgcctaggtggtgtgaggcgaactggcaaagaacgagccttgttggtttgctgatacgcttatatcttcttctagatgggccaaatcctaaatattgggaaatgtgccaaacattgtgtatttttcattggaaaaaagctgaaaaaacagtcatccaatttttacttgacggtttaatatttttttattaaatttgaaaaaaatacttcaattaattttggttgtctattaaaatcttcatttttttataaagttggtaaaattgtatttttaagttgacaaccgttaactttgctaacgtaatgctacctgcagttaaaactttagttaataacttttaaatttccatcaactaaaaaacaaaaatcacacggcctaaaaaccccaagtcggccacaaggctcaacagtcagaaaagattctgaagatgtagcaagatctatcacctgctgatttcatcagacggattggtgagatcactttatctaagagcaaagaagctaattcgtcttcttcttcttcctctgagatcattgttcttcctctattcatttggctcagaggatcgatggctctcctattgatactctatttcttattttcctttgtaattttttttttttttgatcaaatggttttgttgcacatctaaacaaaatacataacgattaacgtaagaccacaatagaccgtattaacgtaagaaaaaaaatcgttaatgtttgggtttgcgatttacaaaaaaaaacaaaaatgaacatagtaatagattttatcccgcggtataccgcggtgacaatttaactttttaaagttagtataatttttttttttgcaaattgaatctatatataatatatttttattttatagtttacaattgttattaagtaacgtcctgccaaacccatcccgccaaacccgtcccgtaaaaaaactatttatttatattaatgttgatcttatttatgatatgtttataaatcattgtgtaaatatttttgtcgatgcgggacgttgaacccacacattttttgctaattggttaatatatgttcatttttaaaattttgaatcataaaatatgacgaaaaaaattaagatttttttaaactctatatattatataatgatattaaaaaattgtaatatatcaaactttttctaagtttaaatattaataatgttttataaattttaaatatataaataataatatttaaaaaaataatatttttgcttataaggtaatgacataataactctaaaagcaagaatttagaagatttaaatctttaattaaatattttcattaataaataattaatgtcagtgacatgacattgtaaataagttcaaatacaaaatttatttatttaaacaaaaaacgtttagtaagaataatatttatttaacaaaaaactttgttttaaaatattgttaacaaatatgtttatgctaattttaagggaatgatttgaagtttggtgggattaaatttgattgataatgtgattgacaatttaaatcaaaatttaaagtaaaattaattattttggaaaaaagatttattgatgatagcattaaattgtaaataagtccaagtccaggatttatttgctaaaatggctgcaaaaatgtatatatagattctgaaaaactgaatatgttttatgttactccatgtacatttagtaaatgtaaaaacaaaattcacatttaaatacaaacacagataaatattttatcgtttaacatatgttttaattactccatgttattcgactaataccaacttgatcataaaatatgtattgactattgtatatataacaaaacttatggatcaaatatgtaactggtctttaattaacatctaccttctctccaccttctttattcataatatatatactaatatgcttttgtcataaaagttgataaggtccatgttgtgaataataaattaaataagaccggtgattaatttgaaggtttgatcgattaatattgacccggcttcataaaactcattacaattgactttaatccatttctctataaaaagcagttcatgggttgtagcctgatcttcaatagaacaaacaaaaaagtgatacaagatgattggcttggtgctaggaacaatttttttcggatcaatccctatattcattttcaaacgacatacaaacggtcatgagccaataccgaaacataagcgaggttagtaccacgactttcttataatatcgtactagacaagatatttgtgtgtctatatcgaggtttatggattcgtagacaagttattgcaatcctttttaatgttatttgggtataatatacgaaatacatattttacgttttctttgtaatgttccgaataatgacacacacacacgaaaaatgattacatgtgttaataaaagttgatatggtttttatggtactaggcggcggaagcaccatcatcgcagtatgtctaatcctgcttttgttcctaacgcaagcacttggaggtatctacctaaatgtcttttttatttaataacaattaaagtcactttatgtttcagaagaaactgaaacaacataaaagaaaacaataacaagtttcattttaatctgttggattagatctataatactaaagtttatttggctagaaaattcttgaagaaattgtatataattttaacatacatgtatttgaattgtagacaaaactaaattcagatattgtcagttacttttgtgttataatttatattcttatttaattatgagattacctccgtcatgttttcatagcttggatcataatcttgtaatggtttttctatataagcaaatgtatgcaatgctgctgatggaacctgtaaagccggagcaaagtcagagacatatgcaggagacgagtttgacccctttcacgaagctgatcattatgacgacggtgatgaatgatgatcgacgggggatatgcattcccctgaatcttctcatatttaaaatccaataatgaaatgaaaaatgtgtgtttttcaatagtttatttccgggaaagtggacattttctcttttcctattccttttctccccattttatacgagttgtgttatattcttaatactttttctgatgaaaacgaccagcatacatcaccacactctacaaggaatttgtcaaatatgcaacgggtttattatcgagcatgaggaaaaaatcgtggccaaacgtttgtcattcattagtcactattaaaaacttagcgatccgatgattataccatctccgatgattaagatccaattggatcttagcatatttttaaaataaatttttgctttttgtaagttaagaatgaaaagaatatctttgcaaaaatatcatccaatggttaaaaatccatttgctcttgagaaaaagaaaattcaaatttttgcaaaacaatgttttttgttaaaaaaacaaaaagaagatgtacaagtggccatatgttttagatatactattagagatattcctagtggccatatgtactcgtgtggccacatatttgcgacaggtgaaatctgtgaccatgtttggttgatctcttgtagcaatgtctatgtttcttatcaatgtgttgttgaccagtggtaaattttctaggtggaggtgttgggttcgagacacgttagtaatgatctcttctttaatctgatgtggattttgcctcagagagatgtagagcttttgggtctgaaattctagatattaaaaaaaaaacatttttttttactttctaaatctcttgtttcatttatgcttaaatttaaaaacaaaatccaagaacatcaatttgaatccggtttagacaagtttgattctcgtttttttttcgtgtgtggttaattagctcttaatttcaaaatccattgtacttgcggtaagtacgtattttcaacttttaaaacctgagcagtcatcagtaaacatataacttccgaaaatgtgatgtgaaacttttttttttttttgaaaaggaaataaaatttagataaatacaaaaaaaaatgtaatcaaacaacaaatgctcatagtttgtataaaaaaatagcgatgagaataatttaaagataggatgaaagcttcaggcgtgttcaggttgaagaagaaccaaagacgaaagatgcaacattagtgagatccagagccaaaggtgtaatcattttggagggcgaaaatacgcgtagcctgcgaagaatgcttggaaaatggtaagcagaataagtaccaaagcagcaaaagatgatagaaatgtccacggacttttgaaatatgtgtacttgactcctgcccagtgtacatggtatccttgtgaagtgtacttgttgactccctcgaacacatttgccaagtaacttttcgatattgtgaacgaaatgtctttacctgtattcttgaagaacacagataattgttctcccgttccaaaatagttctctatgatacctttctcgcttaagaacgttgcatcatctgccgtgtttatgaggcagcccatgaaagtaacatagctcgtcatttcggtcgtgccttgcacgttaaattgctcaaaggcgacgcagttgattaaaagcgagctgaaaaagtcatcaaatagtagtggcggtattttaagtacaccgttcttgagagttatgtcaagaggtgtctcaaatttcttcttttgttggaattttattcctcggagtcgaagttttctagctgagacaaccaacttgaggaaacggcgaggaggcggtgttagtggttttggatgtggttgtgttagtgttggtggtggtggtggtagtggtggtgtttttgtttctattggtggtggtgttgatgtctccctttgaactttatttttccaaggacttaacatattgaagcatctggaaccgcaaaacatattggtccacctttctccttcggcttttttaggttgacttggtacgaaagtcttacggatgagatcaagaagatggcttgcatcaagattcattctttcatcccaaaatttttgtggcctttttatcgaatagccaaaaaagttgaagatcatctcatttaagctagttttagtagctaactttgttgtgttaaaaagatctcgaagaaggaaaagcggaacctgattttcaaggaggaggagatcacttcgtagagttggtaaaatccacctcaacatgaagatgggatcctcaaatgctttatgcggaaccttacgtgaaaccaagaggaacaacataaggatgaagcaaccatcaagaaccatgagatcgatcagctctacttgattaagttgtagttcctcggagtaggaatctcgtatgagatgttcctttttccagaccacgttttgcaagtcttctatgcccacgccctttttcgtagtcttggacaagaagatatcaagatatcgttgtttgtgctgctggatcatcttaaaacgtgctttatccgctttatcggctttatcgactttatcagctttaccgtgatcatggtgataaggaccgatcgagacaatcttcggtttgtacgctgtatcattggattgaacgagagtgtgagggattctaaagatgcaacaagattggtgagctgctgaatttctcagaagtattttggaatcttcatctacccttcggatttgtacgatgcaatcatcttcccctgaaattgttgtgcttcctccagtgtgttgcttgggaagatacatggctctcatctagtacttgtatttttcttgatcttttttctcttgacaagaaaatatcaaacggtttagtgaacattaaaacgaaaacaaaatgattattgtaagaccatcaaatgaattaaagaccgaaataatgaattaacaaggtctaacatttattatcatcaaaaagtcaccttatgatctaaaaattatgtcaagaaaattagataattatatcaatttgacccaaaataacaataattatgcacctcttatatattggctcagttatatattcgaaaatctacccttcacctatatatgaaaaatttaagaaaacgaattttcagagtcatgtctcttcccatgcaatccattgtataagctgaattgaggataacaaagctgcagatttcattatgtaagttttcattataaatgtaatgttactaatcataatctatatttcatacatatgcatagtaaaataatggtctatgataaggaataagaatccgacaaacaagaattacgacatgcgctccatctctgaatcagctaatcaaagattagatagaaagaaaagcagtcgttgacttttactttcatgtggcattataaaaaacggatggttgttattatatactttcaacttgatctagctagttgcctagtttgttcgtccagaccactactagtattttgtaaataataccaattttacttttcttatagtaagctgtgaaagacatgtggtaatagaaattatatagagcaaataattacgagtgtattaacgtaattttatattataaaatgctagtattatattaagggtgtcttaaaaataacaataaacccaacaaaagtgttttaaagaatacatttttgacatactgtctcaccttatcctagaaaattacttttcaatattgatatttctttttaaaaattatgttaagacacttataaaaataatgcaatggaaatgttcttaggttacataaagaatattgacgtcatcaataggtggtctcatgctcgtagaatatcatttgtaaataatgtcgttttatataatccaaaaacagacttgaaacataatgtaatttcagttttgtcatcattagcttagcttattcacctaaagagttaaacttatattgtttatcagtaaaaatatctataagctatagaggcttcaggcttgcttaaacagtccttgtaattactttcataaatagaatctacgtataaaaatattatgattttatacacgtttaatgcatgtgtgaaaaggttaaaaatatacaaaatagacttccacaaatagttccactcatcaaaattaaacatgaccttcgaggcagaacatcacgagttgacgtaatggtgtatgtaatctattcatttatgtaagattctatgtttttaagcaaatcgtttcttttttggtatcaagcaaatcgtttcataattagcatataatgttttctagtttctttatcctttcaatgtgtcaagcttcattttctattaatcattttgaatagaccgaacgcaagaagatgtgtgtgcttcggccaatagcaagaaaaatcaaacccttgtaaatattacattttctcaaacaaatccggttttacatattctacttctgctccaaatatgaaaaatacttcggttcaaatccggttcaccctcaggaatttaaactttgttattcaccctattttattttgctaatcataatataccacttaattaaaaatattaaattataaaaattaatttgccaccaaaaacagttatatattagtttgagtttataagaaaatagttaagattaaaatttaataattaaacaagataaaatataggtttgagtttataaacgagtttagatttttttcaactagatgaggttaattgttggtatgagtttataaaaaggtttacattttacatttttaaacgaggttaaatatatcaatttgggtttagaaaaaatggttaggattatagacgttaaaactaaacgaggttaaatgttggtatgagtttgtaaaggagaattatggtttagtttgtaaataaacgaggtcaaattaaatgttgggtttggtttataaacatatttagattttacaattaaacgaggttaaatgtgagtttgggattagaaagaatggttagaatttatattttacaattaaacaaggttaaaatgtcggttttgagcttttaaagatgaatgagagtttagattttataattaaacgagattatagatcgatttaggtttacacaaaaagtggttgaaatttatattttataatcaaatgaatttttaatttatttattagatgatagagttttattggccggaaataaactcttaggggtgaatataaatattgttctcggattatctaatcaataacataaatacttaaatagtcacaattctcaaatatatacaatctcataaaaaggaaaacattattaaatagttttagctgaaaaatctagtgcaatcaaaagtaaaactgatcataacgatcccacgagtctgggttgtcaaataacaaatcagaattaaagtcagcactttcactgccagatgacgatgaaggaggataagagcctgatggtgatgatagatattcttctataacatcttgacaatcttggtcattactggttatctcacggtactgatctatagcttgctctttgatgatatcttcttcatgcttaaccgataaggagaaaccgttcgagcggctttccttctcctgatcctgatcttttccgaatcggatcatttgggtacttttaaagtcatctaggggatcttgtccggcaataaaaatggcatctagattatgttcggttttgcaagtgtggtggccaaagtaagtggttcggtaaaccggaggattgtctttgatcttttgttcatgctttcttgcttcgcagttatgatctttgttgtaagaacatctatagtaactcctgttaccatcatcatacaccaattagtatgagtgatcgggatagaaataattatgatgaaatatgattagctatactatttcttacctttggtgattagatttttttatactcttttgaccatatttcctccaaagatacccgtcgtagtaaatcggatccggtgaatcgtccctccaattctcacttgaatttgtactatcaatctttctgcaaacatgagtattatcaaaatattagcattaaaatcaacatatactcctaagaaaaaaaatacttatattaagaattgtggtttcatttggaaaaacaaaaacaaactcaaaaaagaaaacaaactcataagtgtataccttttcttggaggggctcccctgtggaggaggagaagaatccctagaagataaatcagaaaactgatcatcttcggtttctggtttagcagataagattgaaatggcattggaaaaactttcaacgatcgatttagcaagatcataacttgaaagcggtccaccatcagccattggatggttgagccgcctcttcaaccgcatggcgcagctatggccataacggatagcttgcaccgccttttcgtgtggggagttcatttccatagagtatagtgaacttgtgtgtgtgtgtatgtgtttcttgtttgttttctttttctcaagtctcttctctgtgctataaacttttgaacggatagggagatcagaatttataggactagtcgtacatacacgttcccaaatgactttgccaatttgggtttaccaaatataatttacatacactaggttatattttaagaagccaatgataaattataatttcgatataggacatgtgctctgctagacttatatgcgtgaatctaaataaagagagacaaaaagatagattaggtgttgacattagcatatgatctgtcatgatgtataggaaacagagtttattttatatacctttcccagtacgcggctcacttaattatatacaatctgtttttaattgtttcagaatttatctgtttctcttattacactaatctacgcggttcgcttaataattaaagattaaaaattaaaaactactcctttcagaacactaaaaggtttcaagataggaggaatctaatagaaaactgtgttctacaaagtcagatatattagagagagatatgagctatgataaaccccaaattagcaatgattttaaaattttcttttgtaatctttccatttcaatatgtgtcgcaattttttttattttttttttgaaaatatatagcagatgaaatttaagaataaatttgtttgcttaattttgttgattgtatatcgttaaatattttttatttaatattttgataggtggttttaattataatttatacggtaactaataatatagagttttgaaaataatatattttacgttcatatgacaaaaaaaaacaaatgtatgtaatagattggatgttcacaaaaaaaaaaagtataacatattttacacgtccatcgcaatgtttacctcatcaaagatgaaacgtgtacaaataatgtttttttgctcaatataataagcttcgaacacatatgatatgatcaattcatttttttgtaatgaaaatactccactagtcgtggatatctttaatggtaaaattatctaattttttggtgagttttggttcagattttaaataaaaatgtaagtatttagaccagacaaaagataattattaggtaatagaataacattaacaagtaagatctagacaatttttcaacgcttaaagagagaaataattgcgatgtagctggcgagtggcgactaatgcaccaatgaaaacggcattagtttcgtcggacactcgacgtcagccccatgacgtagtttttgttgaaggggctgattcagcagattgacgtcagaacgaagcagcaatgttgattatattatatactaacaacaactagtcaactatgccgtgatgtgagattcattcgttggctactcggtccatattttaatttaatctaaaattttaagaatttataattaataagctttgcaaaagataactggtaatcttgaatcctttttctttaggtaaacttgaatcttatatgaaagaaaaattagtaattacattttaagcggataaaatgatataatatacgtacaaaagcttgttttgaatatatagtataatctgaaagctaaccaatccaagttatacaatcatattttaaaactaatagatggtcaatccaaaacaatttatccttatcagattgtatacatcgatggtattttcaggccatgaattaacaccattcatgaaactatacaacaaattacaaagtttgtaaagaatgttaagttctatctacccatcaatttaacaaccctatcttcttctgcgggtggttaatgtaaattgatagatatcaacacataagagatatatatatatatatatatatatatatatatatatataaactttcgcacgtgactttgatctgatctgtgaaacgttgcccacatgtattttgttcttgttattagcaaattgttaaatattgtataggtattagtactatattgagtaaggggtcacatatgtacaagtcaagcaaagctatgggtcaagtcacattattttatggtgcgaaaggaaagtgaatgtgaacatgacttacatgacaataatggtgatacatttttttaataattttatttattagctaattaaaccaagtagttggaacgtagcttccatgtcttctttaatctgacgacgacttcaacaaaattccccattttcaataatcctacagaactttaaaacttatctttatattaacttcttcaggacttttcaattcaagatatttatctttggattcgtgcttccagctttagtcaaatatatacttttgacgtcctgatttttccaaataaggaaaaaaaagatccatcgtgcttgctcgtgatcttacatttttcctacttaactaatagatgacctccccaacttaaatttcttaaccacatttatctatacaaaaggacaggctacatcctagaaagaaaataattagcaacaacattgagacaatatatcgctttttggttatataattaaggattttattagaccaggatgacaggaaattgtttcgccctttcaataaggccatttgaaatgcttgaactttgttataatcggagtcggttattgatagtcaatttttgcaaatgaagactcaggttgagtgaactcaaaactaactaaggatagttagtggactacggtttccttgaaccacctttcaacagacttgtagaaaaaaaaacacatgatccagctaccttctttttcattgtgggtttgtaaaatgcaaagtagcaaaacatttttctaatgaaaaaacaaatgggctggaaagtatagttgtcacaactcaaaattaagtaagcccaacaaaataaagacctattagtcattgttcttttaatgacttctaaaggttatcgttgtttttatatataacaaaaatatacctcgtatcatgacagtacagtaggtcggaacggccacccgatcaactcttgaagacgaagacataggcatcgaaacactctgatctcatccagaagacctatctcacaacttggctctatagtttgcaacgcacataccagtttttattaccctcttgatagtttatcctctaatcaacaaaaaagtcatggcaaatatgttaatactttgacaaaaaataaacaataagttaccacacatggttaacacattgaaaataagttttatacatacagataaaaatggtggaaaactatgaaatttaccacataatcaatttcttttaaccacattccatttgaaatctcgaaaaaatagtaccaataatgttaggcatcgggtcgatataatgtcattttcagtgggaattatttaagagcatggccacatgcatgctgctttaatcatatctttaaaagggaaataatgaagaaaataaaattgatgggtccaagtttcatatgactggagaagaatgaaggagtgcaagaaggatcatagaaaataaatagtatggctgaatcaaacttttttgtaaaaggggttcacaaaagatgttgagctgacacatatccatgcaccatgtttttctttccattggattttttatgtctctcagatcttgttcacataaaagaaaagatttttatacctttgattaattagggttgagtgattagcatattcaaatctaactctttttttttataagaatgtaaatcttcattttacaatgaaaagttgttacacaattaagcatcacatgccaaaaaaggattaaaaaaatatggaagcacaccaccttcttgcaccaaatcatcaaggcaaccattgctaatggtagaagacatcatgatgcaagacaaaaatgtttccctaaaatgaatctaacttgaaatgaaagaaattaactaccaggtcaactgaatccactttggtatgatttcagtttggttctgtcaaatcagggaaaattgatttgaattgtaaaaaccttaaaataggattagttactcctgtagtttcctttggatcaatatattctattgaatttattcacgtttttggtcgaggaaaatgttaattaatccaaaattttccatcattttgattttgatataagtataactacctcattttattataggccagttaattttataagacgaaatccgcccacccgttaaagattgatataatcatatcgatttgatcgagtacatgcatgaatatggagaaaattacaacaaaccaaacaaatgtgaggttattttcagttcttgtgggtacacattgtagggcaactcaaatgggacttgagagtacctgaatgaatcatttctcttcttcacatacatactataagaaaataaataataccatcaccgtgagcaatatttatgtcgccataatctttaatatgtttccaaataaattaaagataacaatacatggtgatagacaacgatggaagtatgaaaccaacctatcacgtgctaatttttttgtcaccatcgataagagagattaacagtactaattttctaatggtaagagcttacctcaagattattcggtagggaaaatcagctatacaacgtttttaaaaatcaaagagaactcggaaaaagaaaaaaaatttgtatatcaatcacatcgaatgtgagactaaaccacgttgatatttttttccttacttataacaaaaaataaatggttttgaacgataactacgtactgttgtggtacgaggtataccgttttgataattaacaattacaattatcattctagaggtacgaggttttttaccgttttatactatttcgtaacaatttatcattacagtttacaactttgttgtgttaccaattggacacaatatttcacttatcttttaaaaacgcaataatgtttcgaaaaacatcacttctgttttgggatacgatttaataggtaaggctagaacagcattactagtgtttagtaaatgaacaaaatatatgtttgatataaatgtgttgagctcttcagatatttcaatcctataaatatatagagtgtgaatagttgcaccagttcaggcggacaaatccgtgtgtggattatacagtttttgttttaacattcataaattatagtccgtagaaatacggacaaaaaaaataaaataaaaaaccgtcgcggaccaaccacgaaccgcttttaactttaagtagagttagtccgtaatggtcttttgtccggtctaaaaatatagtaaactaaaccgctgaaaatttatccacccctaccaccgtcaccattcaaactagaagcagacacaacccagaaacaatactaatttgtatggtcaatgtggtcacaaaaagacggtcaaaatttcaaatagtagattaaaaaatggctggtgaagttatatccattgcagttttatcaataaaaacaactaaaacaaagttcttagaattgtttgttttttagattagtcaagaattttttccccaaaccatagtcgatttgtgtggtacgccctatctagctagtgcagctaagcatctcagctacacaagttatcttttttcggtgaatgagaatacagacatgcaaacccacttaacgtcaaaaaaactattcgtaacctaaaaattcggacaataaattcgaaatacaaattataacctgacaaaacatgcaagttgtgatagactagttgaaaaacaaatgaaaaccaaacaaaaaaaatgtttaaattcagagacaaatagtcatataggtaatgtcagattgtcagagcagacagaagattgtacattgaaatcaagcacagcaaaaagcattattgttcacacacatgtgtacagacatacacacgtgtacattcacacgtacatgttcacacgcgtgcacacatacataggaatctccacctctatataagaaatgcttcaacataagtatacatgtaagtgagtgaggctaaagtaataaaattaatggcaacttcagggtttaagcatttggtggttgtgaagtttaaggaagatacaaaggttgatgagatcttgaagggcttggagaatcttgtttctcagattgatactgtcaaatcctttgaatggtttgtgatcatttgttttgttttctttttttcaataatttaagtatgttctggatcttttgattaatgaccgtacgatttggttattattaggggagaagataaagagagtcacgatatgcttagacaaggattcactcatgcattttcgatgacctttgagaacaaagatggttacgtcgccttcacaagccatcctcttcatgttgaattctcagccgctttcaccgccgtcatcgacaagatcgttctcctcgatttccccgtcgccgctgtcaaatcttccgttgttgcaacaccatgaatcttgtgatggttacatatcgtcatatgactcatatcgaacttgtttcttaatttaaacgaagtttgagttgtttggttatgtaacttggttggttaattaagtatgttttggtttgatttgtttattttcggtttgcggtaataagaatctggtttgattggaacttggaagtttatgatttctttcataagtgagcattttttaagtaatttttttataaaaaaatgttaatattatgttttcttgtgtaatctgtctctttttgctctctatacaatttatcaaaacaaataaatagaagatacaaaactttacattacaaatttttgggaaagcccatttaaaatcaacaaatattttgttatttccacaaatattttga

SEQ ID NO: 721 - DNA, 77363 bp, Arabidopsis thaliana
gatctaaactattaactaaagtattaattgaaaatggatgacaacattttgaccaaactatttaagccgttttcgcttatacataataaacttcagagtccaaatccagccaaagactcctcatactacatttgtgtttacttacttacactttcaacttaacaaaaaatagatgtaaatggaaatatcattagcattattaacaaacaaaacaaaaattacaaacgacgtcgcattcaaatcctttttcctttcttttttcattaacccttaaataacggacaattgataaatctttgaatcagagaagttgcgcccaaacaaaaagagaatttattgttcagttagtctagtttgcatcgcatgcgatttttggttcatcagatcttcccaacacacaacaaagccctaagctttcttcgatttttagagcatctccattagacaaatctttaaagtgtcttccccaaataaacaaatatgttttagtcaaaaataataatattgtaattgagagtgtctttagatcttgagattttatctcaaaatgtctctgagaagacattttaggaggagtgtctcaaattttgtaaacattctcaattataatattattctttctaacaatatatttcttttatttgaggaagacacccaacaatatatgtgtgatggagatgctcttattgattttctcggtctttgtgtgcgcaaaatcgagacttagatgaaattcggaagaattcgaggttttcactgctagtaagtttgatggaggaaagggaagcgaaaggatatgttagagattaaagattatcgggcccatgagatgggagacccataatcctgaggaagcatgtaatgtcttacatctgaaagatgtgagggaccttgactaatatataagagatatgagtcactccacctattgccaattggttttaggttggaagctcatgtaactttaaaatggtatctgagcccgatacacatgcttcagtaatctggccgcgatgggcccatacctcggacccatgagaaaggtcttgtatcatggctgggggagggtgttagagattaaggattattgggcccatgagatgggaggcccataatcttgaggaatcatgtaatgtggagaggatctgataagcaaattaacagactctttgataactcagatactcttgtatctcccgacaaagaaagctgttagtgttttgtccaagaggtggaaaagtctctggctttcgtttcccgggttagatttcgactctgaagagttcccaaattacaatgcctttgtgagttttatggacaggttcgtagatttctctagggaacggaagtcatgcttgcacaagctcaagctaagtatccagaagagttggagtgatcagtatcgtatcacgcggtggatagactttgttgctacacgtaaacttcagcatcttgtgttgagtgtctttttgtgaagcgtgagtgttttgaatatatgcccttaagcctttatatctgtgagacaattattaacctaagacttcatcgcgtatatttggatagtcttgagtctatttcacttcctcgtctcaagactgtgcatttacaactcaatgtatatgccaatgatgcgggtctggagtcattcatctcatcttatccagctcatgaagattttagcattgttagaagtgtcgatatcgatgataatgtaaatgttttacgagtgcattctcaaacattaacaagtctaagtgtagaatttgatcttggtgagtggggtctagggcttttatgttttggtcaaagatacctggggctttggattgatgaccctagattcaagtatttgaatttcaaacatgaactatcggatagtaaaaccataagcaatttgaattccttagttaaggtcaattttgttggcttttatatgtctcatggagttggcttatcaaaacaacaaatggcccgtaatgttttcaccggtatctcgagagttagggatctgatcatctctgcggatattgtaagggcatgtttctatgaacttcatatatataatatatattctataaaacgaaatcttgctcagccatagtattctcttcttttgttttatgtaagcagttcatcgattgctacttgaaagaagaatcattaccacagttttgcaacctgtcctgtttgaaagcagaagtttgttcatccaacgtgaaaatccgtgaaacattgcaaaaaccttttgaaagctgtccaaatctaaaatccatcttcttggtaatgacttgcaccaaccctagagctttaacttaattatgcatttaaagaagtatgctatctagtattttaatgtatcttattttgtaggatttaactgattatactatggtcgacacgagtcaaacaagagtctcttttgtgcatcagtgtttgttgttatatatcacttgagtttgtagagataagaggaaaattcatggcagttgcagtggaactagcaaagtactttgtagaaaaactttgtaatcctcaagaaaattttaaatgactattcatctcactttttaccatttaaaatgaatacgttagaaaattaattcaactcattcaacaacaaaaagtttaaaaaaaaaaaaacaaattataaaggaaaattgttcaactctttcatctactattttgcagaggaatgagttgaatgatgttcaactcaaaaaaattcaatcattcaactatatggcatccatttagagtcattgtttaaccttaataaattgtttgaacttaataaattactagattctgacccgtacatacgtttttttttttttttttttctagccaactaaatataatatatcataaaaagtttacaagatacagaaacattctaatacaaccattgacacaaataagggaaatcgaaacaatttcgatgaaggggtggagagcaaccaagctatttttagtcttacaggctaacagagaatatctgttatgtcccccctccatatacttgttgttggctatcatctttctgatgaaactccaaaatccacatagcattactttgactagtaagaagaatttaactgttgttggaaatgaatctgattcatatcttctacaactcgataagatatattctattcgcctataattgcaactgcctgacccgatcatgaaatctgacgatgttctctttccatattttacatagagggtgataggccaatgatgaaacttgattatccaatccacacaagatcgttgaccacaacacaagatcaagttaatgattacctccgttggaaaacgaaactgatggctatttgattccattacaccatccccaacaccccaagttttttgcttctgcagaattgaagtcatcaccataatagaagactgaatcgtctatgcctcttggacacggacattcattgccaaagtaatcggaatgacattaatcgcatggttaatttctttcatcgtgaactgaaatccaatcttccatagcaatgtttgtgaacgtatatcagattccattggttggtgaacacgtcgtcgatctgctttacaataaccattgattttaacgacattaatgatctccatggcacataaacacaatatcaagacccaagtcaactgacccgcacatacgtattttaagaaatgtattggaatacatttttagtgaaagatattgtaatatataaattataatgtgcatagaaaagtgtatagtgttatttatgatacaatcactaaactttttaataatttatattatttatatttcatttgtattttgcatagtaaatcaaatgttagatttgtttcgaactgcgaaataatttagagatatttggaaaatctgtgtatttttgttagtttgatgtatatacaaattaattatttttgtttaaaatttgatcaattagatgatataatgtgaaatttactccgcggtacaccgttggtcaatttttttgtaactaaaaatttgaattttaagttatagttgttttgtaaatattttttttttttgtttagtgtttaagatttgataattgtgttaaaattgttaattctaagatttcactcgtagattatcgttccgtatgaatatcaatctaaactcgttccaccagataatttcattccgtaaaattaaatattattatgttatttttaaatattctgattgtaatatattaaaaaatattgagggattgacctgtggtagatcttggatttatatatttaagatattgtagtatataaaaccgatttttagtgtatacctttcaataattgtataaagtatattttaaaagtcaaaatttgtataaattgatattgcaacctcatgaaatcgtagtgatttacttgtagggtatcccggactaatttttgctttttataaactgataaatttgttgattttatttaaaaataaaaaaataaattaagttatatttgttttgtttattgtttcagattgtataactatatctatggctagttttttgtaatctagtgttgacccttaaagaaaaatccataagaatacgcataaattgatagtaaaattagaaaataaacatcattagaacatgaagtaatttacttatgaatctctatctagtttttttaaagaatcaatattctagatagattgtacacaaaattagattttaatttggattcaattttagattttctgtaaaaaactaatctgaattacatattttaaatttaggatgacgaaaatattttttttttaaagctaaaatttactatgatctcaacaattttggtatttttaaaattaaacttatcctcttgcattatcgcaaatatgatagtcattattgttcgaatacaattaatgttctgtcaaaaaaatcatattactgtttgttccaaagaaaagtcattcaaatttcaaagaaaaaaaaagaatattgttgtgaatcaatattttctcattttgaatatttgcattaaaaatttaaaacattggtagttaaactttgttttactgtttaaaaaaagaaataatcgaatctagaagaatgaatattccaaaagcttgtaactattataatacgtttaaaaatatattttctattatataattcaaatttagattagtgatatattttaaaaataatgaaaatttcctgttttttaaaaatattttaaaactttatatcatttaaattctaattaaaatgttaaatattttaatctatacagaaacgaattttctagataaatacaaatctaaaatccaaaaattctcttttgaatatgctaaatcataatgtaaaattattttttatatgtactaatcagaaacaattaacatagattgaagttgtaaacaatcaattaacatagattgaagttgtaatcataatgttaagggaattgtataaaatttaaactaaattataatttgttattaaattagattgaagtttccgaattatctaataacatcttatcaaaataaataagtttacatatatacaattcaaattaaaatagcgtgatatgttacggaaacatttttaaatgattttttaaaaaattggatagttattaatttattgatttaattcgatttttctttttaaacaaaatccaagatatttatttagttgtagtagttgttaatttactaaattacaaaaattcatttagttagttttaaattacccttacaatgttgtacttcacacgatgcttcccaattaataatatagatttaaagttgggaaaaaagtattttttgggcttttggcccaagtagaaaaaaaactaaaatgaccgttaccaactagcgagggaaacaagcgagtacgaaaaaaagaaagtaacggatttgataatgcattagcgagtaaagtttgtcataaaaacgaaagactggtttgctttcacatttctactgttcttatttgtagtttataatactttaaattagataaacttttaatcatgtttgtatgatctctttgtaaattatgtttgtctttttttttttttgctataactgttaatatcatagaaaatgaaaatgtttggctattacaaagtaaagttcttagctttgaaatcttggcaaaaatgaataaaaaacaagatttcaagatttgtaaattatgtttcaaaaaagtaataaatgaaaaatgttaaaaaaaaattaacgaaacgtaaagctctttaagtgttatttgacaactgtaatcggtgcccatattgtttgcccataatatctgcatcaaaactctaatatcattatcttgttacatcgcacgcgatcggctctccggatcttccaaagtacaaaaccctagatccatccggtaatatcaccttcttcttcctcactcgtttctggattttctttacgtttattctcggttctgaattctgatgattcgtttgcgtaagatttctaggttttgtgagagaattcgatggaggcaaggaaagagaaaagaatatgcctcgaacggcctgccagagaagatctgataagcaaattacccaacgctttgatatctcacatctctcgtatcttcggacaaaggatgttgtcaggactagtgttttatccaagaggtggaaaagtgtctggcgtttggttcccgggttggatttggactcttatgagttcctagaatactatacctttgtgcgttttgcgaacaagatcctagatttttgtagggaacaaagtcattcttgaacaagctcaagctagttattcagaaggataagactggtcagtcttgtgtcacgccttggatagactatgtcgctaggggtaaccttcagcaccttgatgttgagttaggtggttgtgtatattttcgtgaatattgggaggtgatgcccgtaagcctttatatctgtgagacgctccttcacttaagactctatcgggtatcgatgggtaactttgagtctgtttctttacctcatcttaagactttgtgtttagaacgaaatatatatcctaatgaggcgagtgtggagtcgcttatctcgtcttgccccgttcttgaagatttgaccattcttaggataaatgataatgtaaaggttttacgagtgcattctcaatcactaaccagttttagtgtaggatatcatcctggtgacttaattcgtaagtacaattattattctgaaaaggttagagagaactcggggcttgtgattgatgcgcctagactcaagtatttgactttcaactacgaaagatcgaaaagtaaaatcatgagaaatttgagttccttagttaaggttaacgttcttagctcctttgatatttcaagtgtagctggctgttcagagcaacaaatggcccataattttttcaccggtatctcgagagttagggatctgatcatctctcgggatatgatgagggtatgtttcgatgaacttcatatataacttttgctatatataacttttgctaacctatatagtttctcatcagcttcttttttgcaagcagttaatcttttactacttgaaaggaaactcactgccacagttttgcaacttgtcttatttgaaaacaaacttatctgaaacatccttggcattcctggacatctttacaaagcttcttgaaagctgtccgaatctaaaatccatcgccttggtaatgacttacacctaccctagagtttcaaattaatcatgcaattagagaaatcttgttatatcctagtatactaactcatattatgtattttttttttagggtttaacttgtttccttgacgacatggttgaaatgagtgtctggtccgtgcctaaatgtttgctgtcatcgctcgaatttgtagagataaaaaacgaacacccacctgatgatggtgtactgaaagttgcaaggtactttgtagagaactctgtaaatctcaagaaacttgctctacatttgcattttttctttctagaaggaaatccagctgtcttaaacgatctccttgcattgccgagacgatctagcatgtgtcagatcgaagtttttaatgtgcaaagtggtcgttctcgtggaatcttttgatgttattgaattctattatgatgtcattgtgagcttcgccgcccacaatgttttataattcgaaactgtagcatatattcttttcttaactctttaaagattgtgtacttaagttctaatatttaattaatagttggtatatttataatggattttatatgtgcttttcttcttcttctatcgttgaagcaaatttttcaaaatttaattaattaatgtaatggatatcttcctagattactgttgtaatagctgatccattcttgtagtgaggtaaaagcattgtggtttcagtgatacatgagccattggtcgtcaatctactactaccatgactttttattaatatacaccgaaacaacttgcagctacttacaaataccgaaccctttcaacggttgaagaaaaaacataatagatttaacaaagtcttcagtttgctaataaagcttttgtcaagctatagcagaagactctttatcttcagtttacaattgatgaacaactcaggtattcaacacaattgatcgtactactaagaacagtaacttactcctttagatgaactgatccatgattggcttcacaacttctcaagaatataggttctaaccattgtaagacatgattattcatttttaattaatgatattaacaatttagcaaaacaatatgaagaactggtccaatgataaaagtccaagactccaagccgcgcaaactaccaaaacttaacttttatcatatttttttaaaaaaatctacaaacaaagattatttgttgaggttcatgatgcttgttgttttgcaaagacttttttttttttttaaatgtacatattcttttatttaatcaaaaatcattacaaaaatcaaagaattatatgtatttttcgtttagcaaaaaacaaattatatgtatttttcgaaataactaatatgtgagtttgaacaaaaaaaaatatttgaagttgaggaaacaaattattgggcttttggtccaaataaattaaaaagaaaattaagataacctttagcgaggaaaacaatcgagtacgaaaaacagaaaataacggattatcaaatccgttagtacgagtaagttttccagaagaagaaacaaaagaaatggtcataatctgctttcataattttttttttctggaccagaactttcatcgttttgttgttctttattatactcctaacttttttttatcatgtttgtatgatctctttgtaaattatgtttcaaagcaataaatgaaaaatgttataaaaataaaataaagaatagaaaaatcaagaaagataagctctcaagtgtcatttgacaagtgtaagagcacctccaatgggaagctctcttgacaaattcatagagttctcttgattaaaatgattaaaaataattcaaaacaagtgattttgcagagagtcggctttcttgagagagctttttgaattagagagagccgcacacgtggcagacagttattggttgacagaattcaacaaaaagaaggaaaaaaaaaactttcatctcttcgggacagctttcccaaactttctctatgtgcaaatcccagatttttccaattttgttgagtggatccacctcgaaaaaataccgtataagccaacactcctcccattcctctgattcttcttactctgatgcctccaggtccgttccaattttgtgcttctaatgttaaggttgatttgatggaaactggataagaatatcgttaatggaactctatagattggtttaaacagaaactagtttggtttcaattttgaattggagcagctggtttcacatttgaattgttcgttaatgttagggtttagggagatagcaatccaattctgtttttgagctgatattgttttgtaatcgaaaagtgtgagaattaggtttcagttttgccttcttgtgaaatctattggtgagcttaactagctgtattgtggactagaaagcagttgtacaatttacgagagtaacagagtttgcgggaagcctttatcgagatgtgaagcgttgaatgggagaaatctgagtattattattgtggctggagttattggagctgtcatttgattgtgtgtgttggtttagtgatattctggtgtttctttattagagatggtagtaggaagaagaatggtcatgatcctcggaaatctaaggatgatagtgattggattggtttgttgacgtggttttttattggttttgtcttcttcatttctttggctataaatattgggttttagacctgaaagatgttctggaaacttgaaagcaagatctttccaaggacataaagatcatcttctagttccttgctggttgatgggaaattgcttccaaagttggctgtttgcaggtttgttaccttccggctctgtcttggtaaattggctataactttcaaaccgttaacctaaaccgtgatccgttttttcatgtggtttcgtatgactgttgttgatattcccaccaattttttcaattttctgggttgagttgccactccgtttatgctctgaatcaagacagacgaaaactagagtgaaggtgaaggcaatgcaaaaaaaagccgatgtagagaacgattggcaagaagagctgaaacaaacagcaaagcttttgatgtcgacaaaagtacctagttaattgatctttctttattttctgaaattaagtttttagtgatttgtttttgaatctgaagactgtaaaatacaaatggtattcaacacttgccagtccattgttacatgttatggtttaatttcttgtgcaccatgttatgagcctgcactattcatccatttcttttgtaccatgttttgagcatgcactattcctccatgtaaccaaataagattaatattatgcaacttcgaagcaaaccgaacctcacaagtcgatttatcatattctactatacctacaaaactcagagattttatggatatttgaaatcaagttcgttatcgagagatgcatctacaattgaaaggtgatttgcttgagcatatatgcaaaaaaaattgcaacaatcgacagaacaattgatcgttattccgatttttgttttgcacatctattttaaaatgtttcaaaataatgtatgtttaatattttatgatttgcaaataattattaagttatatgaaataaataattttaaaataataatattttttcagagaacctacataagaaagactaccattagagtatgaaaaacaaaaaaaaatacacaaaaactctcttgtaacatttttggaaatttaatcataaaaaaatggagagagcccatagagaggctctctccattggagatgctctaagtaatctgaacgatttgtatgattaaagataagctctcaaccataatagactaatatcattggtctctcgttgcattggcgcatcgtacgcggctctccggatgtggtgatctcatattcttcttccttactcatttctagatgtttgcgttgatgtcctcggttctgatgatttgtttgcattatatttctaggttttgctagaggatccaatggaggaaaatatagagaaaagaatatgcgtcgaacagcttgcaatagaggatctgataagcaaattaccggaggttttgctatctcagatactctcgtatcttccgacaaaggatattgtcaggacaagtgttttgtccaagaggtggaaaagtgtctggcttttgattcccgggttggatttggactctagtgagttcccacattacgatacctttgtggattttatgaacgaattcctatttttctctagggaagagaatccatgcttgcacaagctcaagctaagtattcagaagaatgagaatgatccgtcttgtgtcacgctatggacagactgtgtggctaggggtaaacttcagcatcttgatgttgagtttggtggtcgcgtaatggagcgtgagttttgggaaatgatgcccctaagcctctatatctgtaagacgctccttcacttgagactctatcgggtattgttgggtaactttgatcagtctgttgattctttacctagtctcaagagcatgtgtttagaagaaaatgtatattctaatgaggcgagtctggagtcgcttatctcgtcttgccgcgttctcgaagatttgaccattgttaagatagatgataacgtaaggtttttacgagtgcattctcaatcattaaccagtctaagtgtaggatataaatcatattatcctggtgagatatattattattatgatagagatagagggaactcgggacttgtgattgatgcccctagactcaagtatttgactttcaacaatgaccaatcgaaaagtaaaaccataagcaatttaggttccttagttaaggtcactattcttggccccataaagatttcaagggtagtgggctgtacggagcaacaaatggcccataagtttctcacgggcatctcaagagttaggtatctcatcgtctctgaagatatgatggaggtatgtttttatgaacttcatattgtatatataatcctatatagaacttttgctaacccattgtcttctcttcgtttctttttttgcaagcaggtcatcagttcctacttgaaagaagattcattgccacagtttggcaacttgtcctatttgaaagcaagtgtttggttatcatcctttgacttcctggacatcctgccaaagcttcttgaaagctgtccgaatctaaaatccatcgtcttggtaatgacttgcaccaacttccaaattaatcttgtagttagagaaatgatcttgttatatatctagtttatattatattcatcttatgtatattgtaggaaacaacttgtatagttgatcgtacgaaagctacggtagaaaggagagtctcgtctgtgcctgagtgtttgttgtcatcgctggagtttgtagagataaaaaacagaatctcggtagatgatggtgcattggaagttgcaaggtactttgtagagaactctgtgaatctacagaaagttgttctgcgtttggcatcttcctttctaagacgaggaaatcaagctgtcttgaaggatatccttgaattgccgaggcgatctagcatgtgtcagatcgaagtctttaatgcgctaaacggccatgctctttgttttcgcaaaaacaaaataaccggccgtgttttcttagactattttgatgttgctgaatcctattatggtgccattgtgagttaaagtggcaaggtactttgtagagaactcggtagttctcaagaaacttgttgtgcatttgagtgactgttagaaagacttttaggtggtgctatgaccgagactagcactcctagagattggacttggattttgattttgttgaattctgttatcatgtctttgtatttatatatactttggacaaagctctcagggtcagatgatgatgttgaattccaaactatttttcatgcaaaaaattgctatacattaccgtaattttgccgggatttaggaaaagattcttcaggcaggtcttgtgatggggatggaccatcttccaagatgagcggtgttactcctttgtaggattttccacgtatggctccaataagtttctcgtctgtgcctcaatgttagttgtcatccctcgagtttgtagagataaaaagcagattcaaggggaggcctgatgaagtggcaaaaggtactttgtagagaactcggtagttctcaagaaacttgttgttcatttgagcgattacatgcagaaacgaagtttggttcacttattaagggatctccttgcattcccaaggccgtctaactgtcaaatcgtatacgttgttgactgttagaaagacttttaggtggggctatctagctacgatcagaccgatattagcattcctagagattgaacttgcattttgattttgtggaattctgttatgatgtctttgtatggttttgttgaattccaaactatatcttatgcaaaaaattgctaaaaataacattaccgtaactttatcggggtttaagacaagattcttcaggcgggttttgtgatagggatggaccatcttccaagatgagcggtgtagtttgtgcaacggattactcctttgctactaggaccatccgggaaatctatgacactgatgctacctgcgtctaggtgaaacaacccgagcgcttctttagtgaggttaaggcattgtgctatgagtgaaatgtgagtcattgcaggaccaaccaccaccatgatttctccagggtttgacttctcatccgatagttcgtctaagagtgattcccatgctttctcggatctgttccacagagctgaaaacgcttcttcgtctaattgacttgcaatcacatcattgtcctgcagaattgatggaccaaaaatatcaaaacagtgttcactttactattgattgcatcgggataagttatcttgccttattggatttgcgaagaacactctcaacatcaagctcattcatttgtttcgttttcacgtagtgaggcacattatctacacctaaacaacccgcagcttcttgcacctatcaagtctttaaactgttaagagaaaaaaaaacaagattccgaagaaatagatttcttaaagtcttcagttttttaagaaaaatgaagctagtatatagagagttatataacttacccgggatattactccagaagactcaatggaggctgttttagggctgcaaactattgaactaacccttagatcaagtagaagctctgcggttttctgtgactgcaataatcaacaagtatatttgaagagtaaactaaatgcaggattaagaacttttttacaattgtccttcacaaaagtcatatgttaatgttacatgtatcacaccaagcatgttcattgcctgatcattattagctgcttggttaataacagcagaatcctgagatgttgaaaaacaaagaaaatcaggtaaaatttgacctaaagcctccaaacttttcttaggtcagaaatttgtgtaaagagctaaacaccttccaagcgcatccatggaggttaattctggcaaataaagattaattaagagaaccatgtaagggattcatacaactatacctcattattcccctgaccatggcagacaagtataatctgcttactagctttccggccaccagaacttccaccagctagaggcgaattaggtgtctgcattagtactacaaagacagtaagcagaattttgactacctctaacattttacacccaactcaagaatcttgcaacaacaaaaaaaaagttcatataactaacatgcttatgacttatgactttcgtgtttcatcaaaaaaagaaggtcagcttacctgatttagtcgattaagacatacgtgaggagatccaccgtcagctcttggtatgaagtccaatacacttacaccacaattgctctgcaacaaactcctaaaatattctgttcccagtcctaacatatcaaccaaaaaccacagacttaaaaaaaacttaacagagaaatgaaaaatcggctagtcgctaaaagaagaaaaaagaacaagttaccaattgctgttgccagaagagcctgattaacagcattatgagcaacaacgagaacagacttgctctcatgagcaagaataccaggccaacagcttctagcacgtgaccataactctcttacgggataatgaccatcgatgataaagttcgccggatcttcttgccattgcttaaaagcttccccaaacttctctttcccttctttcttaagtagaccctagtatataaccatcaactagaacaagagttaagaacaactacgataactgttctatgtgaatctatatctccctatcacagctacacttacttgaaaagagtagagatcgatttctctgagatcgtaatcgaaaatcatctcactttctctacttccccatatgatttcagctgttttctttgatctcttcaatggactgatgatcacaatgtataacaacaacaaatgcagccaaatttacaaaaaggctttaacaacaaaaatctccatcacaaagaacaagaacaaaaaaattgcagtgattactatcataatctgtatctctgattcttcatagtcaatttcatcaattcgatgtaaaatccaaatccaagtgactagatttcaaataccgattcaatagatataataagaaaatgcaggacctggtgaagcagacatcgaaggagtcgtcgataagcatctgacgagaaatttcagcctgagactcgcctttcttcgtcaaaacggagaaatcggagcttccttgaatcctcccttcttcgttccacgtgctctgtccatgtctcacaagaaccactcgcttcgtcgtctccacggtgaattggtcttgtaagctcgatgatgatcgaatcaataagcggcggcgagtcgagttttgccggcgggttttgtggagaagacaccggctgggtaaaatcggtgtagtgagtggtagagaaatcattttattttattttttgttttatgtttttagaaataagaagtgattcttattttttcatttagcgggaagttcgattttatcgtgggttttatttgggccgtaaaggcaggcccaatagacccaatttttatcatgcttaatcaagtttttttatctttcttttttttgttcactaatgatttggttttcacttctcactgatataattcactttgaaatacaaaacactggcaagggccgagggaaagtacatggagactcccaaaaaactataccaaattaaggtgaaacaaacaaataatgttatttatcatatgttatgttattaaaaaaaatacaatgatactatgttattaaaaggaaatagcacaattttgcacgaattcggaaaacatttggggaaaatcgtgaatttttgtttgcctttatatatgatttttaactggaattattccgaaatgttcatagtttcataatctcatcaagatttaaaactaaattctgaacacttgttaaagattcaggtaaattttgttgtaatattgtatgttttgtttcttgaattttggttagatcacccctttctgaatttgtacgatcatttatcaaacgcaattaaacatattcgtttggcatttattgtcgattgcaaccaaaagctgatcttgcatattagttttgttcgttttgtacttcttgttatatgttgtcagattttaaatgggttgacatgaaaattttggtcacagactcgtacaatttatcgacacatataaacaacatttaattgtggttgatggaaacgaacatgtctattatcatttttcgataaagtaccactcagtataaaaatattatcatttgtggtgaggacaaaaaactaaaacataaaaaccacaattttccttgaccaacaaacaaaaacccccacaaatggtaatacaattttacctttttacgtattacgaaacgaagcttaccatcagagactcttgtagccaaaagagaagcaaacgagataattgaaaataacaaggttcacgtgccgtattagtgggacttggttactttattcacattttgcaaagacgtagaaccttcaatactaacgtgaacatgtaacacgtgcatcttctaagttaatatgaagtcaattttgtcaacaagaaataaagtcaatagtacaaatatttttataatccattttcactggtttggtctcggtttgatttgtttaggtttggaaatattcttaccaatctaagtaattaactatgactttatttttcctatcgtactttggtactctttgggttggtctgtggtgaaaaaaaactatcaactatagacttagaaaaagaattgtagaaaaatgttaattcttttcaagataaaatgagttgttttggtttgaaacaaaagcgaacctaaacctggtggtaagagaaaagcactaccgaaaatttgaaatcgaaccccttaattagttcttccattttagagatttccatatacgttaatcatatgctacaaatggttgaatttcttataattttattttataaaattgaacgatatatcttatccattaatcaaagttaaaatcccaccaaatcttttttgttttctcagatcatcgtgcgcactgcgcatgctagctatgttaacgttaggaaaacaaattgtacgtaaaggtttgagaaacaattgatctgataggtgaatttagacaaacatgccattctcttttcgatatggcatgaaactggtagaaagaaatttgccattttttagttatgtattttttcgcatattcctaccattttgctaattaaaggtgtaatttagaacgagatataggtcatgataaaaaaaaaaggtaaaaataaagtcgctaatcatatttgacaacaaagttaaaaaaagattttcaaacgttaatcaagagtcaagacagatgaaaagaaatgtagaaaggatcaattcagcatgcttaggtgcaatgttagatagtcccacttgggtttcaccaactttgccatattaaacctttacaagtttatgaattaaaaaaggtttcaacaaccccatcgataaatcttttacggccaacaattgcttgttgattgtttacttatgttataaaacgatattattttcaatatattatgaatatgtgttttcttttttcaaaacgaagaaaataaactagaaatatttatattagaagctgggcttcacttttgagacctgaggtcacacctatatatctttaactttaacgagaagaaacatatatatgacacacgaattacataatcgtggcatattggagctgttgttacttgttaagttgtcagtgattcttttatttcctgcattctaataatttattatacataatatttcggtataatttagtacataaacttatattagcgtcataattttttagtataaattagtatgtaaactttttgttagcatcactgcatcacatgagaatctctttttctcattgataaatggcttaatcaatgggttaaaaagtagggtatgcaatcaatatacattctattagagttagagatatagattatatatatcttaggataatctacatccacaaatatgtctcactagatttttgtatgtcttatgtgttgtcatatgataaaacactaaattagatgtattacctacatatatgtctctctagttctttgtgtgtatgtggttgttcgagttgggccactgtactaggtttccttcaatggtgcagatcgatcaggtttgttcgagtgggttgctgtactaggtttccttcaatggtgcaaatcaggtttattctgatttctgaggctagtataatctagcttcttaaggaaaaacccactttatgttttaaatttttttgagccatacaattatttatttattgttaggcgactaattaattattgattaatgtatgaagataaacaaaaaaggtatataagagcatatattttaaagatattaaggatatagatcgatcactctcataatcttaattatgtatataaagatttatttttaaaacacccaaaattgaaaattgaaagtctgcatccacataaacttaaaactaaagaaaggttggtttgaaagatcaaatcaggtgaaccaggtctcattgtataggcttatggtttagattattgttcggagtgaaaataatatggtatatatatatatggtttaattattgttgggtttaaaataaataattaactagtttgactaccataaataatatgtgatatatttatcaatttatattaagtattttatacaagagaatacatctaaattttaaaatgaaaaaaaataatatacgaatgtaaatatccaaatttagggagcgatatggattggaccatgttccatggatacctttgcacatatagttcgtcttctaacttttaaaattatattattttatcatttgaaaaggttattatagtttttttgggttattatatcaaaatgacaacttatgctaaatgtttcttcttactattttcattctaggaattttttacaatcattatccagtactagactcatatcccatgcatgaattttattcggtaattatttacaatgtgtagatagagaaacaataataatggggatcaacaatttgactatatgataaaaatcgatctttgtcttcattcaaaagaaaaaccttaaccaataaataaccaccacatagttacttgatactaaattactaatccacatattcatacacatggtctctttttttaatatggttcttttagttaccttgtttagtaatctagttttaaggataaaatttagaaaatcaaaatagaaacttgaaaacatagcaaaatctcgaaagaacgttagcattcgattatgagaccacatatgcaaagctgccacgtatggtccatttatccataaatctgctaatgacattatcttattatgaaaaaagatctttactcacaattagcagcaataaatctttaaaaggcctccactgattaacacgtaccgagaaattcaccatttttttcctaacaaagcaaagtgaacatattcaaataaaaacaactttataatataaacaacaaatatcgttcaggaaaatcaaatgaaatgtggtaggtgaaggatttgacggaactacccttcaagacacgtcaagactttctttcttttacaacattccactatataaacacttccttctccaccatcatctctcagcttgcaagttctctctgaaccatagaactccaagcttgaactgtactctactcgtcgtttatatcttactcttttgtttcctcttaccagaaaaaataaataaacagcaattttttcatttttcgactcaaatcatgcaaaccatttcgcctgcgttctcgtgcgatctcaaatccgtaattcaaccgaatctaacggctaagaaagcgcgttactctcacgtaaatggaaagcgcgtgtctgttcgttgcagttacaggtctgagtcgtttagcttccctaacggtgttggctcaagccgagccgattggcaaagctcatgcgccatcttagccagtaaagtagtttcggctgagaattcaagctccgtcgccgtcgttaacggacacagtaacggctccgttgatttaagccttgttccgtcaaagtcgcagcacaacggaaagcctggattgattcagccgttaacgataacagatctatctcccgcgccgtctcatggatctactcttcgtgtcgcgtatcaaggagttccgggagcgtactccgaagcggccgccggaaaagcttacccaaactccgaagctattccttgtgatcaattcgacgttgcgtttcaggcggtggagctttggatcgccgatcgtgctgttctcccagttgagaactctctcggtggttcgattcatagaaattacgatcttctcctccgtcaccgtctccacatcgtcggagaagttcagatcccggttcaccactgtctcttagctcttcccggagttcgtacggattgcatcacgcgagtgatttcgcatcctcaagctctggctcagacggaaggatcgctcaacaaactcactccaaaagcagcgattgaagcgtttcacgacacagccgcggcggcggaatacatcgctgctaacaacctccacgacacggcggcggtagcgagcgcaagagcagctgagctctacggacttcagattctcgccgacgggatccaagacgacgcaggaaacgtcacgcgcttccttatgttggcgcgtgatccgatcattccccgtaccgatcgtccgtttaaaacgagtatcgttttcgcagctcaagaacataaaggaactagcgttttattcaaagtgctttccgcgtttgcgtttcgaaacattagtttgacgaaaatcgaatcgcggccgcatcagaattgtcccgttagagtcgtaggcgacgaaaacgttggaacatcgaagcactttgagtacacattctacgtcgacttcgaagcgtcgatggcggaggcgcgtgcacaaaacgcgttagcggaggtgcaagagtacacgtcattcctcagggtgctgggaagttacccaatggatatgacgccatggtccacgttacctagcgaagacgtatgacacaattaaaaaatttatctgaattttaaataacattatggtaaaattatcataagtaaaatacatggaaactaaagtagaatttgtagaactcgttttgcatgtgaagtgggaggataatattattttatttctcttaaaccaaatattttgtgtgtatgtatttgctactattggaacaagaccggtttgtagtttggttctgatgattacaattgaagatatttcttaagctaagcacattttaattctcatatttttttcgtagtaaaaattagagaacctaatatataccttaatttgtaacggaatttgttatagcagaatcattaacaataatctttgaagctatgctctaagactccccacgtacgttaaccaacagaacaagaaagactttcagattctaaactataaagttattaaattacaagttatattacaaaagtcgaaattaatgtgtgaacacgagttcggtttgatgtttcttgctttgaaacaaaagtataatcatccatctggtcgtgtatatacgtactatgccaacttccatgaattttcactgattagtttattaaagttctcaactatcttcaggaaattcagttcgagttgctaaagaattgggcatataatttccacgaaactttgcatttgatagataatttaacatgacttgactatttatactagatatgtgtaatttcccacctatcttttagggtctaaacatttttgcatgccaaaagagttaggtgtggtggaagctaccatatgctcttaacatccatcttctagaattataatcttcgattgtaagcctgaacattttcatttttatgagatatttaaatttttagcaaaacaaaaaattggcatatgagtttctttgtacatgtttcttaagctgtacttttaaagttgtagacaatgttacaatatttcatgtacagtttctttatcttcatgccgtggagttatgtttttactttttaggttgtgcaacactgaaaaataagggttctaatataaatggattcatattttaaaatcaatttttgtagcatgtagagcggtaagaactattaatcaagctcaaaattatgaaaatttgtatttgctgcaatgttgaaaatatgatcatcatattaaaatattattattaagaggttcttattaattcacatttccacaagtaatgtttattgttttggcacaatggtgtcagatcttgcgtggtgtcctggtgtcctaatatcgtacatgtataaactataaaagtcttccaccgtactaattaattaatgtttaacttgttaatgagaagacaaagttgccaactaaaaggtaaccaataactaatttaaaagagagtagtcttggtcataagtcataactcataaaaatgaagatcacgaactgatttgagcatttagtgggtccttgatggttatcatcgagatgaagtgaatcttgtcatggcgggttattatactcataaacactaatgatatatttgaaatagtagttaaattacatttcatgagggacaaatatgatgacggtataattatgtcaattgaccgtaaagagtttggtggcagatagaactggtcggaaatctaacataccaaaggattattacaacctcgtcatgtttttgttacaaccttttaattaatgttcttagtttataccctaagttattacaacctcgtcatgtttttagtggtcgtatagactttgttcttagcattttaggtttcatattagtttgatgtaagcttgcattatcatttctcaactacaactcgaaattagatctagttacattggggaaacaaaattctacctgtaaattatttaaacctattcttggattttgacgaaaccagcattaatgttgtcgtctcttaagatattagaaataggattaaacacttccatcgtcatattgtttgaaagcaacttgataatgatcacagacaaagatgattaaaaacacttacattatcacatatactaaattgatgttattataattaattatagaagggttgattaattaagagaaatggcgaaatcaggagtggggtggtaggtgggagaaagagaggtcgagcacactgtggtagttggtgagtgtgtgggggagccttgtacttaggttttgccgacttctttagattccggttaagcttttggttttggttccggtttaagttagagatcttaaattagtgattatacaagaaatctcatgtagtaatattattctatttgtggtccaagatatggcataagatttaacgaaagaattgaatgttataatgtgttgcaagtagaagctttttacgcttttaattaatgttcttagtttataccctaaagttatgaagacaaatagcagcctagccctcgatggctcgatcaatttttatcttatatttctcattgttcattgttattccgttatatttctagtatcgcgaaactggtttcaggtgacaaattgaaagtcaagtgatcaatgaagaaatatttggcttcaatatgtattttctacgattttattttcttaagatgtagcttatctaactactgcagaaaaatgtatacacgtaaatcatgtgatgagctttgttttcaacgtgaaatatctcgttccaaaaaataagaattttatttttccattatgttgtagttgttttcagacagcattttccactccacttaaagagttctcgaacttattcaatgattggtcatgtgaggctgtggcatatggtgattgaccaattaatttaagcagtcaggtcaagtaaaataagtaaattaagcactcctaaacacactaatattgaatcatttgcgttagtttttgtcgtaaattgtgtacatttaaaatatgtttagataaattattaattgatatcatccaagtggtaaatctttcagatagaaatgctgagttcgacgataattgagacggatcttttcttcaaacgagataatcaatctaatactattgatttttgtttatgagacatctaaatctttcagacttgaattttcaaatattatttataaaaaataataattggttggtgatcaattggatccagtataaagctgaagcctgaaagtagacttttgtaacgcaattactaaatatcaaacattgtatgcattggtttcttgaaacggcccatgttcttcaaagtatttgatgttcggcccatataagatttgaaaggtatgggccaatgataattcagataatctacaagacgcatttttaagccttcttaaacttacggggcaaaaataagaaaaaccaaaacaacaggggcgaaatacaaattatctgcaaatgtttttgtttcttctcagtgtctctagtttacacaaaaaccccaaaacctctctcacaacgcttatctgctcaacaacactcttcacctatccacttctcatctcttcgttatcccctctctctaatggctaacgaagaactcactgagtcacagcaacaagaagacccaagtcaacaattacccaatgcagatgaagaaaagggctcagactccgactcaaactcagactcagacgcatcatcccaatcctccggcgacgatttctacatctccgagtcagaaaatgaagcagaaggagacaacacaatcttcaactacgtaagaccaagtgacatacctcctgacccaaacgcaaacccagaaaccaacattcgccgattcaatcgagtcctcgatggcaaacgagtgaagcgtatgcaagaagaagaagaagataaatacactttctatgaagatcttttcgatttccctagagacccagaacgttggaaggagcaagatttaagagagatttgggctgatggtccattggagatgacgaaacctggttgggatcctgcttgggctgatgaagatgattgggatgttgttaacgatgagattcaagaaggtcgagatcctgggattcaacctttttatgttccgtataggaaaccttatccagctattccagataatcattatgatattgagaatgctaaaggtgttgttgaagagcttgataggattgaagagtttcttcagtgggtcagctatatttttcctgatggaagctcgtaatgcctcacatttcccttttttcttctctttggttttggtgtcttgtttctgtgagtttggtgtttgcaagttgtgatttttaggttttgggtttacaggctttggtgttttgttaccgtgagatgctttctaaatctagtgattttcttagtttgttgtgttctataagctgcagattgaattttccatgaagtttgggttgaaactttgtattctaaatagagtttgaattatggaaatgaaggaaatggcaatgcaggttggatgatagggcattagaaactttcttgtgactaagttttatgatcttcgtcatctgtttgggttgcttagtgatgaatactttcgtctagattcagtagcttcgtatctcactattttctctctcttttgttttgggctaaaggtacgaaggcacagtttgggatgacttggctcaaggcaaaggtgtttatattgctgaaaatgggcttgtgaggtgatatttctgttttggagatttgcttgttttttgtttctcttggtaatgtcttacaattggttttcaatcacccaataatttttttggtgttggctctgaatttgaattgttaggtatgagggtgaatggcttcagaatgacatggaaggtcatggggttatcgacgttgatattcctgacattgagcccataccaggttccaagtatgattctcattcctattaatcttcccacgggattttatgaacatagtcgtttgactaggatattgttctttctgtctatgtaggcttgaagctaagatgcgtgcggaaggaaggattatcaagagagattacatgactccagaagacagaaagtggttggaaatggatgtcgaggatagtgttgcacttactgatgggaattttcaagttcctttctatgaaaacgaagaatgggtcacacagtttggcgagaaaccgtgagtctgcgatgataagattcttactagatggcttacttcccaacactaatttgaacggttttatttaatattttgatttactgacctcatgaaatatattgctggactaggcaataacttgatctaaaaatacaaacagaaaaatgtctttttagttgatttcctctctattccttattcatacatatacattgtatattatatggttttcatatcagggagaaaggtcggtatcgctatgctggtcaatggaagcacagtcgaatgcatgggtgtggtgtctatgaagttaacgaacgcatcctatatgtgagtagtaagaaatattggtcgtttacatcataattctatctaatctgatcatcataaaatagcttagatagatggcatctttgtacttcatgaaagatttacattagtgaatattcatgtttctgacactagttcacatcttaatggtaacgcagggtagattctactttggggagctattggaggaggagcatggctgtaccgtagatatttgtgcggtagttacccatttttgctctctatgatacatataactttcagcaaagaaagaggaagtcgtgataaatatactgatgtgaaaacatttttcagctgcattctggtttggcggaggtggctgcagctaaggctcgaatgtttgtaaacaaacccgacggaagtattgccccttttctttaccacttcttctgtttggttctgtgtattaagtataaaccaagacatattttagggatttgtttgattcctttagatcagtgcaggaccctctctagtaaccatcattctgtttcaaatatatatttcgcttttctttcaggcaatgtccagcttatgaaagtgaggaagaaaactggtcactttacagtaaggtgttagtttagttgagagctcaaagtgtttttgttttgtttgttttatgtctatgcagtgattagggaagagaggggaccatatggtgatcctcaacatccgtatttttatgaagaagatgatgtgtggatggcgcctggttttattaaccaattttatgaagtgggtcattttcttatcaagcttttcgagttagttttctgatcacaaagttgacaaaacaatctgtctttttggtaggtacctgagtattgggaaacctacgtaggcgaggtggatcaagagagggaaatgtggttgaactctttttacaaagctcctttgaggttaccaatgcctgctgagctcgaacattggtgggaaaatggtaatgacccttcaagattttagtcttacatggttgaatgcattgatgttctactgatttttttctatattttattttcttgatcagtggaggtgacaccggagtttgttttactgaacaaagaacctgaacctgatccaaatgatccttcaaaacttgtccagaaggaggaccctgttattttacatacaccaacaggtcgaataatcaactatgtagaggatgaaaagcatggcattcgactattttggcagcctcctctggaggaaggagaagaagtggatccttcaaaagttgagtttctgccacttgggttcgacgagttctatgggaaagaagtggtagtgaaaaaggaacacccaataaaaagctttgtacttggaatcgagaaatcggtgaagccgatgcttgacggattagagaaatggacagaagagaaaaagaaagcatatgaggagagaaaggagatgatacagcaagaacttgagttagtagaggctgagatttgcttagaggaagctatagaagatatggatgaagaattgaagaagaaagaacaagaagaggaaaagaaaactgaaatgggtttaactgaagaggatgaagatgttttggtcccggtttataaagaagagaaagttgtcactgccaaagagaagatacaagagaataaacaagaagagaaatacaaagatgatgatgatgaggatgatgacgatggtgatgatgatgacgatgatgatgatgatgatgatcttgggccatcaagttttggatctgcagacaagggaaggaggaattctcctttttcttcatcctcattgtcttttgcttcgtgtaccctctttcctgcggtaatactctctcttatttttcagtataatctcggtttgtctcgattagaagaagttagtgttgatatatgtaaacttggcaggtacaatcaagactagaaagctcatttctagcatggaagcaacatcgagcagaaccatcaaaagtgaacacaggaatcatcaaaggtgctgataccgcatcagcttcaatccattttcctccattgtcgagtaacaatgctagattgaagatgggaaaggtagcaaaccgaggttgtgtccagagaagctatggaagctcaagatctcagtctcagttaatgtctctatcacgactactttcttgcaacgcatcatcatcttcttctcctcccgatagcagctccagtgaatacctcaaagactccggcctctgggaaacaccggttggggacatgagcgtggttttgtcgctgcaaattcagacaaaatgttctgatttgtttgctgagactcctgctgtgtcttgagtctctcttcttctgtagcatttagctcgagttcttatgcacttcaaggcttctttttttggtggacaagatcatttgaatttttgttgtattatctaataaatattttaccgaaactatttaaacgaaaaaactgaagatttatttctgttttatttttcataatcatatgatttagagaatgagaatcgaataatctcagaatatttaagttaatatttcatttatcaatttagaatctttaccaaatatgcaaataattttacattaacgcaaatattccaaaataaaggaagcgttacgaaattaagggcaaaacgacgccgtgtagactctcgaagaaccctaaagagacttcttaaacctcattcgattataaaatagccccaaacccactgcctctttcactgcaatttctctctttcgcttctaaaaaaaaacctaacaacctctcttctctcttcctcgttcaacaacaatggagttctggggtaagattctttatttattcctcttatatcttccgtctactgtttctattttccacgttccgagaattttgatcgattgttcatataagatcgtatttagctgtatttcgtgtatatgttcataccttgttgcctttgtagcttatttagggtttaggtttcacatagagcttggtttcggtatcagctttgattatgtgtagatgttttacaagttgatgagtgactcatgtttgatttctttgtataatgttatttaggagttgcggtgacaccaaaaaacgctactaaggtgactcctgaagaagacagccttgtccacatttctcaggttattttcacacttccaaactgtataaagtttttaggatttagcttaatacagtctctttatgttttggttctctttctttatgtgtaggcttcacttgactgcacagtgaaatctggagaatctgtggttttgagtgtgactgttggtggggctaaacttgttattggaacactttcacaagacaagttccctcagattagctttgatttggtttttgataaagagtttgagctttcacacagcggtaccaaagcaaatgttcatttcattggctacaaatcccccaacatcgagcaatatcctttttttgatagatttgactaggtgttctttgtctctatatttaagactggaagatactagaaggtttagctacaatgtcttattggttgtgtattccttaattcttgttgattgagtttccacggatgacttcactagttcggatgatgaggatgttcctgaagctgttcctgctcctgcccctactgctgttactgccaacggtatgtgttgttgatgctaatattgtatttgtttcttttattgaaaagttgttatctcatatgtcaatttcttttgacatttcaggaaatgctggagcagctgttgtcaaggctgacacaaagccaaaggccaaacctgccgaagtgaagcctgcagaagagaagcctgaatcagacgaggaagatgagtctgatgatgaagatgagtctgaagaggatgatgactctgagaaaggagtgagtttttgtagctgtttatgatatctgtttttctatctagagtactcatatatacagtcaggagaagatgagtagttggttgataaattatatggtgatgtttttttgtagatggatgttgatgaagatgactcagatgatgacgaggaggaggattctgaggatgaagaagaggaggagactcctaagaaggtagatacattgtctatcaagcagttctttgtttactttactttttacataatttaattctccttctgaccttaattgtatcatatgatttgtgttaaagcctgagccaatcaacaagaagaggccaaatgaatctgtatccaaaacacccgtctctggaaagaaggcaaaaccagcagcagcaccagcttctactcctcagaagacaggtgaaaagatgaaactctctttgtttttgttccttagaagcattagatagttaaataatgagaaagctttcttagtaatttgttgtatactctgttgtattctgacgaaagagatatcttcacattgtgttgttggtacagaagagaagaagaaaggaggacacaccgccacaccacacccagctaagaagggtggaaagtctcctgtgaatgctaaccagagccccaagtctggaggtcaatcatccggtggtaacaacaacaagaagtgagttgtctctttctttatctttctcatagcccaaagatatgagtgaaaatgttaattggtaatgatgtgtaatggtattgtgtgtgtacaggccattcaactcaggcaaacaatttggtggttccaacaacaagggttctaacaagggcaagggaaagggtagagcttaaggacgtggatcaaggagaggttttgggttttcgagtagatgatgaaaacacttggaagtgtggttttggatttttatcttattttattagtataacttgttatcggatgagctattttgagtatttgcaatttctactttcctatgtaattcagtatatgaatatttgctgaaatgagaaagaagactcgaattgcaaacacaaattgagtttattacttatagagtataaacaccaaaattgatgcataatagccaaatcaaattaccaagcctatctttgaaatctaacaacgttgatttcacaagcactagaacatctctggaatgtcatgagttccctaacgacgagagactcttgttcctcgctatgacaatctctgcatagcttaaacttcttgaggactagcgaattctcaaggaaatattttgatagtttcatctcttctccacttccatagtttggtcgtataatctcaacattctcaaggcttgattgcaaacacttcggcactgatgatgatagactgatttcttcattttccatttcacctttcagcttctgcatatgtcaattatcccaaacagttgaataaacgtcttttataacagtgacaatgaaacatgtggtttttaaagcaaaatcatttaccaagacaagtgatttgagatttggacagctctcaagaacgcatggcaacatttccaaatcacaaacatagaatttcgcatgtaaccgcgtcatgttacgaaactgaggcatcggctcgtgcttcaagtagtgacaaatgatctgcaaaacacaaagaaaatgcagttttcatcctaagagacacattcaaatgaccagttttatatatttgtatgcatatataccttcaaagttgttccactaatagtcatgtcccttaagcttgagagcccggtgagaaatttaccgacattgcttctctcgaacgactcctctagatcccaaatatcggacacattaaaactgaccttgatatctgcctttgcagatgaacacaaattgtttatcacaaaactcactgactgatcatctttaagacttagatacacgagctgaggagcatcaatgacaaccttccaatcgtcactatcatcattataccaacacttggaactatcaataacgagtttgagactgtttagtgactgagagctcacccttaaaaccttctcagtggcttcatctacatttctaacaacagttaaatcttcaagaaccgggcatgatgagataaacttctccatagtctcagcataagaatagatattctcttctaaatgcatcaccttaagattaggtaatgacacaaacacgaaacgatgcagcatcacaagatgaagtctcaatgaaaccaaactctcacttaagtaaacggttagaggcagcgtatcaatcatatgatcaatacgactgtcaacttcaagatgttggattctacgcttaacagcgtcttcgatccacggtatgattgtccacatatcaacagcttccatctgaaaagaaatctggagcttgtgtaagcatgaatctttaaaagaatcaagaaaccgagtggcgaaactgatgaatgtagtggcatcatcgaaagcatcaatgtctatatccaagacaggggttgaaagccagagatctttccatctggtggacaaaatgctagtagtaacagcattctctgtaggaagattagagagtatctgacttagcaaatgatcaggtaagctacttatcctatcttctccagatctacgaattgctccttggttactcatttgctatcttcaccaaaatggtcgattcttagctgccgaagaaaccaataaccaaacaaaccaatagctctgccttcgcagatccgctacaaagagtctttagtttctctctaagacttcttaggaaagcttcgtttacaatggctttggatggaaagataaaataaaaatctaaactagagatgagagttgactatgatgaggattggtgagagattaataaaatgaaatctaatgaataaaaaaacctacaagtgttctcaaaaaaggaactttccttaaaaaggaaggaaactgcaaatttaagtgttacagaaacttgtgtatataaagtcctttcaaacttcaacaacaacttcacaagaagcagaacatctcctaaatctcaagagttccttgaagatgatagactcttcgtccattctcttacaacccaattgcaatgtaaacttcttgagcactgccgaattctcgaggaagtactttactagtttcatttcagcttcagctccgcttatcggtgtatgaatctcaacgtgctccagagatgatctcaaacattttggaattgatgatgagagaataagtaagtcgttcttcttaaatacctccagttcctgcatataaaaaatcattcaagaagttaagtcatgatgatgtgagtaaaccataaggtacaagtttaagtcaaagccatcaccaatacaagagatttgagatttggacagctctcaagaaagtttggcaacttttccaaatcagagttacaaaagaccgcatagaattggatcatgttaggaaactgaggcagtggttcgtgtctcatgtagcgagagaggacctgcaaacacaaagaaaatacaactttaaagagactttaaaatactcagttactcccattgacatatatatatatatacctttaaagttgttccactcatagtcatgtcccttacgctcgagagcctggtgaagaagtttctcactacacttctcgttaacaggaaatttttcaatacacttctcaccacatcgaaagttacatcaatatctaccttggcaggtgaagtcacactacttaatacgaaacttttagactggtcatctctaagactcaaatagctgagtctaggagcatcaatcacaacctcccaactatcatcttcaatatccccataccgatcaccatcgagagcaagtatgagactctttaacgacagagaacgcactcgtaaaaccttaacaatgttctctacatctctagagacatttaaatcttcaagaactgggcaagatgagattagattctccagaagagcatcattagggtaaatgttgtctattaaatgcattgttttgagacgaggtagagaaacatgatcaaaatcaggcaatgacacattatggagtcgcaaggataccagagtctcacaggtgtaaaggctatggggtatcagctcctgacctaaataactccaacgacctatatccaaatgttgtactttacgcttaaccgcattgtggatccactgcgtcaagtaagacctatcatgctgttttttttcaaaagcaagtttgagtttgtgtatgcatgtctctctagaggtatctagaaaaccatggacaacacgcgcaaattcatagtaaccatggaactctgaaacgttaaattccaacagaggaaccgaaagactgaatcttttccatctcttggacaaaacactagtcctaacagcaacctttgtaggaagattagagagtatccgacacagcaaatcatccggtaacaaacttatactatcttgacttgttactcctctcttcgtgctcattgtttgcttaactcttgagacatacacaagatctgcatcaatagaggaaggttagaacaaagaagctcaccgttcattaaattagcaccggagatctctctgcctctcagactcaccagaggcttcaggagatttcgtcttctagggtttaagatttcggaaaactatctggttcttaagaaactaacatcctttgatttatctgttattttcccgcgagattttagttaaagataatatcaagcaaatatacctaactaaatccgttaaataaataaaaagaaatctcaaatgttgtacttgaatttgatctacacaaggacaaataagacaatcactatgtccgactgtatgatcatagtaagaaccacctacaagtcattttgaaggtcagcaacatagacaatttgacatgtgctagatagccacggaaatgcgagtaaatcttcttctcgaatgggaccgctcgaacacagaacaaatttcttgaggattgcagagttttctgcaaagtacacaaggcaagtttcttctcacaaagatgacaatggtgtatgctttttatctctacaaactcgagcgatgacagcaaaaactgaggtgcgaacgagaggaatccatctagtcctgagacgaggtaatgaaacaaactcgaaactaccaaacaataccgatggagtcttaagtaaaggagtgtctgacagatatagaggcttacaggcatcacttccaaacactcacgcttcagaggaccaaactcaacatcaagatccttaagtttaggcgtagccacaaaatctatccaacgcgtgacacaagacttgtcattcacatcctttagaatacttagcttgtccaagcatattttttcttccctatagaatctaggaacttgttcatatatataacccacaaaggcattgtaatctaggaactctttagagtccaaatccaaaaaaaaaaaacataaataacagatttcaacaaaatcaaaatccaagtccaaactgtttttgattttaatccaatctaaattctgatcacaggaaaacttaaaagtcatcttcacggtccaacaacctcgatttcacatatgccagagcgccttggcaatctaagaagatcccttaacacagcgtgattgtcttcttcaatggaacctttcaaacgaataacaagtctcttgaggatcacagagttctttgcaaagtacattgctagtttcatttcaataggcttgatagcaaaactggagtggacgtagcttgatagccccgatggacttactcacaaaataaaaagagaagtcctcataggcattgaaagagcgagtctttttagggtttcatgcctttttgtcgaacactcaagctctctctagtacacgcgtttgagagcgtttacaaagaaaggctttattttttctgtggtcatagtcagagctttccttagactttgaaaatgaagacagctgttgaaagcaattacgccaccgtctttagtgtaaagacatcaaagcgacgcgtatgtgacttagtcaatttctaactggagaccaaaagtcagagaggactgaggaaattcaaatctatacgatgatgattatcaatgatgaagaaagtagagtgtctcacaatttggttatcgaaatcttaaggtttccatcttcaaaagcatctacgtatggctctttcttatcgcaattggttgtacgacgtgttcccgagcttcagcggagaagacgtacgtgtaactttcctcagccactttctgaaggagcttgatcggaaattgattagtgtattcaaagacaacgatatccagagaagtcaatcgctcgatcccgagcttaaactggcgattagggattcgaggattgcaatcgtcgtcttctccaaaaactacgctgcttctagctggtgccttgacgagttgctggagattgtgaaatgtaaagaagagtttggtcaaattgtaattcccgttttctacggtttggatccttgtcatgttaggaaacagagtggcgaattcggaattgtgtttgaaaacacttgccagaccaaaacagatgatgagatacaaaaatggcggagagcattgactgatgtagctaacatcctcgggtttcattcttccaactggtacgaactacgaatacttgatgaatctttacataatctggtgtgttatgaattatctttctttctttgtttagggataatgaagcaaccatggttgaagatatagccaatgatgttttggctaaactgaatttaactacaacatctaatgactttgagggttttgttggcatcgaaggtcatatcgcaaagattagtttaatgttgtgcttggaatgtaaacaagtgaggatgtttgggatttggggaccttctggtattggaaagactaccattgctagagctctgtttagtcgaatctctcgtcatttccaaggtagcgttttcttagacagagctttcgtgtctaagagtatggaaatttatagtggaggcaacgtggacaactacaacgccaagctgcatttgcaaggaaagtttttgtctgaaattttaagagcaaaagacataaagatatctaatttaggtgttgtgggagagaggctaaagcatatgaaagttttaatctttattgatgatttggatgatcaagtggtgttagatgctttggcgagtaaacctcattggtttggttgtgggagcagaatcattgttattacaaaagataagcaattttttagggctcatgggattggtcttttttacgaagtgggtctcccatctgataaactagctctagagatgttctctcagtctgctttcaggcaaaactctccacctcctggtttcacagagcttgcttctgaagtttcaaaacgttctggtaatcttcctttggctcttaatgttttgggttcgcatcttcgagggagggacaaagaagattggattgatatgttgccaaggcttcgaaaaggtttggatgggaagattgagaaaatattaagagttggctacgatgagttaagtaataaagatgataaagctatatttcgtctcatcgcatgtctcttcaatggtgcggaaatcagttacatcaagctgctacttgcagatagtaacttgggtgttaccattgggcttaaaaacctagttgataagtccctcatacgtattgggtgtgacactgtggagatgcacagcatgttacaagaaatgggtagagaaattgttcgggaacagtccatttacgagcctggagaacgggaatttctggtggattcgacggatattttggatgtacttaatgataacactgtaagtgctcttttcataaccacctgatacaacttctacaactcttacagcatagtctgatctttacaactttttctcagggtacgaaaaaggttttaggtatatcatttgatatgtctgagattgaggagttgcacatacataagagagccttcaaaaggatgcctaatctcaggttcttaagattttacaagaaattagggaagcagagtaaagaagccagattgcacctacaagaaggctttgacaagtttttcccccctaaactcaaattactgagttgggatgactacccgatgaggcgtatgccttctaactttcatgctggatatctcgttgtactgagaatgcaacacagcaagctcgaaaagttatggcaaggagttcaggtgaagttttgtagcaagattaggcacattactatattaccttttgaatggcatatgtagtcagagatgtgttcttttcttctttgatagatagagtttgcaacttttgatatatagttcaaaagatgaggagaaataggattataatgcaattggagattgaaacctctcaagtgtatatgaaaactgaccactgattatttatttgttttgtttttttcagccgcttacatgcctcagggagatgcagttgtggggatcaaaaaaactgaaagaaatcccagatctctcgttggccaccaatcttgaaacactttatctcaacgattgctcgagtttagtggagcttccttcctctatcaagaatctgaataaactgtgggacttgggtatgaaaggatgtgaaaagctggagcttcttccaaccgacatcaacctcaaatctctctatcgccttgatcttggtagatgctcacggttgaagagttttcctgatatctcaagtaacatttcagagctctatctgaatcgaacagcgattgaagaagttccttggtggatccagaaattctccaggcttaaacgtttacgtatgagggaatgcaaaaagctcaaatgtatatctccaaacatctccaaactgaaacatcttgagatgctcgacttttcaaactgcatagcaactacagaagaagaagctcttgttcaacaacaatcagttttgaagtatctcatatttccaggaggacaagtgcctttgtatttcacttaccaagctactggaagctctttggccatccctttgtcattacatcagagctctctctctcaacaattattgggatttagggcttgcgtcgtgcttgatgctgaatctatgtcctccgagttatacgtaattgatatcaaggtatgttgtcgcttgagtggtaaacgcagcaacctctttgattccgctgactgtcgggatgccttctttacacctcagatggatagtcatttggttatatttgattgttgtttccctctaaaccaagataacgttcgtctagctgaactgaacaatgataaggtggtcacagagtttcatttcactagtatttctcgctgcaaaataacaggagtcggtgtacgcttcctcagggactgttcattaccagagaaccatcataatgatccaaatattcttgcacctaattgtggatgccctgagactgaacactctgatgagtatggagaattcggtgtagagacgaaaagaagtaggaagcgaaagcgggtaagcattaggcataacatgtacacaatactagatatgtgtcccagttctgtttcaggatcaaccacttactattttgtataataaagatcactgcattttgttttatttttcagataaccttaaggaccgctcaagaaactattgacttgccctaccttcagatccgggaagaacagaggatgtcactttgaatctttgattcgagaagctttcatggcgcgaaatgagtggtttcaccggttctaatggaacagcaagagacaaagaagacatgcagagagtcgtcgcatagttgtgttattagatgtctttgttttagacaaacaaatgacttttcacttttcagacttcagaggaataagagtcaatgccattgataagaggaagcgagtttcttgataacacttgttgtcgtctctttcttcatctttctcatagcccaaatatgtaatgacgttgtcaattaaaggcataaaagtcaagccaaatcaaattgcattgaaattcatttcaagctgcagaggttaagctgaatcaaatccgaatttagtgcaatcaagctgaataaatctcgactggactagttagtttactaataataatacaagaagaagaaaatgcagttttcatccaaagagacactgtcagttgttccacttatagtaaggcccacagtacgtgcaaggtcgctcagtcgctgatgatgatgtcatcaaaacgttgcgtatcatcgccgagtcaacaagacagtcggaaatagattattcagtccaaagcgacaagtagagagtcaacgacttatgatgaatagatgaagaaacaatacttgaaagagttttggaatcctcaagcatcatccatgagttctgtccaaattacaaaccaaagttttccaaatcctcgaacatgtttatgattttaatcgaatctaaattctcatcacagataaacataatcatcttcgcagtccacgaacctctatttcacatatgctatatcgccacagcaatgcaagtagatcttcttcttgaatggaaactctcccaacatatacaaatttcttcagcattacagagttctttgcaaagtaccttgctactttcatcacataacgctttctacagagtctgcttcttatctctacaaactctagcgatgataggaaacacggaggcacagacgagactcttgattgttgttccgtctcagcggaagatagtagaccctgaaaaatacacaacatacaaaacaaaaaaagatgaatgaggacaaccgaattctccaggaaatattttgatagtttcatctcttctccatttccatagttgggtcttataatctcaacattctcaaggcttgattgcaaacactttggcactgatgatgagaaactagtttcttcagtttccatttcaccttttagcttctacatatgtcaattatcccaaacggatgaaagtgaaacatgttttataaagaaaaatcacttaccaagacaagggatttgagatttggacagctctcaagaacgcatggcaacatttccaaatcacaatcatagaatctcgcatttaaccgcaccatgttacaaaactgaggcatcggttcgtgcttcaagtagtgacaaatgatctgcaaaacacaaagaaaatgcagtttttatccaaagagacagtgtcaaaagttcaactatatatctgtgtataccatcaaagttgttccacttatagttaggtcccttatgcttgagagcccggtgagtaatttaccaacattgcttctctcgaacgtgacaggtagatcccaaatatcgttcacattaaaactaaccttgatatctgcttttgcggatgaacccaaattgcttatcacaaaactcgccgactgatcatctttaagactcagatacgccagccgaggagcatcaatgataaccttccactcgtcgatatcatcaataaaccaaccgttggaactatcaagaacgagtttgagactgttaagtgacctagagcgcacccgtaaaatcttctcggtgataatatctacaattctaacaacggttaaatcttcaagaaccgggcatgatgagatgaagttctccagagtctcaagacaataatatatattctcttctagatgcatcaccttgagatttggcaaagatacaaactcgtaacgatgcagcgtcacaaaatgaagtctcaatgaaaccaaagtctcacttaagtaaagggttagatacactgcctcaaaatgaaaactgaagcgacagtcgacttcaagatgttggattctacgattaacagcgtcttggatccacggcatgattgtacacatatcaacatcatccctctcaactgaaagcttgaacttgtgtaagcatgaatccttggagaattcaagaaaccgagaggcgaaactgacgaatgtagtggcatcatcgaaagcatcaatatctatatccaagacaggggttgaaagccagatacttctccatctggttgacaaaatgctagtagtaacagcattctttgtaggaagatttgagagtatctgacacagcaactcatcaggtaggctgcttatcctatctcctcggttgctcatttgatttctcttttgggaaaaacactcaagacaagttatctgcatcacaaacaacaaagcgaaaaccgaatgttttaaaatgatgatccatggtttacatatagataccattatttcatgattcagctattccgctatttatcggacataccaatgctcaaaagtggaacgttagagagagagagagagaaataccaaatcaccatcgattcttcgctgccgaagaaaccaatagcggcgaatgtcgccgcccccacagattcgctacaaagagcctatagattctctctgcttaagaaacccttcttttacaatggatttagatggaaagataagataaaaatctaaactagagatgggagttgactgaataggatttgtgaaataaaaaatgaaatctaatgaaaaaaaaaacggttcgggtaagactataaatattaaattctccaataccaaactatcctaaaagggaaaatgcaatttgaagtgttacagaaacctgtgtatcatagttggataagtctctatacgttgaacaactacttcacaagaagcagagcattttctaaatttcaagagctccatgaagatgacagactcttcctccactttgccacaatacaatcgcagtgtaaacttcttgagcactgcctcattctcgaggaaatagtttgctagtatcatctccgctccagctcgatttatcggtcttttcatcttgatgtactccagagacggtcttaaacattctggaacaggtaatgagagcatagtttgttcattcttgtattccatcggctcctgcatatatatctatcaagaagtaggtaggtaaggtgattatcttaatcatgattatgtgagttagcaataaggtaaaggttaagctaaatcatcaccaaaaacaaggatttgagatttggacagctcttaagcaacattggcaacatcttcaaataatattcataggagttcacacagagtctggtcatgtgtggaaactggggcagcagttcaagattcaagtagagacagataacctgaaaacagaatgaaaagacaaaattttcatccagagagacgtttgaatgtttatataatgcattgacatccaaagagacattcaaatatataccttcaaattttttccacttatagtcatatccctgacgcttgagagcccggtgagtaattttctcactgcaattttctttgaggagacatttccagccgaatgattgtcaaaaatatcaaaatcgacatcaatatctaccttggcagataatcattactgtaaaagttgttttttaaatgcatgacttgagacgaggtagagaaacatactcaaaatctggcaatgacacattccttagtttcaaggataccagagtctcacaggtgtgtaaacgcttgggtccatcttcatagcaaccaaataactccaatcacatacaagatccaaacgcataaccgcgttgtggatccaccacgtcatgtaagatggatcacggtgatttatctcaaacgacagtttaagtatgtgaatgcataagtccttagagtagtctaagaaactggtcataaagctcacaaatttatggtaacgacggaaatctgaaattttcaaatccaaaattggaatcaaaaggcagacacatttccatctctgggacaaaacactagtcctaacagcaatgtttgtaggaagattgagagtatctgacacagaaaatgatctggtaacaaacttatcctatcttctccagttctactacgacctcttactactactcctcctctatcgctcattgcttgcttcaattttagactctaacaagatcaacaaaattcccaatttaaacataattagacatgaacacattcaaaactggagcaggttagaaaaatgctaagcaagagcaactgagagaaataaggtagcaacagagtcgcttcgtcgattagaagaaaagagagctcaccgtcgattcgtcgccggagaatgtagcaccggagctcttgataactctcagagtcactggagatttttgagaaatttgtctgcttaggttcggatttgggaaagttttttcaacagaatgaggaaaatatttcttttttaattgggcctgaggcccatatagaggcttttaactttttgagtttaaaataatctcaaacatcatctaaaagctttggctaaagcttaaaaaaaaaagtacgaaaagagtttttttaacaccataaaaacttcattttagaggccagcgacatatgtgatttgacaaatgctagatcttctaggaaattcaaggaaattccagaagtcgacggaatatatttcttctggcgtggaagatctcaaaggcagaacaagttttttgaggattgttgagttctctacaaagtatcttgctagtttcgtttcaataggttctccaacgtactttactcgttccatgttacttctactgcatccttttatctctacaaactcgagcgatgacagtaaacaccgaggcacaaacgagagtcttaattcttttttcggagtccaataacgtaacccctgtaaaacacaaaacaaatgatattggtgtttacatgaggcacaaacgagagtcttaattctcaactgtatgaaacctctaaagagtgaaagacattaccaagattagggacttgagatttggaaagctttcaagaaacgttggcagcgtttccagtgagggtaagaaaatttctacttccaaacaggacaagttgcaaaatttgggtgaaaatggcatggtattcatgatgaacaactactcacagaaaaaaaggaaattggtgagcaaataaaaattcatgaaagagcattatatattatatgattatgatttatgaactagtaaaacatgcatataccgcgaacgcttgggaagagattttcatatcgctgactcccgatatactggtgaaaaaattatgtaccatatctcgcttttgtaagtcgacttcatcatcatcatcattattcttcatatgaaaatagccaagaagattgaccttggttaaagagccagagtttcttatggttttactctcatattgatcagcttcaagattcaaatacttgagtctagtggcatcaatcaaaacctcagacttgtcaagatccaaatactcaacacaaccttctatattgagactggttaatgtctgagattgcactcgtaaaacgtttactttatcatatgccccactcacaaagctcaaatcttcaagaacaggacaagttgagataagagactctagatccgcctcgttagcatatatgttttgttctaagctcattgtcttgagacatggtaaagaaacagactcaaacttacccaagcatacatgatttagtcttaagtaaaggagtgactcacagctataaaggcttaagggtatcacttcaaaacactcacacctcgtaggaccaatctcaacatcaagatgcttaagtttaggcgtagccacaaaatctatccaacgtgtgacacaatcctgatcattctcacccttacgaatgcttagcttgagcttgtgcaagcataacttctgttccctagagaaacctaggaacttgtccacaaagctcacaaaagcattgtaatctgtaaagtcattagagatcaaaaccaacccgggagtcgaaagccatagacttctccatctcttggacaaaacactagtcgtaacagctttctttgtctgaagataaaagagtatctgagttatcaaagagtcaggtaactggcttatcaaatcctctttagcttttgaagaacatacagtacgttcgaggcatgttcgtttcactttcgtttcctccattgaatccgcagtgacagcttcgaatacttaagtgtaagtacgcatgtagcacgaaagtcagaaacagatcacgatgatctcagttttctagcggagaagatgagcagaactgatagggatgactcttttaagggttttgacgttttgagagcgttttaagaagatagagatgtcaagacaagagattgagatgggtcaaggcccaagagcaaaagtttcatctcaaagcccattagtcattcacgacaacagataagacaagaaagatggcttcagagaagggaagagacacaaagaattctcaacatcatccagaactagtagccaaaagctcacaaagacatcataatagagtgcaacaaaatgagaaatccaagtacaatttaagtaatcagctgggaatgctagattgctagtcttaatctgatcacagccccacctaaaacctttcaagccgtcaacaaactacgattcgacatgtgctagatcctctgggcaatgcaaggagatcctttaaaatgtaaaatccatcttcatgcgtggaacacctcaaatgcagaacaagtttttggagaactccagagttttctaaaaagtaccttgctacttccattttagcaggccttccgttgaatttttttatctctacagactcgagtgacgaaaccaaacaccgaggtacggatgagaatattattggctcatcctcctcctgcagataaaattcctacatatagacaacattccaaacaaacaaacaaaaaggaatgaatataagataacacattcctcaaagtattttgagtaaaagctcaagggttgtgcgagtcatcaccaacaccatgacgagtgatttcagattgggacagctctcaagaatggttggcagaatttccagaaagtataaagaaatctcggcttttaaacgggaaaggttgcaaaactgtggcagtgggtcgaagtccttgtaataatagagaaactgcacaccaaaaaaaagaaacatgagttaagcaaaactttcatgaagaacgctagctacatgatatgtatatgtatacctccacaaaatgctgagagatcttcatatcgctaactcccgagatactggttaagaaattacggaccatatttcgtcttggtatgtcaacaacatcagcacaatcattctcattgaagacataaacaacattgaccttggctaaggagcccgaattggttatgattttactccccgatagatcatcttggaatttcaaatacttgagtcgaggtgcatcaatcaaaacccctgagacttttttatcaaaaccatcaacgaagtcatcaccctccccaaaattaaaatctatattaagactggttagtgtcagagagtgcactcgtaggacctttacgttatcttcaaacattctaagaatgatcaaatctttgagaactgggcaagacgagataagtgactctagaaccacatcattggcatatacattttcttctaaacgcatagtctttaaacaaggtaaagacacagcctcaaacttacccaacaatacccgatggagtcttagatttaccagtgtgtcacaaacataaagacttaaaggcatctcctctaaaaacttacgattcacaagacactcaacatcaagatgtttaagtttacgcctaaccacaaagtctatccaccgcgtgacacaaggcagatcattcacagtcttccgactacttagcttaagcttgtccaagcatattttttcttccccagagaaatctatgaacttgttcataaaacccacaaaggcattgtaatcttggaactcttcagagtccaaatccaaccgaggaatcaaaagccagagacttttccacctactggacaaagaactagtcctaacaatatcctttattgggagatacaagagtatctgagttatcagagaatcaggtaatttgcttatcagatcctctccagccatgaagtaagttccctgcgaccgttcgccgtatttcgctttcatatattttaaatagccttcgtaaagcatatttgctcacaaaattgaaccgaagattccacagagacaacctcgaatactaagtatacaacaaggacgcaattcgcacgaattcagacacaaatcatcacattccagtgttaaggcttctaaaatcggagagtagcgaagtagatgaagtcacctgacgggtttttgtgtttcgacgggggaggaagacgcagtcgccgtcaagttctccagaggtaaagcgagagggaggaccggaggaggtctatggatttgcagggtcagatcaattctttcggatttttgcttatcattttccggtttatagtcggtttaaacttaaaccgttaatgagagagatgtttttttttcccctgaattttatttttattcataaccaaaccgcaacaaaaattacataatgggtttacaatcatatgaagcccaaatagagcccaactgattaaaccttgaaggaaaagaaactttatctcccacatacacgtgtcacacaaggagaagtcacatagacatgcgttgtcagaaaacatttggcatttttttttttaacaaggaactccagatttagttagaagtggatatccaatacatcaaactcacatattgccaaaatcttcaacccctctattcattcgtttgtagccgtggggttacattcattcctgttgtttgtcgaaaaattgagatttggcaatatcggataaaatggattgaatatatgataccacagatgattgctaacaatcgaagtttcggttatgtgaatagctttagagaaaacctactcttatttttgtaaattaccaactaaacaaaattaaatcaaattcacaaacaagaagtcatctaatgaaattaaaacaaattcacaaggataagaagttagccacacgccgccataaagacgaaaacggtgccaaatagaaagccgaacaaatctacaactgaaagcagacgatttcggacggttagccagccaaaaagacgctaatttgaaatcgttgttgccggaaagttttgctcaccgctttttctctctaaaaacctaaaaagtgaagagagagaaaatgtcaaaagaagtatgaatgtgtatgaagaatttaaactaaaaaactcttttactcgaatataattatgaaaaaaattgtatacctccttcccttagatcatgacaaaaaaaacctaaaaatcctttggcatattgttagttttctatttataatttttacttggaatttaatttttagaggtttttgaattttccctctagctagtagctaccaacatgatgatacaaaaacctactctaaaaaaaaaatgttttctatacagctaattattactattttaaatattttatacctagtaactaatagaacagtatatcctttactacgataaaaaaaaaagaatatcaatcaaacatctaaacacaaaccgggataggcaagtacaattgtggtaaatacattcactgactgtgtatattaattactataaaatgggtaattgttgattacatctagcaattttgaacccttgcatcaatctaatattctccctcaagaaccaaaaaaacacacacaacaacaacagaaattaaaatctcacaattactgagtctcaaatcccatagctaagtatttatgaaaaaataaaaaaaatcaaatgaacacttggagctccaagtgtggtaaatacattcactgactgtaaattaattactataaaatggataattgttgatgacaacaaggaattttgaacctttgcatcaatctaacacttgtagctcacgcagaatcttgaattctaaatcataaaaacaaaacaaaaagactaacactttcaaaacgaaaaaatacccaaaaaccaaaataaaaaacaaagaacgaaaattaaaatctcacaacaactgaatcacaaatcccatagctatataaataaaacacagaaaaattaaaaataaatcaaaagaacccttggagcttctcctctttcctggtctttgataaaagtcttctcctttcttcctacttgttgttaccggtacgtctctatctcccctatcaattttcctttgtcatttcaatgaaaattgtctttatttctcaagaaaattaataacattctcttttctctctgaaacaacacaactactaactcgggacataagtcccgatccagcccagcccactgatgaagaaagacattgtctgaagaaacaggtagatgaagtaattgttcttcccgtgcacaaagtcatagcatccgcacacgaacaagaaagccgcaaatccaagctccaatgtattcaatctgacacaaataactcataatcatttagtgtgtatccctagtttctaataacaaatatagaattttctatataggaagtaaacataccgatcaggcaatttgaagattcttgggaaccttttgatccctttagtgtttcctttagcgctctgaccgcttccaagcttagcagtcactacccactcgttagcccttcctgcctcaaacagaccaatgagagtggcctttgtccggtgcagcgacatcacattctcgaatagaatccaatagaacagcagatgaattgaccttttgaacaaaatcagaaatagaaaaggatttaaactcagttacgtgacatataagcaaccctatgaaagaaacagagataatgacttgagatacaaggaacagaatataccttggagtaccgacggaattgaggatagtgatgatggatgggatataaaccgaaccccaaatcggaactttaacctccgggacgagaattgtgagaggaagaacaacgcagtagaaacaaaatgtgacccaatgtgcaatgattttcctcacaaagaagaagctgtatatcacgtacactttcttccagaatctcactttctgcgccagatcagtaataggatcagattaaagaagttaaccaaaagaagaaaaagtgtaaatttttgttattattattaccttgtttcttacgatctccataaccattttcctaaagagatttgcaggtccacaagaccatctatgttgctgaaaacggaaggctctaaaagtacttggaagctcacttttcacctatgcaaagaaagtaaaaaggactcatatatttatgatgtataccaatttttcaacaagtaataacaaaatatctttacttcttaaaaaggtaaaatgattataacatataacttgtgaatcagctgtcatgtgtttaatgagagaagtatcttgtgcaccaacttactatttgttatgtgtgtttaatttgttctaactatctaaatattgtattagaaagtaaataaataaaaacctgaaggtcaccgaggtagagaaatttccagccgcgaagacttgctcggacggcgagatccatatcttccacggtggtccgatctttccacccaccagcttcatttatcgccgctattctccatattccggcggttcctataatattatttttgataactttagtacatctacaataatttttaaatgatttatgacaaaaacacatttaagatccgccttccatttgcttccactacaagtcctagtgtaatgaatgtgtccccttacactatctactaaataaaattgaacacatgattttaaaaactaattaaattagattcttcaagcttgcaaatctaacttataagacaaggaatgactataactcctttaagtatatataaatatacacctacttgcttcacatttcagattccccactcctctcgattaatgattgattatatataaattattatgactccttatgattattttattctctagtaacagttgtacactatcataaaaacaaaaataaaataaagttttgggtccacatactatgcttcaattggtcggacaacataccaactacatcaccctaaactctaataatattaccacatcaatagacaacaatatttttactagccaaacacctaaaaaaattagtttatgaaatatttaatgatgtttttagtaatcattactactaaataatgaaatgtttgtgtttaccgttgaagccgaaaaaagcatgtgttgatgaacccacttcttgctcaacagtgaaatggtaatccaatgacatttcttgcattctcgtcaataagcactcatcagaatttactgcaaaagtatacaacaaaggattaaaacattagtccaaaaaacatacaatttaataagacaaacaaagctcaattaaatcttaattatttattagagaatcgtccaaatgtggcactatcaggaagtaacgtccttctcttttgtttttagctttaataaaacaatcatagtcatatagctttctattattaaatttcactaacttggactcatgcttaaaataataaagacaaaatcaaaactatagagtatacactaccaagtgtcggcaagagaaacgcaggtccacagtagactcgatacacaaactgtatactaacaagacttttactaatactgacaaagatgggcctcacacttagcatttaaagaaaggcaaagagcacgtggaatgtatcagagacccgacaatttctaaagacgaccagtttacaaacccgaacccgattcattaaaccgaatttaaaccgattcgattttcattgaccgacggatccgaaattccggagtggataagaaacgtgacatgacgtcagcataatttatccgttgacccggaattccgcaactaatccgacccggttgaattacaaagacaagagttggtttttaatccagtgtagtaaggtgtacctaactctaatgtaaaccaaggacaacggtttttacacgtggcttattttagttggttaataagacccactacactagtgcagctactccgccgacacaaacagaactaaccctacttcttcaatcagacaatatatattgaggaaacaataatactttcatatgaaacgaaaattacaaaattgaagaaaaagaccatttcaaaaagccaaaacataaaggtaataaataaggaaaaaaaaagtatgcaagaaaaagcaaaagtcgataaaacataaaaataatattatttatatgaaaaaacagtgaagggcatataccaccgacaccactaatgtagctaacaaaaaccaaaaccacgagctcacatttaatgatctaaacaacattaaatttttcatagaacataaacaaagacaccgattcagtagtatttgaccctgacacttgcacaacattatcataagtcaattttctcatttttctatcatatcaaccaccactcttattagttagatcaatcaacaagctatttcaattactatcaaatttaagattatattgaaataaatgattaatgaaatgattaccgaaccgccatcgagcctgaaccaaggcaatgttgggattgtgcatgaggaaaggaatgctacggcgaagaaaatcaggttcgggctgaaaatcggcgtcgaagatgacaacatactcgcaatgcttgacataactacgtttgagtccttcctttaaagcaccggctttgtaaccaactctattctctcttatttgatacctaatattgattcctttacttgcccatctttgacactccacttccaccatttgctgcacattttgagtatctcatttaaatcacacatcaaaaaaaaaatctatctattaatgttacaaatttattaatatttccccttttctttcttacccacaggaaaatattacatctcttttaaataaaggaaaatatcttttgaaaaaaatggtaaaaaatctaatttgattggaggaaaataatgcacctatatttttgtgaaatggactaagtaataataataataccttaacagtaggatctgtagagtcatctaacacttgaatcacgagacgatcggacggccaggaaagtccacacgccgctcctattgatagcttataaacctgcacggcaaaaatcacggggaagcaaaagaaatctctttgtcaaactttttcacttttagtccactaattaatgatttactacgagttaacccctaaactataggtttaatcataaaaacccaaaatcacagagaacaataaataaatatgcgtcacgactctcgccgtttcgggatttggaacggcggaggaatatgaatacgtggggaaaagttatcttccgtaaaatctgagattacttttctcgaaaaacttataactttaacgagaaacagagaaaaacagaggaaaaacagagcaatgaacagagaaccgacctctcgttcgttgaacatggggatttgtacgaggacgacggggaaattggagctaccaagctcttcatcatcgtgaatgggctcgaacttgtaacgtttgtctggttttttccagaagagtttgacgaggacgatgacgattcccatgtaaaccctctcacataaaagcatgacagacataagcaaacagatgtaaacagctaattgaagaagagggacaatcactggtgcttttacaagctcccagatcatgcctagttggcctgtgatctccatcctcacgccgtcgaatgtctccggcaacacaaactttggtgatacaccgtccatttttccttctctcttctcttctcttagagtgtaacaatggttggtgtgtttctctctctacgatgaggttttggtgtaatgggtttatgagatgaggcagagagagagagattgccttgagaaaaatggaggcttttctctctctacagttctaaagagagaggaaacttaggaagagagagagccagaaggagaaatgtggtttaagggagaagaggaagagaaggataaacgaggaatataaatggtgataattttgtttttttactttattttatttatttgtaagattgttttcctttttttgattgattttttatttagattttttagagagtaataaaggttaaaaggaaataaaaggaagaaagaaagaaaaaatacatttggtttgtttgtgtctttatgagattctattttttcagttaatgaaatttctggtaaaaaacaacagaggagattttggtttttcagtttctgtgttttgttatttcagaatctgtgcctgcccaatgggaagagaagggagagagatatagatttctaatgaatttattatcctaatgatatccttttatacacagttgaataatgattagtgattagtgattttatgcgtttttttttaactttttaccatttatgggattttggattttgcagctttttataacaatttacttattataggtcaactttctagaactcattttgtcaaccttgtgaattcactttaactccttttttttttttgggattagtcaatttactctcatgaaaataattttaagtttgatcatcctttttttgggattagtcaactttttttggttaagtttagatcattgtttttcttacaaaaataaatgaaagtaattttaagtttgatttgtacctataaaaaaaaaagaattaacatcatatgaaacaacatgttactagatctatcatataaatctatatcttacatatagatatagattttcatcttagacataaaaattcatatatatatatatataaaatgccgtttatccataggtgttaataaaatcatcaaaacacaatacattgttattagaatattggtgtggtatcttttcttaatatttcaatactttaattaggaaaatacatatgtttgatgagagaaagatcaacctcaacgggagaaaaacattagacttatccaaatttgtatactttataactgatttggatcccatatgtggcacaatttggttggtgaatgtctttgtattagacataattaatttctttataaaacaatttgacacattttttcaaacatttgaatttttagactctctattttggatctaccattggacatactttaaatatagatctctttcaaatgtctaaattgtaaatttatttttattaaaatgataaagcttgtttggatccttatttttggatctattgttgtggatgctctaaggcagaacacaatctaatatactctttagcaatgataaatgtgtttaggagatggaatggtagtggttcaaacccttttgggaggagaagtatttctaaaagaaaaggactaaatagtggcgtcggacctaggaagaataaggtcgaagcccaaattcgcaataaaagaaaaaaaaaatctatatacgtatagtgtttatcataacatgcatgagtgcagactgcagaccaagttgccagtttccatggatcggatattgccagttgcaccccatactagtattattttgagcgttctgatattttacttaggtttgtgtattttttgtatgcatttgagtatagagttatttgctgttatgatattttatctaccaaaataatcctacttgattatataccgttgttgaattgacgaattttcagtacccataatgaaaaaaatacaatgttgaggaagtctttaatgtcactggtttaagtaccgacataatgttgacgtattaacatggagtggtcttttatgtgaaaaaaaaatccgagattcaattaaaagttaagacttcttggttattcagagaaaaaccatgaatataaagttacattttctctattcatttagagcgatttacaactttaaaagatacaaaaaatgctcgttcttttaatattgaacaagttttcgaaagagtttagaaaacaatacaaaaacgtttctgtaaaagagaaaccaatctgtttttttttttttttgagtgcaaccaatctagctttacatacattaaaaataatatatacattgagaattcgtctatgatatttaatgtttaagtgagagttatatttctataaataataataagacattgctttgactagaaggccttgcgctgccacaactacgagcaattatgaagggttaggttcgtccaaagtggtatcatggttcgtaattacataagtagcctcactatagttaccttgtgtcttttaatcggactattactccactttttcaggtgatgcttcaactgttttcacgataaagttgtgtcattaattttttttgcttcttttatctcagaaaagacatataacacgaaatttgttcgataggatgattttaaaagtggctcagcaaggcaacaatctcgtgtttgagtgatgactaggataagttggttcttaaaattttcatttcttttctgtagatataatcttagaagtaaggtcatgtctacgttaattagctaaatgattctttagttttatgtatgaaattttggaaattagcatgcgtaactgactttcttttacatgacttttgaccatttctagttacgcgaatttaatattcaacactacatactatactacaaaaatttaacagtgtcagccatatgcaccataaaaattcaccttacattatatcttgatcttgacctttcgaccttgaatttgaccaagcctttaaaacctataatttgttcatggatattttggttcgaagttactaactcctggatgtaaaaagagggttactaatactaactccttgatcggccatgaagaagataatattaggtatatacatatatttaatttacaccaaccaccacaatgagaaagtacatagcattaacataaatggtgatgtagacaaatctaacataattcgtatagtctatacagtttataaagaaactaatttggtctctggttaaacttattgtatactagattggatttattaggagtgtagcgagtgttaaatgggctaaacctattttgcaaacagggtaatactgtttgaaaattctaattaatgctctagcggccaatgattgtggttttagcaaagatataggagcttaacatttcattttttttcttagttcgaaaagaaaaaaactattaatgaataattagttttcatagaaagtgggcgttaatcctacttactaaattgatactttgatactgtaaaaaaatgtttatatatcttcactttaaactctagtgttactttacagaaaccgggtattgaattattgatagtacgtcgtctatgtgatcaaactcgttttgaggacattccctcaaagttctacaaaagcatattgtgcaagccgaaactttggacttgacttttttaaatgaaattgatatcgaaaacatattatcttttccccgagattgagccaaataatgaaataactaaaacaaacaataatcccctgcgttaatcatgtcgaatgtggattatcatcactattaactaactattcattggggtttaaaagttaattcataagagatagacaaagaaaagggagtcaaaaatcgaagaaaacagaaatcgttataagtttctgtttgtttgtaaagtaaataataatatagttcagtttataaaatatcaacttttacctttttaacgttgcaaatggcaaaccttccatagattcatgacgatgtgttagttcaaacataagcaaattaactcctcttttgtgtccgaaagctcctcaatctaaggacatatgtttgtatgcagattgcagataatgttattttcttacttcaagaaattaaggtttctttgacaaataagtgtaatggcgacatataacatagaatattaattttgtcgtctcgtgtcgacgacatatcgatctgttactttaagattttcttccgatttaagctcatatatatacatattattgtctatatataagaatttaaaatttacacataatttcaagacagtttaagaaatcgttttaacatgcatccggttcataaattttacacaagtttaaattatactatacaaaatattacttggaaaaaatgtacattactgtatatcgtattattcgacaacaaccaaaaaaaatcctaatctctctagtggaaaaatcaaattgacttcgcttttgctttcaagttgatttattttatttttgtttgtattaggacactataatagaatatgtttgaaaatctaaaccaattcattattcatcactatacgtctttccttttcctcctccattcaaggccttgattagtgaaaatctgaaccaattcatcactatacgtcttttacttttctaggtgatttatccacgcattaatacttggaattgttttgattagcctcacgtaaattttagttttcaatgcggaataataaacaaacctctcattttagctataatattagttttagtgtgatcaagccacatataaaacatattggattagtttagtagtggttcaggttgatgtttattggatgggtaagttatgactcaattacttgtgtagtgtacagatggtttttagatattttagagactaaataacactcacatacacgttgttacctaacttgagaacaaatcgttaccctagaagcagagaatttagcagccgatccatttgtgtctgtggatattggttttagtacaataattgacacgttatacgacttcaaatcaatcacttcgtaattttgtatcgaagatgacaaagccacggtatcataaaatttgcaataaaagtccctaaaatctgttataaatcagtatagtttctaacagtacaaagtataaagactcctaatattttatcttaacaaaggaaaagaagatcacaggaacatgttatgtaaaagtgtcacattttctagatttttaaagtaatccttaagccttttcactgtgcaaatttgtcatattgagttaactatataatagtataaagttacagttcattataaatgaaaaagtacaaaaaacaatctgatttccattacaaaacaacaaaacccagataggcttatggtacacttgggaactctcactgcacattccccaaaactgtgacaattgtccatcatatctcttgaaaagaacaaaacccgtttttagatgcgttataatctctgattctccttgcatatagtgtgacaagtttcccatatatgtagaattgtatgatcgacttcaggcttgagaacagtttctatagtttcaggtaaataacatcttgagttcctctatacgtgcacttcgtacttcttgatcggttaaagccccagagatcattctctgcttcctcgcctgaaccgcctccattctctcttcaaccgttccctaggattcacaaaggcaagacatacaagtttctaatgatcattactcagcaacaacattttctgattttggaatagtttcagtgattggtctttatatggttaatggggactaactgctgagaaagaagagggtaccttaacgatgaatcttctgattttgacttccttagtttgccctatacgatgaatacgcataacagcttgttcctctaccgctgggttccaccatggatcctataggacataacttggttttctttacaactgaaacttctttaaaacctattttgtattgtgcagtactcattcacaagcttttgaaacaaaaggtggcatgaactactactcgattttcatattttggatgagctattacatggtctaaatcctatagaaactgatatgatctttcatagatatctatagatattccataccatgacaaaagcattggacgcagctgttagatttatcccaacgccaccagcttttagagacatcaacagtacctatccaacaattgaaaaggagactttttaacttcaatttcgaaactagaaagtataagtattgaacattgcaatgtaatgcgactgcaccaaccaggatactgccatcttcggaaaattctttaaggaccttctctcgttgctgctgacttagcgtgccatcaagacggacaaatgaaaagttattcctggagataaaattgtgctataatttagattcttaaaaacaatttattctcataactaccatagcaagccaacaatggtataccgagagaggggaatttggaggagatcgaggaaagcggtccactggctaaagagaatgctcttagagcctgaagaacgaagaccttcaagctcttccagaagagcagtgattttcgatgattccacccaattcttttccacgtcaacctggaatctactttcggttggtgctgtgatgagttcttgtttgcttacagtgttcctgaaaaaaacgattcatcattcattatttgccaaattagaccttactcagacactcattggaatcaacaacagaagaaaactagtaatcgcaggaacaacttcaagatacctacacacaggacataacccagaagtagaatttctccaacttgccaagagacactcacgacataatctatgagcacatggcgttaatacagcatcctcaagtgcttcaaggcatattggacactctccttgctctcctttgcgcagttcctctaccacctcctgaacaaaagcctctgacggtacatcttttccttccctttctaagccagaagactttccactaaggaaacgtttagaaagcttattcagatcagagtattccgctgtatcccctcgactggatgcaagaaaaacaagagactgttataagaaatatggcaattgcgtcaacaaaatgtcaaacagaaacaagggctacggatgcatgtttcttataccaaattgccattatctacgatatgttattggatattttatacaacgtcatgcaacagattaagtagccatggaagttaaacccagcaatgtgtatctatactaaataaaaagccagtaaaagccacacctcattactaaaaatgggtgatcacaacattgtcgaagacgcaaaagcagttccaggatcgaagcatagttatgaagaactttgccttgttcaacaaattgatcaaatttgacctgaaaaagatccgtcagcatcttcagtataaggcatcttaataactaaagttcgagtaaataatcctaaggaaaacaataccttggatcttttaaatagcgcgtcgtagaaatccctctcagactccgaaagttcacagtaaatgacccgtgcatcagcagggggtagaacaagaatcggcctaaaataaacaaacaagcttcaaattaaccgaggaaactcaaaggaaaatattatgttttataagcacaggaagttatacagtaatctattatttgtagtattcctaccttccttctcggtctgtgctagactttgttctcctaagcatgataggttttaagatagactgcactagctttaaccctctctcatcaccctcttcaaatggcttttggacaagtttattccacctaagaataaaatatgttccaaattaaaaagcttcaagtaattccataccaaacgttatgtgtttccaaccaaagatagataaggacccttaccatgcccaagttccccatggttcaatcctcaaaaaccgtagaaggctgtataaatcctccagattgttctgtcaataagataacatgtgaaatgatcacaaagttccaaataggacaaaaaattactattcaccatccatttgaatgaaccaagatatcatgccagcagacatatggataccaaaattgcaagccatatgaaataaatcttcaaagacaactttgtgagataaagtcgagacttgtgtacaataaatcatgcacaacaagttgatatccttctaacagagatttagaccattcgaaactcaggtgaataacaaatgtccaactactaaaattcttccatagatagaatggcagtgtcctaataaagtttggtctataggacggtcaagaacaaagattttctttctaaaccctagacaaaaagaccaatcacctgaataggagtacccgtaagacaccaacgcctatcagcaaccagagctgcagcagccaaggaaatttggctttttgagtttttgatggtatgtgcctcgtcaagaacaatcctaaaccatcgaactgcataaattccttcatggtctgctgagttctaagaagaagaaaaacgagagaagataagaaaatgttcatgtgatgcttttataaactatatacatggaataatccatgacccgaagactcttgtatgaaagatacctcttgcgagaattcggatgttagaactccatatgtggtgattaccacatcactctgggaaagaagttttgcatccttcggcctgctttgcccatagtgaacatagacagatagagacccaggctttgcatgcatttcaatctctgtctgatcataaagcaggagcaagaaaatattagctgacacaaggaaagacaaagaacaattaacaactttgacggataaccaaactatagtgtgcacgtgcattaagcatggaataccttccactgtcctaaaagtgtcatcggacatacaatcaggttaccaccattttgaagtacacttttttgttcaagaagcctcttatcaaagcctagaaatttggttgccttcaccgggggactagtgagatcatctacagaactgctgatcactttgtctccttcatagttggggcatagaaacccagttgatgcagctttccaagaatgggcaagcaaaagggatatggtcattacagtctttccaagacccattgcgtctgctaatatctacaaaagttttaggatataatattattacaaaacagctatataataaagtgacaaaatctaaacaataaatgaaagaaatttttataggtggggtattgagatcatactcctcctcttgccatttgaagtgtgctagggaagtgtattgtagcatcaccagtaaaagaattcaggtagacaaccagttccctcctattgacataaaacagatagtaaatatcttatctgactcgcactaaagttcgaaggcaatagaaatatcactcacttgtctgctaaacagtatgcttcccaacacgggtgaagcattgttgctgcctcatcagtgcaatttcctttctccagttgggtcatccaatgaagtgcctgcttttggtatggacgaagctcacacagaagtgtatgtggagtttccatttcctgttgcaaaaattttcatgcaattttccaaaggaaatttccagtgttggatataagtaagcaagaagtcttgaaaatgagaatacctttaatccagaactgtccccaacaccaacaatgttatcaagatcaccatcgctgatacactgctcattttcatctccgtttgcatcttgattcatattcttgaccttgtttaattgaagcaacgaagtaggaatagcagaaccatcctatttccatagggcagagagcaaatgacaaattttacaggcaagaagtcaaattttaagatgctaatataataagtaatatttaccttggaactcaaaggtcgcttcttagagtaaaaatcctctggagtaaactctgcctaaatatgatgaagaatggaaaaatttcttcgtcatctcaagattattcagtcacatcatatgagaagtatatgggaactacaaactgcaatctataaaagaatccgcatatcaagttataggcaaggaataaccattaccttcttaaaggggatcaaaccgagtaaccgaaagagatttgggagaggatggaacattgattcctctgccgtattactagctgtcttaaatgaagtcgcactatgcttttgaaacatggaactattaatgtacacgctgtttcaaaaacaaactcacaccacttcaaacactaatgcatctatcctgaaattgtaaacgggaacacaaaagttttgtatgcataccttacagacagaagaattgtatccatgatgctcaaagcttcaggcgccgacttgcaactgccttctatcctaattttcttgtctctcacaagtggtagaagacaccgagcccactcgtttggtattctaccaatctaccacaagagcccatcatagttagttaacaattcccatctaacaaacttaacatagcaaataaaaaagatgtgaaacacacctctcctgaatcctttgtagagaacctaacgatatcagaagcaccacgcaaagctggccttccccgcccaaaaccgcgcttcccaggcgtagtctcaggctttaatcctttactatgcggaaacgtgaacaccaattcatcaccagacttcaatttccttcctttacatgtcgataacccagccaattcagaacaaccaacaaaccaccactcattccctgaaacactctcttctcctccaccattaacactctcattttcttcctccacgcgatgattcgctccaacacttccgctgtcaccaaaagtacagccctttaatccactatcaactcgcttccctccattagagccgctcggggtaggagtggctacatcaggtttggcgaaacttggagtgtcgaagattatattgatagcagccgttggatcatgattcgccatgtgtaaagccctgattatatccatatctgagtaatcggaacccacgactgatctgacggtggaaacaagatcgtctgagactttcgttcccatttccaaaaccctaatcctacaattttccagggaaattttgaaactttactgaaaattcagtgagcttgtggctaaagaacgccggaaaaagaaaaccccaatgtagtacagtggcgaattatagaaattgaagtagatcgacgacgacggcgtacgaaatctgccggacccgagaaacgcgcgtaaattagcgacgagtctctcaaattcccgccattatattgttttttttattcaagtgatgaaaatagaaaggtaaattcaaaaacggtgacgttttaaaatccctaacgggtctagatccgggtaacccgcatcccgagttgaactcagtttaacaattagaccacaaaaatctgccattaactcagaagtgagaagtgtagtagaaccattcgacacgattgaaaaagctcatcttttttatttctatgtctctctcttttggttacgtaagctctctgtccatatgcttcattgatggtggtggttatcaaaatctagcaaggttttagcttcaattctgtccatatgtttatccatttccaagctcagacgtgaaaagatttcagatttatcgctggatcacggctttgatttcttttgcttcagctttgaatttgatttcttttgcttcagatttatcggtggatcttagattttgatgtgggtatatggttcgattttataaaaagaagttagatttttggaatcatagaaagggataaacgagaattgaaatctggggattgatttggatctgatggaaggaaaggtggctaaacctagaggtagaccaaggaaacgccccagaccagaggatcttaatggggtatctaatcgagggaagaggccggttttcgaggtgaaagtggctgtacctagatctcttcttggtcgttatgtgttgaaagatgttgatgacagtggagtttttcttgggaagatagtttcttacaatactgggttgtacagagttgaatatgaggatggtgattttgaggatttggaaacttgttatcttcgccagttaattattggggatagttactttgatgatgaattacgtgctagaaggagtaaattagacgactttattctgaagaaggacgaaaagaagaaaacagattgcctgaagaacaaaggagttgaggtgcccacatgtaatagcccaagttctgtggcagaagttgaaagtggttattcatcttgtggtttgcctgagtgtgaagatgacatagatccagatttcgaaagtatgtctcctcttgttccaccagtggagttgccttcttcatcaggaacaattggtatccctgaggaggctgtggtgtatctattatctgtatatgggttcttaagatcattcagtgttcagttatatatctgcccatttggattggatgattttgtgggagctttaaattttttaggacctaattctttgttggatgccgttcatgttgccttgatgcgggcactgaaaggtcatcttgagagactctcctcagaagggtctgaagtggcttcaaaatgcttgaggtaagcacatacaactcttgtcatttacagttttcaacagatatttctttgtttcttcttggagatgtttctagttaactttcatatattccgagttatttctgtgaaacagtaaaattaatttgttggatatctgaatttcaaggaagcagaactgctgacattatttttcaagctagtaaaaatatacattgttatcttatgtatgcatacatgcaacaaaccttttataacagctgggagaaaaaggcctatggctgtacagggactgcaatataagcctcttattcatagtttaggtgaaacttgttttaggtctcccattatcccatattttagtggataacaattcgggggttttgttgcattgccatctgcaggtgcattgattggagcttgctcgatgcgctaacttggcctgtttatttggttcagtactttgctgccatgggacatgcaagtgggcctctctggagattttttaatgaatttgttgtggagaaagaatattgctcgtcacctgtagtaatgaagttgaagatcctgcaaattctgtgtgatgacgtctttgatgtagcagatttaagagctgaaattgataacagagaagaatctgaagttggatttgatactgatggagtaactgctgaacttcctgaaaatggacctagaagggtccaccccagatttgctaaaacctcagcttccaaggagaaagagcttagtgaatttgttgcagtgaaccatgggataagttcattgagcgactcaaaaaattggagttcaagatacactgatggtggtcctaatggagatagcccagatctggatgcaaacagtgatgaatgtaggctctgtggcatggatggaacgttgctgtgttgtgatggatgccctttagcatatcattcaagatgcattggtgtggtcaaaatgtatataccagatgggccgtggtattgtccagaatgcactataaaaaaaatggggccaactgttgtttataaaacgtcactcaggggagcagtgtattttggagtggatccacatgggcgactctttttgggtacatgcaatctcttactggtgtatgttttcgacgccttatttcatttcagatactttgcttttcaaatttatggaaatagagttgatctctcagttctatatctcacggaaagttgtttttgcactttatactttaataattctcactcatcagcttgtctagattttacttatattgcatgtattattttttgtgtggatgctgatgaatatttcgcttatatcacaggcttaaaattaatgtccatgcggatgcagatatcaaatattacaatgtcaccgacattccaaaagttgtcctggtacttttgtctgcaacgaaccatagactggaatatctgtatatatgcaaagcgatctcacaatactgggatctgcctggaggtgtgatctcttatctgagaacagtggagactgatttatctcacatgcaaaaagaagggggcgacgaggtgtctgacataggtgagccagatagtgcaaatagttccagtggaaatcttattcaaaatgcggttaggctccacccatctgcctcaggctatactggtggtcctgttttagcaagatcaagtggagcgcaagagaagaatttggttgcagtcagtacacagaagggtttatcatttaaacctcattcttacattaatcattacacaaatggagaattggctgcatcagctgctgctactttggctatcctaatgtcagaggaaacccatgaacctgatctacacaaatttagtaatgccaagaaagctgcatcaagtaacatcttgctacagatgaaagcattttcgatagtagcctcgagtttcttctggccaagtcctgataagaaggaaattaccagagaaaggtgtggatggtgtcattcttgcaaactcacatcagcaagtaggagaggatgcatgttaaatgcagctgtaacaggggccaccaagagtgctatgaaaatctacagtggcctttttcctctaaagaacggggagggggtactttctaggatcgcagcatatgccctatatctcgaggaaagcttacgtggtctcattgcggggccatttcttagtgagagtcttaggtaccagtggcgtaagaagttagaggaagcttcaacatgcaaagcgatgaaagccctcctgcttgaagtaagtaaaactttttcattctaaaactgttcggttcttattcacgtttttttgctattaaaaataattgtactttttcttgtcatttgcactgttcagatttgatgttgtcaactatatatagtgatatctttggtttgtcactatatgtatcgtgttttcattggcatgatatggttcattttgcttgttcacagcttgaggaaaatatttgcagtattgctctgtcaagcgactggcttaaactaatggacgattggttgatagaactttctatctttcaaagcgctccagttactgttggggccacacagaaacgtagacctggtaggaggaagcagaggaaccaggctgaaaatacggcccaaggttctgatgatgatagctttacttggtggcgaggggggaagttatcaaaaattatactcctcaaggcagtcttgtcgaagcctaagataaagaaagcagcttggcaaggtaaacctgattggttatgctttttgcgcttgtgaacaattctcacgtatgcattcttatagttttttcttttttgatacttcgaccggagatatcttatttgagttttactctggggatagtgctaatttgttttgttttttttattccattaggtggtacgaaaaagtttcctgaatttaattatggtgatggttcttacattcctaaaagaagcaggcggtctatttggaaagccgcagttgaaagtagcaaaaacatttctcagcttgctcttcaggtttgtcttctattatcaatgcttattcaaatgattctgtgtatatgattgttttttaatcccctgaaattcaactgaattggggccaggttagatacctggatatgaatataagatggagtgaacttgtacgcccagagcaaaacgtgcaagatgttaaaggtccagagacagaggccactattttcaggaacgctagtatttgtgtcaagaagattatagataacaaggttagatacggagttgtctttgggaatcaaaagcatcttccatcccgtgtcatgaagaatgtcattgaagtcgagaaatctgaagatagaaacgaaaagtattggtttcatgaagcacgcgttcccttatatttgatcaaagaatatgaagaaagtttgcatagggtggtacacataccttttatcaagaagccatcaagaaaaatatcaaagctccagaaaaggcaactaaaagcttctcgagcaaacatattttcttatctagcctctcggagggacaacacggagaagtgttcttgtgcatcatgccatctcgatgtttttttgaggtattattttagctttcttcacctttcaagatgcttcttaaaaaatctgatgtagctcatttatttgtgttcccgtcctctacatgtctatagggattcaataacatgcagtacttgccaaggtacactacactcgcttgctgatggatttgacaacatggcaatattacgtttgcttatttgggaatttatctgaataattgtggatttactctttgcctctcaggtttctgtcacaaggaatgtactatgagttcacaacacacaactgggcagttggaaattttggtaacctgcaaacggtgctaccttgcaagagcacgttcacaaatcaatatcaatcacagacaaccaacaacacccagtgtcctgatcaacggtcaacttcaaaatgcagccacttcaaacacgaagacacagattaagcgtcttaatcaacagttaccatcttccaaaacaggcgacaatgcttcaggagttaaacaaatcactccggatttcaatttggcaccgaaaagtaaacacaagacattgtcttggggagtcatatggaggaaaaagaacttggcagacacaggtgttagtttcagacatgaaaatgttatgttggctggacgatctgatcagccgaatctgcaaccagtttgctggatctgcaaattgccgtataatcctggcctaacatatattcactgtacaagttgtgacagtaagaaaatttttactcactctaaattctatactgaattgtacatttcgtcaatgccaccattttgctcttataattctaatcctagatctctatgcagtgtggtaccacatcgaagcggtcaagctcgaggagtcaaaaattcctgaagtggttgggttcaagtgttgcagatgtcgtcgtatacgatcaccagattgcccttacatggatcccaaactcaaggaacagaagcagatgaaacaagtattcttcaggaggcagaagcatgggcaaggaaataccggaattgattcggattccgaaagaatgtctgaaccgaaagactcgttgccctctactccctcatttctctctgaagatacgtttgttccagaggatgatcctctcttggtgtcagtttcaaaagtcgaacaaattacaccaaatagtttggatgtggaatggaacgaggatggttgtgtgccaggaccacagaagctacaagtgaggagaccagtaaaacgtgaagacacggacgggaataataatctttcttataccgagtttacaatgcatcccgaatcaatgcctgttgtgaaaccagaaatggagccaacatttcctgtcatggaatgggatgcatctggcaatagcaacaacatgaatgaaggcgagcttatgtttgactacgaagacatggaattcgaacctcaaacatatttctcgctgaccgagttgctcacaacagatgatagtggccagtgcgatggatatggagatgacaaggatgcttcaggaatcacggataacccaaaccctcaggttgaggcaatggaacagtgcacgtcatttctctatgaaaatacaattccatgtcagatatgcaagcatgtggagccaggacctgacctcacatgtcagacttgtaatatgacaatacattctcactgttctccatgggaggaggaatctacgtgcataggaggtagctggagatgtggtcgttgccgtgagtggctgtagctgccaacttttctcctgccaaagttaaggggttcctctcaattcttttttgtttttataggctaggccccatctgtgctgctatgttggggttttcaatgaaagcaaagaatatgtgttgtcgatagaagaagtaaaattaaatttgtatgaagaataatttgatgttctcattgcaatggcagaagataagctcgttttgttcttgttgctgcataaggagtgtctgaattcctttaatgcgctttttgcttgggattgagattatatatttattccttgcgtcttctgtgtcttttgcaaaaccaagtgttgcgtgtgcatgctgagtcaggtgaaaacattaacatatatgagatacagcaaccaacagcatcaatcaccgtaagcatccatagatagagaattgatggtgatgatgaatagatagatataccttgagtgaggcgcgaattcgctgaatgcaagttgtaagaatcaatgaataagccggcaaaaattacaagaacgacaaaggtttgcaaaaataataacctgagtttcagagtcaggtaagggtaggttatcagaattatcactttgaagctccttggcctgcttaatctgcaatcgccattgcatatccttatagaaattgttagtccacagtccaaacattcattggacgaatggggcgggaaagagcatgaccacggatagttagatggcaaagcctccaaaacacttccgggacggtgtgtaaacccttgaccacgatttagacttgtgagatttgagagaattattttagattttagaaattagaaacttaaaaaaattgagatgttttttaatataacctaaaatgttacaccgtgggtaaaatctagtatgaaaaaaaaaaagttgcgtgttctgttaatattgtttgttttgttaataataatgtttactatttttaaaattgagatcttgaatggacatgttacattcttaagtttttgcagatgtttcttgtttctatttttgccgttttcttctttttacactcaaccggtcgatctataaattttcaaatctactgtggcaagtgaagcggttgtgtaacttttccagttttctccactcgtgttcaagaccaaatctattcgagatcctattagtttttgctttctcccaattggatcttcgttgagtatatttcggcgaataactaatggttccaaaatctcaagaaaggagtaagaaagtctaagaagtctaacaagtcaagacaattatgatctcaaaaaagaactaatgaataggagtaatgacaaattagtaaaaatttaaattattgcggttttagtttagattttcgagtgtgctctaaaactgtctcctttgttagggctattttctcttgtattttcgagtgtgctcttaaactgaccctttttgccgttttagtttccgaacttattataatttttagcagacatgtaattttaccaatttctaatgactcaaaattaattaaccagttgctaattttatatctataaaaaatacaacaggtctgaatataaataatatcagtgaacatttgacatcatcaaatttgatagtgaaaaatgctaaagaagaacaggttcagacaatgaaagcggtcatgcctcatctgctgcacatttacaaacaattgcatggattttaccggttttttgaaataaaattgtgatttccgaaatcattataagagattgatttcatctctagaatatatcacctcaaattagttcaggtttttacaagtgaaatgctatgcgtttgggatgtgtttttgcaatttccccccgttatgacttagattagactctctcaacacgaaggctggcgcaaaaaaagaccccatcagataaaataattcatcgagaaacatattgaaaatatacaggcacaagaacacgctgatacaacccctgatgacctcacaatacaaatgttcagaatgaatgcaaaatttcataattaactcaactcgcccgctttggatataatcataactagctttcctattaaacccttcccctctccaccccccttggctctacatttactctcccatcattccatattttctccattacattctacaataaccgaaaaaaacaaacttttcgacatgtgcaagtaagtaaatctcttaccccaatgaatttaaagtaagccagcgagcatagctcctggatcatcagctaaagccgctgggcttggcggttgagctacaggtggtgctggacctgctgctggaactaaagctcgagatcccattgggacagtaattagttgttccttgataaattctttcaacctgtggataaaagaggtcaacaaatgcaaaaaaaaaaaaaaaaaaacacatgttcgaggttgggtttgtgctaagaggcagagatatcatactcaaatgtaagggtaggatctcccgtgcctactgtcattcgcaattgggttctgtccgctgggtctgtttctattcttgcctgacaatagcaaaccacggacaatgtcacacaacagacaggcttttgagaacttttgggagtgcagcatcacgttattactataagtctcaagaaattttaggaattggaagagcggcaagtgccaaaaccaggaagtaaaacttggttatgatctcaccaaacagagaatggctcctgtactttcagagtagaaggttgtacttgccactagattattagggtttggatcctacaacagaaaacgatacaagtttaagtttgaagtatacatgtgtgcaacaagcatgaggaatgagatcgtaaacaaatacttacaagcccagggcatatcgtcacatgaaaactgttgaacagatttgccatttccggaagagctagaggtcttacacctctaacctgaaagaagttgcagattcatattatataacacataaaactaacgccgcattaacgagcatatgtagaagtgttgaaaattctctataagtgttggggagaaagctaattcactaatttctttgaataaaatattcttagaagaattctgcgctactcaaatacttttaatttgatatttgatcagagaagctgtggagatacataccacttcctgaagtttcaagggtggacctgagattgctctccattgcgggaagaactcttcagatgtcaattgtagaggttgaagaaacttatttaaggttgctgggatc

SEQ ID NO: 722 - DNA, 13874 bp, Arabidopsis thaliana
cgtaatttggcactgacctataaaagattcagcatgtcaggtacactagataaattattcaccaaaataagctaaggacggttgcagtaagtaccacgtttgcaccaaacttgtaagagaaatccaaaaccgcaacatccctgctagggcggatgttcatcacttcaagtggagattgtacctatgaccatgaaagaaattgcaacacttactaaagtacgcagaaatgagtagaaattgaccgattgtgtggtaaaactgaaaacaaatcaaccacaaaagtacctgtgctcgaggaggaattgtatcaggtactggagacagatccagtcttaagtgggcagggggtagtatcagagcttgaactgatgtaagtggagaagtattcttgtttcccatgaagagaacaagtctaccatggtgtcctctccattcagctttgatgccaatctgaggaatacaaacaatcaacaaaatggggaacataagaaagctcggaggcttgtctgctgcatacttgaataaataaaagcacaaactagaaaaaaacaaacctggatatgaggatcctcgtataagacaccactgtctttcaaacataaagcatgaaatctctcagcaatatttccgataagctgtaaaagaaaacaaaacagtataagaaaaaaattcaagcatgcaaatataaaaatggtacggtttcttttattatggatcttgaattgtgaaacagaacatctcaggtagcattccacctaagtaaacgttatataccatttccaactaatagatacaaaaagacgaaacagaaaaaaatatggctataggtaaaaaaaaaaaaagggaaataatgagctagcaaaagtagaagtataatgctaaaacctactatgccaaagaaagtaaaggaataggaaaagattacctccactgtattggtttgctcttcaacaggtacaatggcggaaccatcaacttcatctggaactccttctgcccctacgggaccatgttgttcatttgagacagctccaggtggagcctctattgcaagaggaccgagtaggtcactaaggagatcaggtgatggagtttgtggatctatattacttaaagttccattgggatgtgagagagatcgagccactgactcagggtcctgctagacatgcaatgaaaaacagactgtcagagataataagatagaagtatgtactatataaaggcaagcacatcaaagatgtctcgtcaattggggcctagaaagagaagaactcaccgtgcttccacttaaaattggaaccttcaaaggtggtggtgccccattaacaggctgttggtcagccaaaaccatagcatttgaaggctgttgttgtgctctaagtttgatggcactctggtctgcggtatcttcaacgttttctgcctttttaatcaatgaagactatggaagagacacggaaaaaaaatccagcatcaaagtcgtttagcacaaacttcccgtcaaagtaactttcatagaatcataaaataattttacaaacctggcgctccggaaattttggcatctcagccaatacatccataaaggcaggcccttttttactcaattcaaaatattcaactgccctctgttgtatctccacatcgatacaactctcatatctgcgaaaacaaaactcatttaggaaacttcatttggttaccaaaaaagacagtacatatgatgacaagcaaaacattgaggaaggacaacaaagttagcaagtctcacttcttaaatacagcccaaacttttttttgcagttctggatccgggggttgagcgtgcataagaagctttgcatatgtggaaagaagaataggaatggtgggagtcctgagaaaaaaaacgaaaaaaagctattaagacatacccaaagacgagaagagcgcaattcaacatttgtgttgtccttacgatattgtaggaagcttctcatgtaagatgctaaagagttcacttgcactgcatccaggttgtctagctagaaggtgaccatactcccccaaaatataagcactgacctgaaattccgaaagaaattataagcattgttaatttgtattttgcaaagaatttagatacagataagattttgtcagcatgtgtagcaaggtagtaactctaaattcccaaattaagcaacaacaacttaaggaaggattgttttagttttatatgttaactctggttgttaattttatcacatggctgatactctgattttgaacaaggcttccgaagcaacgactcgtttctatttgtggatttgctgagtagtgagaagggtaagatgctgactggagaagctgctttttcaaacctaagttacttgagagagagaccaatgatctgactttaggaagccttgctcaaaataatagaatcagccaagtgataaaatttaccaccacagttaacctgtaaaacaaaaacaaaccttccttaaggtgttatctgcaatataaggaatttgttatgggaagcgagaatgtacaaccttcaccatagtctcatgtattgcgattttgtccaaatattctcttgcttttgacgcggcgtaaggctgtcaggtcaaagaaatatgtaagcaactttgaatgtcataaataggataaacaatatatttttcctaacaattatataaacctgcaggtcttcattatttgttacaaactgaaccacacgaaaccatatgtcatcgctaacaaaatccccagccttgtcgatcaactgaaggatcacatcaacatacctgaaaacatcaaaattaacatctttaaccagttgatttgcaaggatctaaaggtcacaccaaatggataatgcatgttactgtaaccaaatttgtgtgcatgaatgaagtgtacatatacttcgtatcgagttatcctcaccatgatagatcaggagcaaacttctcagcaaggatagcagctttaagtgataattcttcccgcatggaaaactctgctgtgctaagatactgcaatatatttttagcttccatgtaagcttaaacactacacaacttaatccttcctttctgttaaacttcacaaatcataaggagactaaaaatcaagaaatattaatataaagtaaggtcaaagacttacctgcagcaactcttcgactatatcctttgcatttgacacatcacacatcccatataataaatcaagagcacgcctacgaatactgcaggaaagttcaaccaatagtgaatctgacaccataagcaaaagaaccaagagatgataaatcaaactatatgtttgtaaaacggaagccaccatttgcaatggaaataagatcaagacataatggactgtggtacttatccatcttttactaacaaacgtcatcgaaatagtgctgacccaccggccaataatataataatataatatttcttatgtgaccgtataccacatataattatacctatagcttatcacaagaaaacaaatcaacaaataatgtttcactaaaaaatatagatcccattttcttaaaatttcatatatactacccaaatcaaataattttaatgctgacagaaataatcttattcacaactactatagagacaaagtaaaaaacggtatattaaatcataagaagtaagaccgatttgatgattgaaaaactgtcgtactggttccaaattagaacagtaacgagatactgatccgggttcacaagccagaaaagctgatgcttagatggcaaatctaaaccaacctgatgtcagggtctttcaaggaggtgattatctgagactgatgcttctttatgatatcttgaacatctgtgaccatcagcatccgcgtcatattttcctgtaattttgtcaaaaaatgcatcatgagaaaccaccaaccacttcacaaactactccagctaggcttagatgcaggaagtggtatgcaagatctcaccaagcctagatatctgatgttgggctcacggacagaaataaacttgccaagaagagcaacacactgtgacatcatttccttctcagcatcaagatgcatgacctatatcaaaacacattaaaaagttaggaggttgcacactaagccagagaactgttaggaacaattaagtcaactatccatgataaacctcttagaaatagtggcgaaaccttcaagcagagcatctaaatttattttactttcacacaagaaaaacaacagacaaagaatatcgtacaattagctgcaagcaattcaaacacttgaagtttctctagcaaagccaaaaaatatattttaaacgtccatgcacacatcagtagtctgctttgagtaaatgcgtctttacaggacgttgagcaggggtgaaggggaagagagagaaaaataggtgcccactagtaaaattcatggtatcaacatttccccagctatccgacgaacttaccagggatagagcttcaaacagcacagcatgagacgcattgtttttattcacatttttcacaacatctgtccccatcaatattcgctgaaggacctgaaatttccatgaaatgccatgccatgagaggaaattcaaagacatatattacagatttacacatgaaaatattgaacctcaaacagagcttttctggtactgggatcttcaatggtcgggaaatattgaagagccctcattgccttaacctgtactaaccaaagatatataagtatccacgatatctttaactgagtaacaaaaatacaccaaagctgggccaagcctctattttcataagctaatttcacataaaatgtttaaaatgcacaggatttgtgaaaaggatgcgattaaagaatatttaagctattaaacaagagtgaataagccgagttaagtcaaacctggagccaaggagatgggatgccatagtatgtgtactcctgaggaacatcttggttcctagcaaggcgttctaatattttgacacatttaggtagacaacttgagtacgcctcatgattattagataccagagctacaagaagactcgtagaagacgtcaagacaccaagatctcgttcatccaaaagttgtgccatacgatccgccctggaagtatacgacaaagagaatatgaaagatgcactagtaaaatcaaagaaccagtaaccccacagtgttatacacaccagccatccacgttgacagcatcaggattttttcggaataagcgcagtaggcacagtgctgcttttttccttacaagaggtctgcaactactagaaatctgcagcaaagagaccccataacataatatgtttagtaatattggaaaaaaatataacctctcatctttaggagtcacttacaagtagcttttgaacatcaggtgccaatgattcagcaaaatcccttccaccgatatttccaacctacaggagaacgtaagcatggcaaggtaagaaagctagaaagaaaggaccagtttcatgaagtaagtggctctgaatcgtgaaatgatagagcacaaaagacataatgtaccaaagacttccattaaaacagtcatttaacaacatcttataatcagaagaacctaactatgctctaaaatctcaatacagggtggacaaaagaccacataccaaggtcagtgctaggcactggaaagtctcattccgaccaataatatcgttccgcactgtatttattgccaacttcaaaaagtcatggttctcattgagcaagcaagatgtaacaatgtagccaacctgtaatcatggatgaaaagttcaatacctgcaaattagttaaggagcatgaaacaatataaattggaaatacaaacccttgagatacaatgcatggttctggttaagagtttctaagatgttactaagtaactcgtgcttataagtaattgtctgcaatactttcccaggtcaagtcaagttgcaaacgcatgaaatggtatctagatctaactgtgtgatcttcaatgaaactttctttgtttcagcttgatcaatagaatatatttcagcaaacacctccatctattatcttctcctagccttacaaagaaaaatttctttgtttgagcaaacaaaacgttggtttacctgcttttctggatactttggcgcagatataagagaaaccgcctccatatggccaaaatccacatcgtagcctagcatatgtatataaagcattttccagacatatttcttctttttatatggtgtcaaaacctgcaaaaataaaacagaatgtcaagtaatcaaagagttcttgattaattcatttctaacatgaaccccgaaaaagaataagtttaatgttggtccaactggaaacacatggatccactacaggcctgctacagctctgctacgtgtaagatggaacaagaatttcactccagaagttcttacagcaacaaagcttaatctacttcgtaatgagctattcaaaattttccgtgaccatgatttaatttcttagaccatcactacataaccgaatttactgccagaccattcttttcttctagttcctaaatgtcatcatatattcagtaatgaaattccaagttgaaagcaatagtagtgatgtttcaaaaggtagaataattgctaatctacaaggatttgagctagctatacaacggcaacattatactgcctatctattttcacaattggtgttaaatcaaaatttattgcctcaatccgataaagtaagaaactacaagctccaaaactatccactcggcatgtgaccagtgactgtatctttgtttcatctacattcttatctaactccctaatcaacctaatagctctaacattcgattgcattggcattgcaactgcgaaggataaatctccaatatctctaataaaccaaaacctcagcggatactcgacactgaattacctctctaatgagaatcaaaacatagaaaatagaatggagagaattgagagtaaccttctcattcttgaagcatgtacgaatgtttccgagctccttatcaactcgtagtctctccgcttccttgttctggcaattacgaacgtcgctgataaatacggagagacctctcattccggtcatggttgaaccaaatcctcaaatccaccgtgctccgccgcctcacacggcgcagatccaaactcgcggcaccggatctaactacgagataaaccacagactaaagctgaagcataagcaattcgagagaggtgagatcgaaatcccaatctagaaacggaaaatggcaccttcaatcgaagaaattcaaaaggagagactgatctttggagaagagagacacgcctgcgggagagagacgagagacgacttttatttttctttatttacaactttgactattcaattttgtgtaattcagtttttgtctgttttgaaattggaatccgaaattgacccgtcgaaaaacagaattaacgcgtctagacatttggactaaatttgaggatttataagtttgcgtaatattttgttaaaaagtgtatccttctgcctttttgggtaatatttatttactgctgtttctggtttcactttttcatttatttttaaaatgactgttttctgtcgcggtcaatgcattcagttgtaattcaatgtaccatgagaaaatccttaacaaaaaaaatgtaccatgagaaaatccggttatgaattcgggtcaggtcaggtcatgcaatggtttagctggtcccaactttttttttttttttttcgtcagacatggtatttgttggtattagtgggaacgaaacaaatggtttatacgcagtgctgatttgattattttttgttatgagcattttataattttactcaatgtattatgaaatcttttgaataaagattttagatactctatatttcagataacaattttgctagaatcattgcaaccaaattactctggtgaataggaaagtattgtcactactctcgtttttgaaatactaaatgtgtctcataacaagatcataatctacaagacgatgaataggacgaattgttgagctagaaaagcagtgacggcgatagcgtatgctcctaggatgttgttgtttggcagtttgagtatcgaactcgtaaacttatataactaatggaagcaccaaccattaaactacaaggcttttatatgattgtgatgataaagcatcagcttgctgggctttagatttgggtcggccctgcttattgaacatttttagttttatggaagatattgtccctttgcgttagcaacatcggctgatttcttaggtatttcgaacagctccaatatctcggttgagtttttcttcaaggcatgacaaattttagggtattcgatactttaagagaagttgcttcttcaacttgagcgacattgatgttggtgaagcaaacttgcaaaagtcagacttactcaaattttgcttaatcactcttgtttcacaagccccggatctagggttcttatatttttttttatttgcaaaattacaaatgatatagtaatataaaaaaatcatacttttgtcaattacaaattatgtagtaaaaacaaaaaaaaatcatgcaaaaattgataaaacagcttttaaatccataagcagtttgtaagaaaattaaaaatagtaaaaaaaaaattttctttcaattatattcttcaaagtaatagtaaaaatctggttgtatatatgtcggttgaatgtcccaccaaggccaagtccccactctattcacacctcaaattagatcaggtttttacaggtgaaatgctatgcgttggatgtgtttttgcaatttcccccctttatgacaacattaaaatctctcaatgtgaaggctggtgcgaaaaaacagacctcccatcagaaaactcatggagaaacagattgaaaatatataggcacaagaacaagctgatacaaccactgacctcacaatacaaatgttcagaatgaatgcaaaatttcttacctaacgcaacccgcccgctttggataaacggcacaaatataatcaaaactagcttttttctctcccttggctctacatttactctcccatcattccatattttcgccattacattctacaataacagaaaacaaacttttcgacatgtgcaagtaatcttttatcccaatgaatttaaagtaagccagcaagcatagctcctggatcatcagctaaagccgctgggctaggcggttgaactgctggtgatggtgctggacctgctgctggaactagagctcgagatcccattggaatagtaattaattgttccttgatgaattcttttaacctgtagataaaaggggtcaacaattgcaaatgaagaaaatctgtgatcgaggttgggtttgtgattaagaggcagatatatcatactcaaatgtaagggtaggatctcccgagcctactgtcaatcgtagttgggttctgtccgctgggtctgtttcaattcttgcctgaaaatcgcaaaccaaggaaaatgtcacacgtcattactataagtcttaagaaattttagaaattggagtggcaagtgccaaaaccaggaagtgaaacttggtgaaatctcaccaaacagagcatggctcctgtagtttcagagtagaaggttgtgcttgccactagattattagggtttggatcctacgacaaaaaacaatacaagttaagtttgaagtatacatgtgtgcatgaggaatgaaggtttgagatcgtaaacaactacttacaagcccagggcatatcgtcacatgaaaactgttgaacagatttgccatttccggaagagctagaggtcttacacctcttacctgaaagagattgcagtatcagattatataacgcataaaagtaatgctgcattaacgagcatgtgtagaagtgttggaagttctctataagtgttgtagcgaaagctaattcactaatttcattgaaaagaaaattcttagaagcctttgactactatcctgcgctactcaaatacttttagtttgatatttgatcagagaagctgtggagatacataccacttcctgaagtttcaagggtggccctgagattgctctccattgagggaagaactcttcagatgtcaattgtagaggttgaagaaacttattcaaggttgccgggatgcgtaatttggcactgacctataaaagatccagcatatcaggtagagtcacagatactaaatataccattcaccaaaacaagctaagtactgttgcagtacgtaccacgtttgtaccaaacttgtaggagaaatccaaaactgcaacatccctactagggcggatgttcatcacttcaagcggagattgtacctataaccatgaaaaaaattgcaacacttagtacattatgcataaatgagtagaaaatgacggattgagtagtcaaacttaaataaatcaacaaacaaaagtacctgtgctcgaggaggaattgtatcaggtactggagacagatccagtcttaagtgggcagggggtagtatcagagcttgaactgatgtaagtggagaagtattcttgtttcccatgaagagaacaagtctcccatggtgtcctctccattcagctttgatgccaatctgaggaatacaaacaatcaacaaaatgggaacataagaaagctcggaggcttgtctgctgcatacttgaataaataaaagcagaaactagaaaaaaacaaacctggatatgaggatcctcgtataagacaccactgtctttcaaacataaagcatgaaatctctcagcaatatttccgataagctgtataagaaaacaaaacagtataagaaaaaaatacaagcatgcaaatatattatggagtacaaaaatggctcggtttcttttattatggatcttgaattgtgaaacagaacatctcaggtagcattccacctaagtaaacgttacataccatttccaagtaataaatacaaaaagacgaaacagaaaaaaatatggctatagttaaaaaaaaaactagggaaataatgagctagcaaaagtagaagtataatgctaacacctactatgccaaagaaagcaaaggaataagaaaagattacctccactgtatttgtttgctcttcaacaggtacaatggcggaaccatcaatttcatctggaactccttctgcccctacgggaccatgttgttcatatgagacagctccaggtggagcctctattgcaagaggaccgagtaggtcactaaggagatcaggtgatggagtttgtggatctatattacttaaagttccattgggatgtgagagagatcgagccactgactcagggtcctgctagacatgcaatgaaaaacagactgtcagagataataagatagaagtatgtagtatataaaggcaagcacatcaaaaatgttttgtcaattggggcctagaaagagaagtactcaccgtgcttccacttaaaattggaaccttcaaaggtggtggtgccccattaacaggctgtgggtcagccaaaacaatagcatttgaaggctgttgttgtgctctaagtttgatggcactctggtctgcggtatcttcaacgttttctgcctttttaatcaatgaagactatggaagagacacggaaaaaaaatccagcatcaaagtcgtttagcacaaacttcccgtcaaagtaactttcatagaatcataaaataatttcacaaacctggcgctccggaaattttggcatctcagccaatacatccataaaggcaggcccttttttactcaattcaaaatattcaactgccctctgttgtatctccacatcgatacaactctcatatctgcgaaaacaaaactcatttaggaaacttcatttggttaccaaaaaagacagtacatatgatgacaagcaaaacattgaggaaggacaacaaagttagcaagtctcacttcttaaatacagcccaaacttttttttgcagttctggatccgggggttgagcgtgcataagaagctttgcatatgtagaaagaagaataggaatggtgggagtcctgagaaaaaaaacgaaaaaaagcaattaagacatacccaaagacaagaagagcgcaattcaacatttgtgttgtccttacgatactgtaggaagcttctcatgtaagatgctaaagagttcacttgcactgcatccaggttgtctagctaaaaggtgaccatactcccccaaaatataagcactgacctgaaattccgaaagaaattatatttattgttgatactaagcactgttaatattgtactttgccaacaatatggataaatcagaatgtgtagcaaggtagtaactccacttccacaatttaattatattataattaaaagaaaatttgttatgggaagcgagactgtacaaccttcaccatggtctcatggattgcaattttgtccatatattctcttgcttttgatgccgcataaggctgtcggatcaaagaaatttgtaagcaacttttgaatgtcataaataggataaacaatatatttatcctaacaattttaagaacctgcaggtcttcattatttgttacaaactgaaccacacgaaaccaaatgtcatcgctaacaaaatccccagccttgtcgatcaactgaaggatcacatctacatacctgagaacatcaaaattaacatctttgaccaattgcttgtgtaaggatctaaagggcacagcacatgtctctatagtgtgcatgaaaaaatgtacatatacttcttgtcgagttctctttaccatgaaagatcaggagcaaacttctcagcaagaatagcagctttaagtgataattcctcccgcatagaaaattctgctgtgctaagatactgcaatgtatttttgggttccatgtaagcttaaacactaccaacttaatccttcctttctgttaaacttcacaaatcatgagggaaggtcaaagacttacctgcaacaactcttcaactatatcctttgcatttgacacatcgcacatcccatatagcaaatcaagagcgcgtctacgaatactgcacgaaagttcaaccaatagtgaaactgataccattagcaaaagaaccaagagaatataactataaatcaaactatatgattgtgtgaaacagaagccaccattggcaacggaaaaaggattgacacctaatggactagtacacatccaatctattcatctttttctgacaaacgtcatagaaatagtactgacccaccagcaataatataatagttcttatgtgacccgtgtccgtttacaaattgcaaccacagataagtatacctataattgtttatcacaagaaacaaatcaacaaattatgtttcactaacaaacatgtatatatacagattccattttcttagagtttcatatatacaacccatatcaaataatttcaatgctgactgaaaggatcttcaattcacaactactctagagacaaagtattgaattataagagctaagacaaatttcaagattaaaaaaattgtcatactggttccaaattagagcagtaaagagatactgatcagggttcacaagccagaaagctgatgctgagatagcaaatctaaaccaacctgatgtcagggtctttcaacgaggtgattatctgagactgatgcttctttatgatatcttgaacatctgtgaccatcagcattcgcgtcatattttcctgcaatgttgtcaacaagcatcatgagaagccacataatgcactaccaaatacttaacaaattactgttctagct

SEQ ID NO: 723 - DNA, 10757 bp, Arabidopsis thaliana
aagcttagatgcaggaagtgggtatgcaagatctcaccaagcctagatatctgatgttgggctcacggacagaaataaacttgccaagaagagcaacacactgtgacatcatttccttctcagcatcaagatgcatgacctatatcaaaacacattaacaagttaggggttgcacactaagccagaaagtttactagagtgtgctcatcaatctaatcatcgcgaagaaaagctctctttgaggttcaatatttcttgtgtaaatctctgatatatgtcttcgaattctctctcatggcatttcatggacagatagttgacttgagtataatcaacaattgaacctcaaaaagttaatgctatttcttagatagagcttaccagggagagagcttcaaacagcacggcatgagacgcattgtttttattcacatttttcacaacatctgtgcccatcaatattcgctgaaggacctgaaatttccatgaaatgccatgagagagatttcgaagacatatatcagatatttacacaagaaaatttgtacctcaaagagagcttttctggtactgggatcttcaatggttggaaaatattgaagagccctcattgccttaacctgtactgccaaagatatataagtatccaacaaccacaacataccaaagctggggcaagcctctattttcataagctaatttcacataaaatgtttaaaatgcatgagattgggaaaaggatgtgattaaaaaatattgaacgtattaaccgagttaagacaaacctggagccaaggagatgggatgccatagtatgtgtactcctgaggaacatcctggttcctagcaaggcgttctaatattttgacacatttaggtagacaacttgagtacgcctcatgattgttagataccagagctacaagaagactcgtagaagacgtcaagacaccaagatctcgttcatccaaaagttgtgccatacgatccgccctggaagtatacgacaaagtgaatatgaaagatgcacaagtaaactcaaacaaccagtaacccaagagtgttcacacacaccagccatcaacgttgacagcatccggattttttcggaataagcgcagtaggcacagtgccgcttttttccttacgagaggtctgcaactactagaaatctgcagcgaacaagccccaaaacatttatatgtttacttatatcgggaaaaaaaacataacatgtcatctttgggagtcacttacaagtagcttttgaacatcaggtgccaatgattcagcaaaatctcttccaccaatatttccaacctacaggacaaaataagcagggaaatgtaagagagctagaagaaaaaaagcaccagttcaatgaagtaagtggctttgaatcgcaaaataatagagcacaaaagataaatgtatccaaagacttccactaaaatagtcattcaactgcattcataatcagaaagacctcactaagctctaaaacctcaacacagcatggacaaaagccaacataccaaggtcagtgctaagcattggaaagtctcattccgaccaataatatcgttccgcactgtatttatagccaacttcaaaaagtcatggttctcattgagcaagcaagatgtaacaatgtagccaacctgaaattatggatgaaaagttcaatacctgcaaatttggtagtgagcataaaataatacaaactgcaaatacaaacccttggatacaatgcatggttcctggttaagatttgctacgatgttactaagtaacttatgcgtctaagtaaatgcctccagtactttaccaggtccattcaaactgaataagttgcaagcttgtgaaatagtatctaaatccagcatccattatcttcagagatttttttttttgtttcagcttgctcactagacttgaatcaaacaaataccccacccccaccacacacacacctattatcttctcctacccttagaaagcaatatttcattggttacaaaacgttggcttacctgcttttctggatactttggcgcagatataagagaaactgcctccatatggccaaaatccacatcgtagcctagcatatgtatataaagcattttccagacatatttcttctttttgtatggtgttaagacctgaaaacataaaacaagttaaagtaagagtgcatgattaatttatttctaacattttaaaataagtttggtgttggtccaactggccacacatggatccactacaggccggctacagctctactacgtagagtatggaaccagattatctctccagaacttcttacagcaacaaagcttaatgtatttcgtaatgagcttttcaaaattttccgtgatctgtatttctttccttagaccatcactacataaccgaatttactgccaggccattcttttcttctagttcctaaatatcatcatatatttagtgtcttatatatcttgattgatcttctcccatctatggactttaaatgcagtaatgacattccaaagttgaaagcagtactagtgatgttacaaagggtagaataatggctaatctctaccgatctgagctagctatacaatactgcctgtccaggtacacacttagtgttatatcaaaaatttatagcctgaatccgataaaataagaaactacaggcttccaaaactatccactcggcaactctggctttcctaataaaatattcggccagtgattgcatctttctttcaactacattcttatataactccctaatcaacctcagaggaataggtagcttcatggagaaatctccaatatatctaatcaatacagaacctcggcagatactactccgtcactgaattaccactcaaaatgagaataaaacacaggcaaacaaaaatggagataattgagagtaaccttctcattcttgaagcatgtacgaatgtttccgagctccttatcaactcgtagtctctccgcttccttgttctgacaattacgaacgtcgctgataaatacggagagacctctcattccggtcatggtggaacagagtcctcagatccaccgtcctccaccgcctcacacggcgcagatccgaactcgcgaaaccggatctaactatgacagaaagcgcagaccacagctgaaggattagcaattcgcgagagctgagatcgaaaccctaatctagaaacggaaaatgacacctccaatggacgaaattcaaaaaggagagagtgatctttggagaagagagagacaagcctgcgggaagagacgagggacgacttttattatttacaactttgactattcaattttgtgttattcagtttcgtctgttttgatttttgaacacatgcgaatttggaaaattcgaaattgactcgtccaaaaacagaattcacgagtttacaaaaaaaaacaaaaattaaaacgagctaaacagacgaatttaagattacaagttcgagaaatacaaaaaataaacgagtaattcgaaaaataaacatggaataaactaattttatatattaaaaatgaagaaagctggccatttctcaaaagactgcaccattaaaacgaagtttgtacaatctgtctcaaaatcttaaactgtttttcaccgcggttatgtattcaattggtatttcagtataacataagtacataaccataccatgagaccatgaaaaaaccggattttaaattcaggtcaagttatggtcccaacgtagggatgattaatcaaatgattcaccttccttgggaggacaatgttcctttgaacagtcgtcagcttttgattaccatttggtattcacattaattaatctatagggcatataatataaattgttcaaattaagtaaaggagtataaataaaatatcattaaggggcacaaaacagaaacaagagaacaaaagatgaggatcatgcagcagttggatgacagtggttactaagctgtcactcgcaagatcctccatctatcgaatgatgccttaccatcaaagtatcctaagaatattttccttgcaaataaatatcgaaagatttttttgtaatatactcactcatagttgctttaaatatttttatttattacttttaatatctccacctaccaacaattctccttttccccttctcacttttaacggtgggaaaagtgaaaaaaaaaacacagaagaatgaatcaacgcaaacgtcaaaaatgacgtttagttgacataattcgccattgtgatcatattgttataaactttataaaaacgcagaggctaacggctgataaaaagtttgagtcattattgcaagtatatgattcagaaaaatgaataagagagacaaggataccatgagaaactcaacttccaaaaccaaattgaaaatgttgtatcgagtagtattccggttagaagaatccggtccgtatcatgaaccagattctctttctgtagctctcggtaaataacctaatcacactaatgaaactcagataactaaacttccccatcagattagagatactctcatactcctgaggattgacatctaggctagtttactatccggtttgtaacaaaaccgaaccggttgattactgaacgccggacaatttagcccaatctacaaattgcataccgccatacacattgttagcaaaccggactcccaccgtgaatgccatagcgaccacagggatacgtttggccgctgtagaaccttccacgacgcgttcgaggccgttgatgatttggtaacgcgcattggaagataagccgaggaacacacctgaacaacagcgcaatacagagaagagagtgaatatatatgtatatgtaatcaacaattcacagagtaaacttcagggttatctctgagctcagcaactaaattaccctctccattgatctaatattgctaacaacaggacaatgtagctaatatcttcacatagaattgtaagcataatctattcttggtatcattggcaattcaggttctttcctttctaagaaactaagcccggttaagaaaccgatggctgatcacaagaactcggaaaaagagtagacaacacaatatcgacggttcaagactatcgttttcagtgaacatcagaggggaaaagcatcgatgattctgtagaacatagttagagatcaaaagtaaagcttaccccagagagcagcgctttcgaaaagaggtggaatagggacgtcttcctctgatttcttcacactcctattaacaaaggtaacctcaaatttcagtgaagaacagttttttaaacagtcagaagattcatttcatcattgaaaagtagcaagataaagtcgatggtgaaagaataccgttttgctgtcatgatcagatttgcaattccctgaccaatgaggccgcagccgaatccaaccgacccatacaagaggccctggaccaagaatcacatcaattaatcaaaccaaaggtaagcaagatccacaaaggacattaaagcaatagttcttctccataccttgtagaagaatgttgcaatccgctggttaactgagaatttacaacccggtctttctgcttcaaaaacacttcagaagtacaaaaaaaaaagcatgtataagtacatctcatcccgaatacacagccaccagctcgatagatatcagtgggaacagttaacacaaaagtgaaaaaaacgagagagatacagtaacagtattacctgctaggaagggatgcacaagcacgtttaagatccttgaataaacctgttgatgccacagacggcttcccgatacgtgcataaggagccaaaagtccaaccaaggcaacatcaaccacaagaccaactaaaagatcagcagcatataactcaaactctgaccagaaatcttcccctctcttctgtacttctgcaaaagttgcacagcaagagtctatggctacctgcattaaatccgtagaacaagatcattcaatttcaatcctaaataactagtccaagaacagcattagcttattcattgacaaacctcggttccaactttgaagagaaatgaaggatctgcaagcattctatttcgaagcatcgcacatgatctcatcagaaacccaagcggccaaacagaaccctacgaaaaaattcagactcaaacatgaatcaccatcatacaaaaacagaatcattttttctcaaaagcaaaaacctgtagatcaaggtaacgaagaaggaacagttttcgaatccccacggatttagccgcttccaacatatcctccggtaacgtaatccctctacgttctgtctctttcataacttcttcaaacttcaaaatcggaccaaactccttctcctcagctttatctgcttcatcctctccatcatctccttctccatctccacctcctcctcctccgtctccattaccaccatttccaccaccgtcgttgttcccattctcatcgccgccatcaccatcatcaagttccggctccaaatcgcttaaagtctcatcttttacgccactataagcccaatccggtatcgatctaccggatatttcacccgtaaccacatccgatcctacacatcggtttctcaaattccgagaagacaagtccgaatttaaatggatccgtctagattcaacaccagggcttctacggaaacaaaccgatctaatttcaaacctttgactcactctgcattgctttacactattgaacccatcgttggagaaacttgaaatgtgggaaatttttagggaaatagacatttgcctcttgggtttctatgatctgtggatagaagatcaaatacccagatgcttaaaagcttcaaatgtctggaattttggagtaaagacgaagatgacggagttatgtatgtatgcgtttgatcagttgggtttaagggttttgaacacaacactcttaccttgatggagacgaccaaccaaggaggagagaataatcatgtacggttctgtctacagaaagtttagcaaatggcggcacataattggttgaaaagattcagttagacaaaagtgaagctcttctcattttttgttcagagccggcccaaatggggtaaagccagcagaagtaccaaaaatcgcccccaacattcgtttctttttgtttgtcatctaaggattgtgagatatttctgtatctgatcttcagagtcagttttctccacaagatgatgaaataaactctatggttctaatccctttttctaagtgtttgatataggtgaatcttgctttaatccttgtgtatttttctggcagtgtgtccactgaggtgaagtcaaagctgacgagctcatgaagtcaaaacttcagaaagaatggtaggctaattaatactgaggatggatgtctgatattccattccatgctttgtatgttggtttgcaagattcggaattgattggtcctgttttaagaccaaaagcattgccatcttatagatatcaagcggctctaattttggatactttgaggttgattccagagtggagattgattattgaagatgcatcagcaaatagcagtcctttgtaaaggccttattcgttaaggtgtttagtataggtgaagagtagttatggtgcgtctgttttattgtttccaacctgatgtttgttgtggtctcatcctaatcaatatatattttcagatgacaaaaaaaaactcacaaactgcaagacaaaactttgctaaagcactttcaaagattagtctcatgaggctctataaaaatagtatagaaccaaagcaaaatcttttaaacaaaagaaaatatatatctccaaagaaaggagaagctaagagcatccacaatggtaggttattagcaaaggcttttagtaatattttatgaattgattttgaaagttttgttaagagtttgggtaagaattttaagttttggcatgatcaatggtagtatattaagttgaggttcttaatttttctaaaaaaaaacttaataagagtaaagtgaggagagtcaagaaatgaacttcatctaaaagaaaggaacaagactgaaactcacattcttgataaaccaattgaggtttcgaacatgaaaccatcttttaagggaccaaatcttgtagcgtttccactttcgattacatcgtccaacaaacaatcagaattctctgaaactatactatttagaattacaatttgtcatcttaagatacatatttctctgaaactaatacacaaaatcaaagagtctgtagacagaattcatttaggcatatcatcgaacacatggtatgcaatatataataagctttaaatcttcagtcaaaagctaatgaatccatcattgactatattacaaaagctaatgaattgataaaaaacactttctgaattccaacttctacaatttcaacattgtttacaaacgaaaattacataattttacctattaaaggagaaaatgcttcgaaactgagaagatgacgatgatggagaggattacggagagagacgatggtagtggcctcaaaacaacgccggtaactatgagttcgatgaagaattgatgctcgtgagaggaacaaaagggaaataatgttttttgtgtttcataaaaaagaaaatactacaccattgacacgtcaacatcttttagaaagtaacaaccgctcttacataagagcgcctcttgtaatagaaagcattattgatttaattttattcaatcaaaaagctaagaaccactctaaaacccctcgttgcggatggtctaatgaaagaagataatattctcaatgtgacctggaaaacacaacatttcacgagtacgcttaccaattccatggatacgtctaaactcataatccgcaattccatcaatctcacatcttctaatactctccctagttatatcacaatagttaacaaaaaatggcatatatgactttaacctcgcaggtgtggaaacaatcataacctcgcccgtatgaatctttccggtgcacaaagatctctctttttcaaacaaatctccccactcactaggcacatcacaagttatgatgcttgaccattcttgtttctcaacatcttgtagaatatacatacccatctcagtgttacagtaggggtcaaacgctacacatgctaattttccttggtaatttataagtgttgaataacatgagattgcattaaagtcttctggtccttgaatgaactcaatcttctcggttctaacatcaaatctagctatttttctatacaaaactccatagtgtatagcaccatctatgcaaatcccacctttcatgtggcggtaaggatcttcttctttggttatgtcaatctttctccactctttttgttgagagcttagcgtgaaaacgaagtgttcctgttggatatcttgttgattggcgtcgtgtccatcgaacatcattacacacaacactttgtattggtcttgaaccggatcatacccaagacgtgtgtgtatacgtctcttccgttggattccacatctggcaatttaactatttgtctagtggtgggattacaaaccgcgatcgaatcaccacgcgtgtagcaaaacaaaccgttgacggggagagatctgatgtaggcgacatccgagatcgtcatgtcgtgtctggcgacaactgtggaggatttgtcattgttgtcgcgttcaggagctgagaagatgaaacgtttccgggaatcgaagtgtttaaaggtgaaaaagagacgaggacgagtctttgacctagtcaggaacgagtcggtgaaatttttactgcggatggtagagaaccagagctttgacacggcttggaaccggattataggttttgccggaagtctcgagactatctctaatgtgagatcaaaaggaatgtttgttgaggagtttccggcttgatctaggttacgtgagggagaaagttgtgaatcttccatagctgctttgtaagtgataaccctagaaacataaaatccctatactgtatcacacaattatgaatcaacagaggctttaatacagaaattaactaaaattgaattaaaaaacactaaaattttaaaataatattatgaaagtgctttacttttaaaaattgcaaacttctatatgtttttaaatactaaaaactttaaaagttttaatttaactatttttttgaacatagtatcccctatatattaattgataaccacttttaaaaaataaccttatctccatgtatgattaacgaaaatgtcacaaagttcctcaatccatttatttaaacacctaacatttataaaatatttatagattttgtcattaatattacttatgagtattttttccaattaatttatgcttttattttactcaattaattaaaacaaaaaataaaagaaaatatgcaattaagagataaaatctatacaaaatggaatactttatattttgtgtgtctattaatatatcaagacatatatcataaattatgataatcataaatattaatatatatatatatatatatatttatatatgaaaatttcataaacttgataaacatagataaaacaactttaatattagcaatacattaaaattaattaataatcgttttatccccacataacgcggattgttatctagtacatatattactttaaaaagctagtgtagactgttgatgaaataatcaat

SEQ ID NO: 724 - DNA, 86065 bp, Arabidopsis thaliana
gatcaaataaaagtatattattgaccaaaaaaggattgtcgatgatgtaaagaaatccaaattaacgtacttggttaaatatatattttcttaagcttttacaaatgacttgaaaaaggcaattctccattcagaatttaagtacattattaaagtttggtgttattcaatccgtattcatcgtattcaaggagtattttcagtttactggtcaattaaaccagaagattttaaccatactctaaaaccacctccattgcataataaatatgagtgtctttaaattataatgaataaaataaaaagataaatgtctttaaattagtgcagaaaagagaattatgtctcggaggaaacattaaagatatttcttttgagacatcttagcttatatgcggcacaacgtcatttgttttttttttttttttaatttatagttaaagacatccatgtatgttgtgcaatgtacatgctctaacggtagatactgctaccttaaattttcgcaagactaaaagtagaagtctcttgtgagaaagtttttctttgaaagagcgattctctaaagctgttgatgttgatgccgctagtttggccaaagctggagcatataattggcttgaatgggggtgagatattcggacggatgagattcctaaacatgggcttcatgttttgaatgaagaatcaagttgatatattagagtttataattacttactattttattgatttatagattcttagatattttgggtgaacctatcgtcaacatgcttcaaaaggtaactaagaacataatggtttttactgcatactctagagtctttgtcatctcgactcgagatcaatgattgcaaaaagttctagagtctttttctgatggattactatacatcactgcttgagaggagttacgaattgtgatacttctttcattcaatagataaacggaattcacaactcttgctacgaagattacatatgcatttgttcatgcagcaaccgcacacacaacacttaccatttgttcttttcaaatgtaatgtaaggattaacataagcaggatttacttttataacattaaaactctaaaactaatttaaaatagacgatagctagcaaaatcttcaaacaaaagaagatataagatattgtaggaagttaaaaattaatctctaaataaacataattaagtttaactaggaagactagtgttacaagaacatgatgttctcaatatgacctggaaaacacaacatctcacgagcacgcttaccaattccgtggatacgtctaaactcatggtccgcaattccttccacttccgcacttctgaaactctctttgatcggatcgtaatagtaaacagaaaaaggtttagatgattctaaacgagaagaaaccaacataacttctccggtataaatctctcctggagaagatagtctcttccccctaaacaaatctcgccactcacaaggcacatcgcaagtcatataattccaatattcctctctttcttgcatccaaaaagacgcatcttatagaagtaattatactctattcctcctaattttccttggtgatttataaaagtccaactataaacgtttactatttcgtctttctgtgttttaataaactccactttctcggatctaacatcaaatctagctaatattttgtgtccaactcctccatagtatatagcaccatcgatgcatattcctccttggacatctgtgtaagaatctccggtgacgtcaatctttctccactctttttgttgagatctcagagtgaaaacgaaatgctcctgttctatgtctttaccatcgcggccgtagcgacggaacatcatcacacacagcactttgtattgatcttccactggatcgtaccctagacgtgcctggacgtctctgccgttggattcaacatctggcaactaatatgaccgcgacatgtgtgactaaatttatgagatttcaaaaaaagtaaaaaaaacttcttctaaaaacttctcggtttggttttaatcctattaacagaaaataaaaccatgacactcagtgcatagccaaaataagattagaaccaaaccgagccaatccaaaattgttcacggatcacggtaattacatcatggttaatctttaaccaaaaacagttcaggcggttacaatcggtgacgtgtccaaaaatgaaattcaaattgctattctcgaaatgggcggcatttttttttcttccaaaattgaattttgttaaattgtctacaagttcctctctgatcttaataattttaaaaaaccctaaatactccatttcgaaaaatgtctgtaaattttgagaagcggtgctttcccggcgaccctgcttaagccaccggcgactagaatctagaaatagcgttctctcacgttattcgtttcaaaggttagagattctcgaattctggattttagtcgagtgaattccgatgattccagatttgtttccgatttgtgtttctctgctacttgattcgatttactgttactatgtctcttgttacttaatttgtcttatctttacgttaatcttcttgattttatgagcgatcgattgattttgtcatttcattgctttttcaataccttttaattcctgatttgtttaatttgggttcgacagatcactagtgtctaacgatcgcgaaactgggggatcaagaggattatgatttgtgaccttccgaaacatgaacaagactctttaaaggaagcgacggtggatgatgccgtggtggtggtgggtggccgccgtgaggtgggttacggaggctgtgacggaggtttgtgggtttttcaatcgaatttattatgatttaagtccaccgtttcttgtgttcgtgtaactctacgaacccaataagtttgattttgaaatttcgcgatctgatccgatcaatttttgatctaatttgttgtgtctgtggttgataacgaagcttttagaaatcattttggttgtggaaaatcatattgttttctttgtcattgccactcgtaattttaaaggtttgttgtattgtgttctgttcataagattcgggctaggtctaaatcagataagtgaaagcatctttagtgttgacttactcatctattttgatctctgaaatcttatgctttcttttctcaaaactttggtgtaggaagcaattggcgactctatctcctttggaaggagtttgatgttgtgtcacttttcttctgcaacaacaaattggagagccacatttcttatgggttgttcgcaatcactcaaccaaatgcatacacatacatacatgcagtcattcatactcacatacatgcatacacacatacatgcatacacacatacatgcatacatacatacatgcatacatacattaatgcatacatacatacataaatgcatacatacatacataatgcatacataatctacattgcacacatacatacatacatctacgcttatgtgtaatatgtatactttcttacttttacacatttataattccttctctgcttctttgagtcgttgtttacttacttgattccttaattctttgtctgattctttgcttacttattttttttttgtcaatccaagtttgctttactgattttacttcttcattccttgttttgttaccaactttagaggtttgttgcttacttccttcagtccttgtgagtttgcttgcttccttaattctttgtcatattctttgctttcttcattccttgtttaattacccgcttcagtcgtttgtcgtttacttccttgattcattgtttacttagttctttgtttccttgtttcctcattagcttcttgcttaattgtgtgtacttgatttcttgcttacatggttaacttgattccttgcctacgtgcttaatttcttacatactttcttttccttaactacatgaatttgtttaatttgtttttctcattttctatccttaacttgctcattaactgtctctgtttatcaaatatttgttttgctttagatagttctaggactattcaaagtccttcagagcaaccaatcagctaagttataaatgtcttaatttgacagaccaaatgaactaagctacacaaagtttatttgattatttcttatcattcaatttatagaacctataagcagtgctagaattttctggaagaacttcatcttagagttaaacaatacattccgccaacaatgaactgtcacttgtaagttgtctaactcttaagactcaatgaactttttttttttgttcttctgaaaactacaacaatcttttttgaaaacaggcaaattttatgtttgttgttggtgttggtggctgagacaagctcaagaatcattagaaaatgtactcatcgatctttataaggtaaataaactctaactgagaccatcctctcgtttctctcagtttttgttattagattgtagaattgacaaaattgaatcggaattttgagcagaaaggtggaagaacagaagagcaagttgagctcttgaagctacaactttggatgatatatcaagaagaagcattcaatggaaaaccagcaaaaattgcgagatctcatggccggaaatttcaggtcacggtcgagaaggaaacctctaggatgttggtaagattaatctcactagtctttagttttgattagatttctgaattcttttgatcaatgaactgatgaatttgaatgtgacgttacaacagctgaagccgtgtatcggaaactcaagtgatagagccagatgcaaacaaggcttgtaaaaagttggcaaacataaatctgatgcatcgttttaaggttggttgttatatacaaaattttggcataatcttggcttgttatgcgtttggatctatctatttgatcaaagttctggtatcatattacagattcaagtatattcagaaccagagtcttcttaaagtggatgagtcagacgatgaaccacttgacacaaaacaaatcagctctttgaacctctttcaacaagatttcgatgtggaaggacttttaatcatttgtgaaggctatatctgatgtagattttgatgccagaaacaacaaatattgtgagatctcatggcaataaattttaagtcacaatcgagaagaaaccactaggatcttggtaagagtaatctcactagtctttagttttgatcagatttttgaagtctcttgatcaatgaactaatggatttgaataaatgtggtgttacaacagaattttggatgggcttatatgcaactaagggactatacagcagctaaagacgaagtcttactaaagttgctacaaggaaatggaataaccttttcaaagcaaaggtttgcttctaatacctgttttataaacgcagtattcccaatctttggtgcctcgaaattaaatttcatatttctgcaactttaccttctctcaaacatacaaatgttgagttcctgctagtacattaactttcttgcgtttccccaaacatacatactagttgtaagcatatatattaagattcttgtccctcctttagagtcaggttggcattagaggtgaggcttcggttggagatgcttataaccaaatttgggttgtgaaacttgaggaaaagatgaaaatcctgaaaatacgaaaaatttgcttacaatgttcgaagttggctagatttcaatatttgtgttaactcacatcttctcttggttcatctcagatcaaggaacgtaaggagaaaatatatgtagctggttctaacataaggagatcgcaacattcaaatgatatttcattaaaagtacctttccaattctgttgacaaatgctctcatagaagtatttgagtgctcaatccctgatgttcttgatttatgtttttcattactaataggtggaaagtctttggatggggacgaggacaatgatggggactatatgaatgcggtgtcgcatggccatagcaaggcttcctcgatttttaaatctaagaaatctaaggcatctctttgaggttggttgttataaagtatacacattttggcataatcttcgtttggatctatccattcaactttttggtgacatattacagatccaagtttattaaaaccagagtcttcttgaagtggattactaagatgattaagcgctgacttaatggattaatacaaaacaagattagctctttgaacaagtgaggtttgcaattgagttagatgatgtggaaggacttctaatcatccgtgaaggaaatatctaatgcagacttggatgccaggaacaacaaagccagtcgtttctctgtaaattaatggagaaggaacattactggaaatacaaggatcgaaatctattatcattcttcattaactagattttagggcttatatatatatataccaagagttatactaggtattctggtttgtatctaaatattttacttgttggttgcagctgtttagggtttgagatgttggcgtatcttgcaaccagcttcttagaatccacctatggattctctggcacaaggataatggctgaatactgcattttcccccgaggatattatttcatttcaactgatttgatgtcaaagttacgataccaaatcagataagttataattatcttaacttgtcataccatatatacaaagctagacaagagtttatttgatgtacattctttcgtatcattcaatttttagaacctataagcagtgccaaaaggtttctagaagaacttcatcttggtataaaataagacgatccgccaaccacgaactcccacttgtaagttgtcattttaatgtaatgttatagttactcaacaaattatataagatataattttcttaaattttcgtgaatgaatatatagtcagatcaatggaactaagcttgaagaaggtttattattttgtacactccgtatcaaacattttatacaagctagaagcattgccagaagattctagaagagcttcatcatcgagtattttaagacgatcagccagccacgaacttccacctgtaagttttcattttattgatcccatgattattcattatgcataggacaactttttaatcgtaccaacgacttggtaggtcatcttgtatatatttgcactgatggtacattattttaagtgtatattgttttggattttgcagcttaaagcactgcaatccgtagctaagagatgaaacataagagatgtagttctagagaaaagccaaaaactggatcaagaaagagacttgtggaaaaatatcaaattttttgaaaagaacttattggggtctttgtttcttgtgttcttaaatcaaaaacacattatgtcgcttatctcccaggcatcgttttgcttatttcaggtatattgcaatgacttcggacataattaatgtatatcgtttcttaggttgactcctttccctagtatgttactccaatgtttttctacaataatatagtttctagtaacttaaatctttttgatattatatagtaatatgtgatcatgtgggtctcaatctatgaaaactaatcaaatattgattcagctttttttacaggtaagtaaagagaaaaagataccgagcatatgacatgcttgttcagattggtcatgcatacgcagatgaaaaaaactacataggtacttcaatatgttatgtttagttcaatcctaacaagtcattgtaacattgttcaggtctttgtttttctttcgtgcgtcaagattaattgttagcctctgctataattgtaacaggtggttggttgccttgatgaaataaccttaagatcattagtgttgttgttaagggcgtagctcgtttggcatctggtcttataatagtgcttttaatctgcttccttcaacattgcttctccttcaacggaaaaacaaggaaattgcaaaaattagtgatcttcttccttttcaagggtgttcctgtgagtaagccatttgtctcacttgtttaataaccagacccggtgaactgttttcccttatctgaaaaacatgccaatttacgtttgttgaaggtgctgggtggctaaaactacgcgttgcagaacgacacagaaacttaaagaacatggtcgaaggtttactgaagttgccagaagaaaatgaattacctttacaaagaaaaggtgtgcaactaatatctttggtgcctagaatttaatttcacatttgcacagcttttctttgtctcacacatgtagacgcagacaattacaaatgtttggcgccttgctagtacataaaaattgattgcttagccgtaaatatacatactaggtgttaatatctatattaggattgtttctgtggattgttgttcttttgaagagtcgtttcagtcttataggtgatgctttgactggagatgctcatcaagaaatatgacatgaaggatttcaagtctgtgaagcctaaggaacatataaaactcctaaaaacacaaaaggtttgtttacgatattcaaagttgtctagatttcaatgttatgccttgcatattctcttggtatcaatgcacttatggagaagaatatgcagctccctctgacgtaagtagatcacaacattgaaaataaacttcatgagtgctcgagtattgatgttcgtggaggcgttgttttagaactctagagttaccttctagtttcttaagttctcaatcattttcccaggtatgtctttaatatttttctactgcgtagtatctcgtttcttctcttataacttgaagttatcatctcttttacttttatgcaggagccgatttcatagccaacgaaccttgtgaactaaaagaagttatgtggtgagtaattacattgacactggccaattacattgacaatgttgtctttcccttgacagcgtgatatcccaacacattgcatgtatgcatccactcatgtacacatgcatacatacatacatacatacatacatacatacatacatacatacatacatacatacatacatacatacatacatacatacattcattcattcattcattcattcattcattcattcattcattcattcattcatacattcattcattcattcattcattcattcatacattcattcattcattcattcattcattcattcattcattcatacattcattcattcatgtatattttgcttctttatttacatcattaacttgttttacttgctctctgctttgtttcgtacgctttgcttgcttaacttggttgctttgttcctttgatctttgcctactcaatcccttcattcatttcttaacttgcttgctgctttgctactctgatatttttggtttcctttctcatttcactgtttacatgcttaactaacttgtttacttcttccttctttgtgtcttttatttctctgcttctctcattggttccttccttcatttttgcgttggtactcaacgttttaatttatttactaaccataattattatttaaatgatgttatagttttaaactatttaaaaccatcagctttcatttttaaaagtaaatactactatttattgtcgatgtattacgaatgtatcaactcttgtattcgatttgaaattaatgaataaatgagatgttttttttaaaaaatacactctttttatttgaccattattaattgtaaaattaatagtaattacttaaaatctagtgtaaagtgatcatgtatttggaaatgacattagaaatggtagaattttacctcttcacatttaatttaaagtacctttttttgtcatcgattttaagtatttattacttttaattttcgtacatgtgatagcattaccatatgttatattctaaccgctttttgtaaggaccaatatatatatatatacacatatttttataatgaaatgattgtcgcttttttattcacaactgattgaaaaagacattaaaaaatcatctttcaatagtaatttgtaatataaagaaagtacattgttgaaagtattatatatatttttttgccctttttaatccgatttgtaccaaatattttttttgtcatcgatttgtaacatatattaaaatgtgtttcatgcaacctgaattattgaaaaaataatattttaaacaattatctcaaattgaaccggaccctgaatttgggaaaaaagaaaagagtacaggaaccgaaacttcaaccacaaatgcaataatatcaccgcatcagtaactccggtgacacaatccaacagagtcaaaacgcggtcgtctcaactgcctacaacttcatctcaccctcgtcaaaagctctctacgcgcacagaaagcatgacattctcttcataacttgctataatgctatgttaaatatacacagattcactttttgtaatacgtccaaaaccattgagacgacgttcaatgagtaaagcaaatcgaaacatagtccctcattcattaaaagaaatgtcattgatcatttaatgttcaaaaactagatacatcaaatatctttaatgtctatcatctatacatgcaatacacttgtctagaatcaagcaatgtgctcttccttctctctgtacacgcagatcacttttgaagtttgtgcttcaccctagcttttcggatagagttgccacgagatcttcccgagctttctctaaggcacttgggagattttcaggctttctgccgcctgcctgagcaaaattgggctttccaccacctcctccgccacacagcttagctatggggccaatgaatttccctgcttgaacacctagggagactactccaggactaaatgcagcaactaaactaaccttgtctttttctggagatgatcctagtaccacagcgactggatcttccaatgtgcttatcaaatgctcagctgcactctttaatgagtcagcatcggtgtcatccatcgactcaacgagcactctaaaggaattaaacattcaaaggaagacgtttagttgaaattatagtgtgtcaatttttctgaacaggaaacaatagattaccttatagtctgtgaagttcctacagtaaatgctttgttcgatatgacagatgctttatagacagctgcttttgaacgcaagtcggaggcttcttttctagcagcacgtagttcctctagaagattctccactctgtttgtaacatcctctgctttcaccttcagattaaaaaccaaacaacaattgccaattggtcaccgcaaaagggtaagtagcactatgccttaaaacatggaaaggaaaagcagaataccttgagagtcgagcatagacgtgtcatttgagaatcccgtgagtttatgtattcaatgaatgcttcacctgcaaccgcttctatacgccggattccagatgcaatgccctgttctgagataatcttgaaggctcgtatttctgcagtattgccaacatgagtgccaccacaaagttccatggagacaccaggaacttctactacacgaacctgcgattaatgtaagggtcctcttagtcaagcgaaaccaaactgtaacactttatacaatctttaaattaatagtgacatatctcttacctcgttttcatcatatttttccccaaacattgcgatggctccagcacgttttgcatcagcaagaggaaggacttttgtttcaagacgtgtagcatccccaatccacctattgatcaggcattcgatttcctcaagctcattatcatgcagggaccgattaaaattgaaatcgaatctgaggcggtcaaaagctactaatgaaccagcctgtgatgtttcttgtcctactacttttttaagtgccgattggagcaaatgagtggcggtatggtgaacctggacagttgacaaaaaggatcaagaatttgataagggaagaagcagttgaaatattgggatgcaaaaggacattcaaacgtaccttcgctcgttgcctcaagtctgcatctactgctgcttccacctccttgccaacttctagagctccactttttacagtgcccttgtgaacaaaaattttaagagacttctgcacatcacttacctcaacaacagctttctcttggttcccatcactgctaacataaagaaaaccatgatctgcaatttgacctcctgattcagcatagaacggagttctgtccagcagaacctctacttcactgccttcagaaacccttatcacaggcttcccattcaccaaaagacttttcacaacagcacgagcagagagactgtcatatccaaggaactcagtgtctgcaatatttttcgtcatgtcagcatcgtcttcaactgtcagttttacaacattgtgagcagcttgagattgacgtctttgattctccatttccacttcaaaaccattcatatctatactgactccacgttcttcagcaacttctgcagttatctccacaggaaagccaaatgtgtcataaagaagaaacgcatcttttccatccagataaggcgtatccttagttttatcagcaattgacaatgcatcgttaagcttttggtcaagtaacttttctcctctttccagagttttcttaaagtgaagttcttcttgcctaatctcctcaatgatgcgtgaggcctttagttttacatctgaatcaatataagtgctcaactctatcaccttttcagcaaccgctggcaaaaacgctccctttagattaccattcatatccccatttattccgagagacttccccttccgaactgctcttcttattagcctcctaaccacataacctctgccaatatttgaaggagaaacaccatctgatatgagatagacaactgcccgcatgtgatctgcaatcacttttaaacttgtctttgccttgtcatttgcagagtcatatgagatattcgccaactctgagatctttgcaatgattggatatatcaaatctgtctcgtagttgtttggaaccttctgaaggatttgagctatacgttccaaaccaagaccagtatctatattcttctgtttcaagggctcaagcaatccatcttccgtcttgttatactgcatgaaaaccaaattatagaactcaataaatctggtatcatccccaagatcaacatcttcatcataacctctctcaggatagaagtcatagtacaactcagagcatggaccacaaggaccagttggtccactagtccaaaagttgtcagcttcacccattctctttatccgctcaacagaaacaccaacttcattcttccagatttcaaaagcttcatcatcgtcttcatatatactaacccaaactctattagctggtagcccaaactcaatagttgaaagctcccatgcccattttatcgcttctttcttgaagtaatcaccaaagctaaagttcccaagcatctcaaagaaagtatggtgcctagccgttttcccaacattctccaaatcattcgtacgtatacacctttgcgcagtggttgcacaaggaacctctctaggtacctgcaacaatttataaaaattcccaccagtgtatacattacattatcttcaagtctctaaacgcttactaaaacaatagtgtttggcttggattatcgttatacctttccaaggaaaataggcttaaactgaagcattcctgcaattgttagcaagacggtaggatcttctggtacaagagacgaacttggaagcaccttatgaccacgagaagcaaagaattcaagaaaacgccgccgtattgaatctccactaacatctttggactgataatcctccttagcatcctcagacactggctgtactgatactgaaatccacaaagtaaagatattttcagtccctcaaattcaatgctgatgaataatgtcaggagataccaaaatgcataataataataaaaaaacagaacctgatgagctcttagcaataatctgaggagactgagttgatctgggaagtaagatagaaggagaaacacctgcagaggttctggtaacaaaacctacaaaacccattatcaagaaaaacaatcataaaaccaaattataaagaataacagaccaagataatgacaatttcatagacacgagctctgtaatgaaaagaaacaaaaaaaaaaaaacaattaggaaagttctctactgcgacggaagacaaaacccagatatcagtttcatcaattagacaaaggctagagctaattttacaggttgagatagattctgctaaaagggagaaaacacttacgtgtagaaacgaaaatagaagaaggatgcgaaagcaaaattggtctaagaggaaaatcgaagaggtttactctggagaaattcatcagagagtatgaggagggagagtttcagggagaagaagaagacacactagctagccttcaagcgtttttttatccacttcgtttggtttgaaagatttttaatcaaaaaaaatttaattgcctattaataagttaatgaattcgttaaataccttcattagtggttagagattgttttttctcccattggaggagactcgagagaccccttcttcgatttttaataaaaacaaagaatttaataaagaagatgaaaacgagagaataaaagtgaatgagcaaacttcttcttcttgaaaaatgaagtaccattggagatggtcttacactacaattgagaacataagagatatatatatatatatatatatatatggaagttaatgaattaactatacaagacttggtgacaaagttttatgatagcttggagcttaagttggataatagttttatggataattatccaatttcaacacaattttgttttttgagcaactctctaggttacacccatagttcacaatacatgactatatatatgagagattactagctagataacctaattacatgagtttggatggacttctttaaagataatagcttgggctttatgtgtactctaataatatatataccggactaatcccacctgatagccgatttcatcctgttccttttaagaaaactttcttttttgaagttacaatcagctaaatcatcgactaggaaagcttcgtggatcatcagagacttgaagacctactttttatgccctatgtgactcaaacacgttttccctctctattttctgaattcttttttactttccaaccaaatccttagtaataaccaaagtaaaagagaagtaattgattgacaaaaaaaaaaagagaagtaataatttaccgactaataatttgccctatttgactcaataatttactgactcaaaaacgttttgccgccctatgtgactaataatatacggactcaaaaaccaaagtaaaagagaaatccaccataccggtgtaccaaaactacgacgttacattggctatttttcaaaagatatatttacgtgtgcatatataaatcgtattgacgtatgaatgagttagaaagacaagtgtcaaatggcacacacaacgtaacagaactataaatgttaaagacaaatcaatgcccaagtctcgcaactactttctttcaatgtccctctttgctatttgcaaagtgtttttacatttttcaggccaacagagacaaatcaatgtgttgtgcgttatcagagagacatataatgatagatacataaacgtatcattatataaaaacatttgagtccacctaatctatcacatttattacaatccccaaaatgtttgtctattctaattctatataaacacccttgcatgcaaaaactacatacacactcatgctactcacacaagcatcaaaagcagaaacaaatatatacatcaccataatcatcatcatcattagaaccttcatctttttgagcaacaaagttatgggtttctcgggaatttggttaaatctttatgtggtgtttggatctttaatggtttttgagagaatggtggtgatgaaggcacagccactggttccagcaattttcatatttggtgattcggtggttgatgtgggaaacaacaatgatatctacacaatcgtcaaagctaatttccctccttatggaagagatttcacaacccatacacccaccggacgcttctgcaatggaaagttagctactgacttcaccggtacttttctgttttcttcgttgtttatttcagtgatatatatatagctagtgacacataacatgaagatatacatgcatgcatggttatatacatatacaccatacacacatccatttaaactaaataaacttttgaacagcatatatgtatatgtgtactcaaagagtaaaacattaagagccatgacttgatgatgatttcttcaacttagagtagaaaaattaaaccaccgattgtcgggtactcgggttgtattagcatgcacggggagcaatttgttactgaaatgaagaaaacaatgtacatgcattaggttgagaaatctctatgcatatatatgtacatgctatataataactaaatgatgaattagtttttgtgtgttggttgtgtagctgagaatcttgggttcaaatcatacccacaagcttatctaagcaaaaaggcaaaaggcaagaaccttttgattggagctaatttcgcctctgcagcctctggttattacgatggcacagccaagctctacgttagtaccatagctcttatttcgtcctctaacagcaaaattaaactttagtagataaaaacgtcttcttacttattttcattgttggttatgaagagtgcaatatcgttgccgcaacagctagaacattacaaagactacattagtcgaatccaagaaatcgcaacctcaaacaacaattcaaacgccagtgccataatctccaatggcatctatatcgtcagcgcagggagcagcgacttcatacaaaactactatatcaaccctctcctctacagagaccaatcacctgatgagttctctgatctccttatcctctcctactccagttttattcaggttattttttctccatttttcgtttgtttgtttaaataatgcttaaatgagaaatccgatagaatgatttgagcaatatcataaacttagatggtgtaatcggaataagacagtcaaaatgttgatcaaattatggtggcgggaatggtaatattgttgagatagttaaagtgtaattttgttctgtttttgttttgttttggggattctgtagaatttatattcgttaggagcaagaaggatcggagtgactacacttccgcccctcggttgtttaccggcggccataactgtagtgggtccacatgagggtggatgctcggagaagcttaacaacgacgcaatctccttcaacaacaaactcaatacgacgtcacaggatctcaagagaaacctcattggactcaatttagtcgtctttgatatctatcagcctctctatgatcttgccaccaggccatcagaatttggtatttatacatacatgtcaaagcataaaaaacaattcttactaacatcatactaataagtgtgtgtttaactttcaggatttgcagaggcaagaagagcttgttgtggaacagggttactagagacatcaatactgtgcaacccaaaatcagtaggaacatgtaacaatgcaactgagtatgtcttttgggacggatttcatccaacggaagctgctaacaagattctcgctgacaatctcttggtctctggcatctctctcatctcctgatcatccatctctctactttagtctcaaagtttcagtatgttttattgttatgcccatttgaattgagatttatgtcgaaagatactcggtgaaacttctatttctgaatatttgaggagttattttttctgttgcacatctattcttcttgtgtacaatttgtcatattgtgccctaagagagaagcaagttctaacctgaatctgtctgttcaaaagtctactgggtctgccatttcttgaagctgacttcatgtggtatgccttgaaagtagagaagattgtaaactttcaagagatagattccccatgaattaagatccttcaatggagctacaattgagaaagaagaaaatgatgagtcaagtatttccaagtatctgacagttcaaagaagatagaaacaagatcagattctatgaaactgtaagaccaattataatatgagaggttgctttgagtttcaggctctctggatcacttgaaacagtagttgaatgcaaacaagtcttacaatatttatagttgaatagcttccttgatatatctgtgacagcaatcgaatagccttttaacatcagctaggtttatagagcaattcccgttcacggtttcctcctgtaaattctccttgcgagcattccaattgttcaatatcgattcaatcttctgtatctgttgttgcttaaggtccacaaaagatctgtacaggccaactatgtagaatctagaaagaagtaacaaaattagaggaatataaaagtggatacagcaattgttcgtgcgcttgactttatctgggaagggaatgagtttcgggactcgtttgaatcttctagttgggtatcaagaaaatcatcttcaataatatctgcgttgcttaacaaaaccaatatgtactgactcagaaggaatgtgtttatctcggattcattaactctggcaagtaatctcgcaataacattccaaagggctcttcttgcttctacatcatccgaagcaaatggtaaagtactgaataaaccttccaagaaagaaaaatctgcgtgtgcagattcttagtgtcagataaagacatgaagcaacaaccaagaccactacgcaaattatttccctgttcatcctaattgtcaagtacaagccttcactatgtattacaaaaaaccgaaaatctcatacttgttacaaacttgattataactttttcgtaacccacaattccagaactaagatctgcgtgcagtagagtcatgtcacactctgcaaacccaaaatggaaaactatgactagacatttcatgaaattaaagtttaccttccaatacttctggaatgaaatcgactctttcagacagcatatttgcgattaaaactccagtagtaacacaagatgttgcaacctacagtgaagttcagtttatgttacattataatttgagatatattcaatggaaagcttcatataaacctaaaattacctcggctttgtcctgaagtttcataagatcacagactaattgaaaaagttctttgctagagcaaatctctttagaatagctatctgaagcagaaagggcttcaatagctcggagaataatttcaaggacggggtacctgaaaacatacacaagggttcattgtacatactacatagtaaagcataacacttgtttttttttgcaagaatagaaatgccattcactaacacttgatgatctttaagatgagtttctgttcttccatacctttctggaattctttctttagtcaacttgctcatttcaaatgaaagaagattgatcaagagactcgtcaaacccagattcattagtggaggaatcaatagctgctcaacctcaggttgaccttctatgatacctaacaatagccctacactctatggtaaaatagaaatgaattagcaaattaagaaaaaccatgataaactaaaacttacagaaaatggtggagggacatgaataggcataaagtagagaatttcagaaaattcattaactcagagttcattaaataaaattcaccacttcgatcaacctttcaacaatcaagtcgtccagtgcaagaatgactaagttacaagaacaaatttcagaagttaccttttcaataagatgaggattcaaggtattttccgcaatccacaaaatatggcgaagtatatcatcagactccaaacaatgggcccaggaagtacacccagcgccagagagtcctgtggtgagtatcctattggagatacatgtcggatagttagataacccaaccaactaatcaagcatgaatctacatttgaggtaacaaatttattgttttacctgcaaacttcacttaggcattgggtatcatcaagaaacaactgccccacaagtgtattgacgattccggctgtagactctatatgtttcaacagaccttcatggcaagcaaggttcctaataatcccgagacagatttcctagcaagccccaaaacgaaaaagaaatgtaaaaattaaagtcaattcaagaagacaacaataattagaaatgacttagacttatcatacatacactgagttacttactcgaatacggggagattttgaaaccataaggtttgcgtgaagcacttctaaaattaggttctgtacctgcaaagccaaagcattacaacttcaggtctcaactccactacatggattcaatagatagagcactgtagtacatttccaaaaccactatacggaaccaagctgctcttttatctacatggaaaccaattagttctttttcaacaactctgccccaaatttcctattggtctaaactcaactttaaaccaacgttactacttggcaattcaaaatccagagtaaagaatatataaaggcattacttcaaagtataaatccatttaccattagctcagcatgagttctactggcggcaagatcccacaaaacacaaccatgatcttcccatgccgatgacccgtcttgcattcccggcgctggacatgaactaaccgtctcccccacctcataagtggattcatcatgattatctccaatgtccatgctctctggatcaccattggaagtctcaacaaccccatttccagatatagctactacaccttgaaccacattatccgtattcatatgatcattatgtcgttcgtcacttcccgaatcaattggaaggagtttccttatcagtgaaataagatagctaggatcaactgtagtcgaaatgtcaaacaactgcacaacacagaaaataagaaacatcactctctacacaaataaaaatcacaactttaaatccaaaaactactcttaaatagccaactaaaaacccctaattgcacaaagtaccattgacgctcaatttcctacaatgaaactacctcaacaacaacgaagagtgagcaaattaagctcaaaatttacctcatcaggcggaggaggaggatgatgtgagggaaactcgttttcactttcttctcttcttccagtaaaattttcttcttcttcttcaagtattcctcgctgtttcgtcgcttcatcgtcttccattttaatctctctggttttttaatttctcctttgcccttatttctcttcttctctcgccagaaaattcgaaacaccgctttacttgttttacaaaatagtccttgtactaaatcatgtcttgttttcacacctacataatttacttctcttataaagtaccttaatcttttcaatagacgattacacccccattttgaatgaaccacaaaaatctgccaactgttaaataagtctcggtgacaggtggcagattattcacaggtgaaaagatcgtgggtaagaaaagcctcagccacaaaattaacggtcaactaccataaattgtttattcattaatccaaaacaaatctctatttaataattttttggaaaaaattaaattttttaagaaataacagaaatatttgtaagaaataaaaacttcgatagagataatttgatatatacagtaaaaattctataaattaatacacacggtaaattattattttgatattttttataaagttttcactttatttattttattgttttgtccaaaaatttattattaaaaacacattaatttgtaaaaatgccaaaaaatgattagatgtttcggaaatatttgagagtgacaagtcatacaaattggatgttgtttttacttttttagttttttggtaaaattatccttaaagctaaaaatctccataaccaaagcttcttcgttccaccagcaccaaaccaacaatggcgttaactccaattccttcaacattcacttctctcttcaacttctccgatcactctccatatccatctccatctctccattatcttcttcctggatcttctccttccttttctctccagttatctgcgttgagtagaactccgatctacttcgaggcacttaaagttttatcgagatcgaaatgtttcgccaagtctccgacaaccgccgaggatttcgtcggcgattacgaatcccttaacgttagcgacgacgacgatggtagtgacagtaatagtagtgatggagataacggaggaggaagagatgattcaaagaagatcgattcttcttcttcttcttcatcaagtgactctacgtctctgggaattcgtgaaccggtttatgaggtttcttctggatataatgaactattgaattgcatgttcatatagtcaattagtcatatatttaggattctgtttgaattgattagctttggatgaaactgtcacttgttgtatctcatcaaagtttgtaactttatgaaggttgtggaagtgaaggcgactggagcaatatctacaaggaagattaacagacgacagctgcttaaatccagtggtgactgaaacaatagttaactattttatacatttgatgatcgtcatgttggtagttctctatgataagtctaatattttaatcaggtcttcgtccaagagatatacgaagcgttgatccttcgttgtttatgacaaactcagtgccatctctattggtatatatatagctcaaacttatcatttctctacagttatgtgtatgatgaaccatctatatgacaatgttgagaccttttcttacatgttatttaggtccgtgaacatgcgattctgctaaatttgggctccctgagagcaatagccatgcgagaccgtgtccttatatttgattataaccggtaatcttggtcgcagtatatctctttttcttcagatcaatttctctagtatcgctggtgtaagtccaaaatattttcaggagaggaggaagagcttttgtagatacattgatgcctcggcttaacccaagaagtatgaatggaggaccctctatgccatttgaactagaggttggtttggcccataaataatttgattggatgatgatttgtttatgtagaaatatatgttttgtacacagataaaagattataaatattatctcttcagccctgcataacttgagtttgttataattccaatcattttggtgttaacctttcattactctggctttattgaaggctgttgaatcggcgctaatctcaaggatacaacgattagagcaaaggcttatggacattgaaccccgtgtgagtatgaaaagctagtgagtatatttcagttagatcttcttcactttgactgctagactaggacttctccatgactaagttagatcttaaaaggaacggattcgtgctatagaggatgaaactgccattttcgacacacaaagcatttccttttgctataagtttaagtttgaactgagcataggataaaagagctgaggcgttaaaatgaaatcctttatatgttctgacatgaaaccctgtagttttttccaaacattggcttatggcttttaaagatcattctttttgctcttaatgtttatattacttccatttggttcaggtccaagctctacttgaggttttacccaaccgcttaactgccgatatattggaggaacttcgtattagcaaacaaagactggtaaactttatttagttgtttatgtatgtatattcttgttagttgttcgcttcagagaactcaatgttcggttttttgtattgaatttttctttatacactttttaaaggttgaattgggctcccgagctggagctcttagacaaatgctcctggatcttttagaggatccccatgaaatacgccgcatatgcatcatgggaagaaattgcacacttagaagaggagacgatgatttggagtgtacattaccctcagataagctgattgctgagggtaagactgcaaacatttcctccatgataatcaccacaaacagatgaatttaacgagattcattttctttttctggttccgtgcagaagaagaggaggaaatcgaaatgctcttggagaactatctgcaaaggtcttgacttttgctcttgaagcactctgatatgtttcattgttatgtagtgaaactctatggcttcgtatgtgcagatgtgagtcatgccatggacaagcagaaagacttctggattctgcaaaggaaatggaagactcaattgctgtcaatctaaggtactgaagataacaaaatactcctttctcttaaattcttaggcactcttaccatggtccattgtttgtttccagttctcggaggcttgaggtcagcaggttcgagttgcttcttcaggtcggtacattttgtgttgcagttggtgctctcatcgcaggtatattcacaaacttttgatgatttgtatccgctttctctgaaacctttgaactatagtagagcctttgcatttaaactaccaactaccaagattgaacggagtgtccacattctccattacatatgtgctatttgaatttgactacaaagaaccatttccctatgaacatgatctcaaagccaacaaatcctatttttcccctgttcattgtaaatggcttataccttttgttttgggtacctgcaggtatattcggcatgaacttgaggtcctatcttgaagaacaagctgtaagtcctcatcaagcaaccacatatttacaactattgtgccatcattttaccattaacatctcgggttttgcagtctgcattctggctaacaacgggtggaatcatcataggcgctgcagtcgccttctttctcatgtattcctatctcagtagacgcaaaatcttttgaaccttcaatcctaaaagacgaaagaagaggtaaacctgtttcttcttcttcccatttccatatcccctttaaatttgataaagagcgctcaaaatatacgtaaatattacaggtttaaaatccgtgaagaaagtgaatttcattcatcacagttacattatggcattaggcccctactagtagttagagcgaggtgagttcatcaaatgtctgataaatatttattgttgtggtctccattgaaccccagtgacttgtgtgctatgtcctcattgcttggtaatgttgtaagatcaatgtatcatttaataaactggttcgaaagcaaatgaaaattcaaatatagggtttatcaaaactgttttcgagagtaaagggataaaaaacaatacagtatctaaatcttcgattcccagagaagaaattcaaagacaaatacaaaactttttcaggcatttatatttgtttcttaagtacgaagatcacgagctgattgacgaccttctcttgctgaggtctttctttccgagccatcaatggcgatatttccaacacctgcctccatggcttccctctcaaccttttccttatctttatcctcatccgacgcttcctcttcttcttctttgggattttgtggactcgatgacggtttcagtgatttagggaccggattcaaccatgggtgcgttaggcactgagcagccgtcggtctcttctcaggtacaaattgaagaatgggagtgatgaaatcttgcatagcaattgcgtcttcctcgctgaagtcatatttatctgttaagaccttgctaagtggccaaaaccgtaaccgcctgatgtgccgtagttcaccctgtcggttgaagaaatcccgcgaatggcgtccacctaatgcaatctacatttaacaaaatccctttaaaaagctctattcttgatattgataaataagagaacactgtgtttttggatttacctttcgtggcatcatcccgagaagctccatcatcaatgccaagtgatcctgaaaccaaagtccattagtgttacaattgagtacaaacgacatgaaacgattttattttttcacaaagtatgagaaatcacataagagatatatacctcatctcgctcaaagttttcaccactgtgaggatcgaatagaacatctccggtggcaagctcaaaacaaatgcaagcaaatgaccacatatccgctgaggttgagtattttgagccaagaacaacctcaggacaccggtactgtcttgtctgaatatcactcgtaaactgtttataagtccaacaagcattcccaaaatccaccaacttgcatttccgatcaacatccgcaagtaacttttgcctcgtggattggcttcctctcctatttccccggctcttttgactaacattctctgcatcttttactctttcagaactctcttccaacctctccacagttgcatttccatttggtcttgcctcagagttagaagagtctctctcattttcctctgaaccttccactttcttagctttcttacggatcttcttcttctgattcttagtcaaatccgcactatacgtataactcttaggtttctctttttcaactggtctctcaggaacagccttgtccttcacagttggaagaacaagaggaatccccgatttccgagcatctgcttcagggtcaatagtggaacaaagcagaatattctccggcttgatatcagtatgaataatagaaagttcacgatgaagataatccaaaccaactaagatatgaaaacagatctctttaaccatatgaagaggaacccctcggtaatcactgtacttgataaccgacaagaggttatctcccaaatactcaaaaaccatacaaacatgttgcccattaggaccagcatgcttgaaatgatcaagaagcttcacaacacacttcttatcttccgcatcgccttctgcaatctgtttcaatatctttatctcatccatggccgcttcagtgtagtgctgagcactcttctggattttcaaagctacgtatcgctacaaacaaatgaattcaaaggcaagattcaattctctaactacaagaacttcctcattctctaacaaagctagttcaatcacaacaatgcaattcaatatatactgcctaaaccctagctcaagccagttccttttccctactatctaaaaaccctaaaattgattctctgagaaacgaagcatagaagtgaaagtagtgacttacagagttgagagtgtcccaagcgagccagacagtggagaaatgtccccaaccaagcttactttgaatgacataagatccattcttaaaagtatcaccgactcgaaccgtatggtaacctcctcttctgtaatcttctgttccttcgtcctctgatgagtagtcactagcgtcactcagacgtccaccgttcttctcatccgccatcgccggaatagttgaaaagtacccccaatcgagaaacagcgaatctcgatctgggaaattcaattcaggaaaaacccctaaaaccctagaaatttgaggttctatggaagagaagaaagttggagatttttagaagacgaccaaataaaaaaagagattaattgataaattacctaatttgagcataacattaataacagataaattatgaaacacgagttagtgtttgtgtcagataagaaagattagggctttcgttgactctgtctgagtaagagtgtacggaagtatgatgaacaaaatagaattgtgagatagtatgatttcgtttttaactttgcagaatttccactaaaaaacttgatcaggagaacaatacacacacatagacacaactatgtataaaaggaattatgtacatcaaaaactataacaatgaaataggaataaaaaaacatacaaacaaacaacaaacaagttaatttttcttttgctgggattcgccggttgggagaaacttactcgccggtgaccacaaattaacacgccgacgaccacatcaaaagggtatcgaagaaactacaatttaggcaaagttgtgaaaagctgtgtgctataagaacatgttgattaccattagtaacaacattagagtgtttccaacaatgtccaaagataacttctgcggtgctgcagcattctcactaaactgtcctgcgttcacatattcgcttcttccgctgctgctagtcgctgagacatttaccgacgtcgaacctgaagaaagataaaaaaggttaagaattttttaagtgtggtaagatttcattgctttagggtgtcatttgagttaaagagatgagatttacagtcgtagtttgcccatccgattctctgaccgaccagatcatagacaaagatcttgtctttaagaaccaaatctgcagaagaaaaaaagatgacaaaaacagatgttttgtgttaccaaatgtagatttcaaataacaaaggcttcagctttcgattcgggttacctccaaggatcgttatcccttgattctgtatcctttgaaaaccgatgcaccacactgcagtacctccctagaaagcagagtgcagaggccaatgttataccaggaacagaaaaaaaaaaactcactgtttcaggtcaaggtaggttcagattctgaaaccaggttcctatgaaaaggttgcgagttaaagtgcttacgacattgttctgctgtatgaggtaatcctgaggattcaagaacatagatgctccaccagcaaagttcaagctaactggaggaaatatgtctccgacactgatcatcacagtacaataaaaaagttcaaatgtttaccaattaagaagacatgcttgggataagaagatgtggtcagaggatagaccttgtggttattacgtaacattggttccctttcgaaacaacgggtctgacagactgcgaaacagcatttgtaatctgaaaaattccataagacagataacatttaagtattgaacgaagattgcagagtatcaagtcaatggagtacagttatagtaactccatttcacagatggttcggtgatatcaaaagcatatagcaacgtgagctctgatgacttacagcttcaacgaaaggaacataggctgcttcagaaaggtatgccaatgttgtaccagtgtcaatgattgttccctggccgtttgatgtagagaagaccgatggattgataggtaaagcttggccatttactgagatgctcagcagattcacattgtaatgaggcctgacattttaacacgccataagatcatgcttatcagtcaatctctaatgaacatttgagcaactatttaaataagatcatgcttatcagtcactctctaatgaacatttgaacaactatttaaaatgaaacggtttcgagggataaatgaacactcactgtgagggaacaagtggagtaaagaccatgtttggctccacaatctctccaagaaccaatatgcctccgcctccattctctcctttcaagcagtgagagaacactcttggagctattccctgtgaagcaagctgagaaatgacagacattccttgctgcccaaacccgaagattccatcaaccgctctatcagacttcactaaatctcccgtctgagaggtgctgcaactggttccagaaaaacaatcccacatagcaaccaacaaagtcaagagtaatggcccatattgatgactatgaaacaaaggattcgctgaaataaactcacccaaacacaaccggagccgttgagtttgggaccagagagcttcccacaatcatatcaaattgcaagacatcagatacgtagaaccctgaagtgccacttccatccccatactgaaacgtgtaagcacaaaggttgttctgaacagaacagcctgaatcagaagactgaataccccaactgcatctttgatcagaacatgaaatcggtgatgctgttacagagctccctggatcaaagaaattcaactgaatctgcaaaagaaagaagcatcatattaacaatccaaaaccacagaaatcataactagaccaagattatgacaaagaattcaaaagctttacttggagtccactggtttgaggacagccattacaagaagcacaactaacccacaaaacatcacttcctgtatcaacctgtacataaaaatctcttggaggagttcctaatcgtagtttcgtgtagtacagtctgttacaaagtcaaacaccaaaactaagcagaaaacaacaaaaccaaaaaaagaacttttgattgagacttgcaacaaaacaaaactttaacagacaatgactgagatttactcagatattgtatctaacaccttacaggcattgccaaaaatcgatcaatcaccaaaaaagaacataaagatgaaaactttaaattacccaacaacgaaaggatcaaaagttccgtccacgggaaaatctatgactccacctaaagactgtaacaatctgccgtgtctagcttcatcacgagccttgagctgactaagttccatttcgtgattcgctggaataactctttcaagtttcaacgccgccgggaaaccgtaagacaaaaccgccgccggtaataaacagcaaatcagaatcgccgccgcaaaacgaatagcggccatagcttcccgagttgggtctgcttataagtgttaacaagatctctgttttatctcatcagaaaccaaaaagatcatctttttacttccgggcacgacaaggaatgaagaattgtgccgtcaaattgtaaacggctaggaattgttagacttgaaattcatgaagacagaagaagaagaagatttgcagatttgtgtttgtacttgtgtcgtcttttgggatagagagagagagagaagtaacagcggataaacagaaaatgttcaagtgtagattacgccaaaatatcacatgtgttttaattcgattgatttacttttttatcaaccgatttttatttctttctattaatcgatttatattttaatattatgaattgaaataatcgatttcttattttatatttatcaaaaaaaattgtttatataaatgatatatacggttatgtactatttattgttattatatataatttaacaaaaagaataaaataaccgtatcttttaaatttggaaaaaaattataatatgtgagtaaatgtggcacatctaagaaaattggatattcaatagttttgaagatggaagtggaattccaagttggttaatgttaaaccgttgccaagtcaataatcagtcaatctttattttatattatagatgatgttttatcatccatgttgaatagaaaaaaaaaagagatcaatcatgatgtataaaaagtaaaaaagaaagagaaatattgctatctttattttctatatgtaatttctgcttcatagagtagaatgatcaacaactttttctttactactttttaagacaaatctgataaatttctacccgaatttaagtaataaattcgacattttgaacaggcgtggaaaggttgcttagcaaacacgtagttacttatcaaatacaaaaagtataattgcgtaggtgaataaggatttggattcttaaaaaagaaagaaaatggagaccagtcaatggaaggttctttcttggcatcatctccttaggctttcttttttctaatttctttttttttcatggacaacatttctggttacctaaaccacataatgcgtacttttgacgcacttcatacttgtatgcacagaacaaaagcaagtgtgtatttgtttatacagaattgtgtatttatttatacgtacgtgttttgtatatgttgaaactaagaatccattggaaatgcaagttatacttttgaacaacattggatatttcaaaagcaaaaaaacaatggatattttcaaacaagttgatgaatttaggtaacttgaagactcgattggtttacgtacgggtcaaatgtatcatttccaatatatagacgaaggacattcgttcatttccaatggaatcaattcacatgtaatgtaatacaaaattagtttggatcaatgaggcggtttcataatatcaattcattcaaatatggttataaaaacatatctcgagataaataaagcaatgccctttttttttcctttgtggctaagttatgaaggtgtggtgtcactttccacggaatgtcttttatattgtttcgaggcccataaatttacaaaagactaattaaccataagtttatactatttttactttatttttggcttgtcatcaacatttgtcccatttttcaaataatgttttctcttgtcatgtcttgtttttatgtaacttttttaaaaattagacactcgtacatgattagatatcatcaacttacttgctttccacacaaatatatattatcttatcttagtctaaattaaaaatatataataacaacgaaaaaagtacagacaaatgagctataatctaataatttttggtttcccatattaataaagatgttactatacgttgtggtcgcttttcattggactaaatgagtagaatttttcaggaagtattaaactcttatattatcaaatcacattttctgcgcaaagcattaagaaggaggacatttgatactcacaattactgttaggaaggatattttacatttcaaatgcttgttaccactatgcttttcggagagtttttatgagtattgaatctaaggaaaaaaacatattatatttctgttctttattatttttttcatgtaaatttatatcttaatataatttttatttagttaattaagattttatgtgccggaacacatattgtcttttcatcggaattgaaatctctctcgaaacaatatttgacactcgtatctactatttcttcgtggaataaaaatgactaataagactatatatttttccaaccacatatttatatttttatcctgttatatttgtacagtattttttatagtaaatatgattctttcaaaaatattcaatatttcttaccacttatatatcatgtctcatttatatatcatgtcactgtattaaaattatataattatgtgcattttttgtaatgaattaaaatatttcgtaatgttaaatttaacagtcaatgttgtacaaatgacataatttcagaaaaaaataatacttttcagttccaacattttccattcctgttatttacaactataagagcatttccaacatacctctattttgtgtttatatactctattttaaaataaaatctatttcaacttacttttatttttacctctaaaatacatatttttttatatagtttagttaaaaaattagataaaaatagacaaagacaatagaataaaatccagctctattataggatttttttattttaaaatcaagaatagaaaaaaatattagagatgctctaattttatattggctccacctatccatcaataaacatacagctcttgacaaaaaaaaatttattttttttggatttatttcgtaaactatattgtaatggaccacaattcaaggtccaaaactctagcccaatctcactaaatacttggttttatatagatgtcatagatcactcaaccaatcaaaaataccaatttgtttttaataaatgtaaaattttattcaaacaaaaacctttggtacaataaatgcatcttttagcttaatgttttgagagattagaatgagagtgttgaaacacacaaaaagtgatagagctccaatttaaggtcgtgagtgaaaccggatgcggataccatcgtcttatataatataaattttatataacttatgaacctagactggcatgttaagatctcttagatcattttgataagttgaaatccaagaatcaataactttaatctctttctctctttgaatcactagccactccggatcttctttgctcttcaaggtgatatctagacaatgtgaacctgctcatatattaactttccattcaaattttgagagagttcatcatcatctccataaactatatgttggatcaaatgtttaactaaaactgaaaatttacgaagttaccattttttgtcgtaatggcaactaaagtatctgaaatatcctccaaaactctagaacaatatcaaaataattcccataaaaccttcaatacattgatacaccaatatcatatttaaacatgtatgaacaaattattagatttatttacccgccaacgctataaggatcagacaatccattagagaaaatgatgttgcttccaaatttttggaggattaacttgacctcctgcattaaatagttcataataagttctagctaattattttcatcaaactattacatatagaaaatcaacacaactctgaattatttttacaattctattagtacgttgattttgttgttctaaatcatgaaattttaaaaaactttacaaaaaataagcaaaatgtaagcaaaacatatgtaaaattagaaaaaattcaatctatatatacattttttgtaaggattttgggttgaaaaatccttaaactaaatattaattagtttttagtctctacaaatactatctcaaaataaatattgtcttaacaaaaccttacaaatctagtttcatattaattagttcaattaattttttccgttattgccaattatatgcttttctaaatattagaaaatctctcacgaatcatatttaatctcaactaacaataattaaatcagtcttagcacaatttaagcatatgcgattcatcgaatattcgtgcttcattaatttcaaaatatgccaccaatatttgttttgattttatagaaactattaactactatttaaattcgtatttgtaatatattccttagaaaataaaatcaatagtttgcaatttaatttagcggtatttaatggtattgtagatgtgtaaaagggaaatcttgaaaagaaaacaataaatctaatgacctaaattgaagaccttcgataaaagaaagagcttcatcaaacttggtgatacagtccgagaaagattcgaacaacaatttgatggtgtaggaagaattcaaggagtacgcatagaaaatcaagaaactcaagaaaaatcccaaaaaagatcttgtagccaataatcaaatattcaacccgggtgaagcacgggtcatataatctagttatgattaaaactagagacagtaaatacaaggaactatgaagatttaatttaaaagtgtttctgaacgatatttgattaatcatatatacctgaatgccgaaataagttgtgatccaatgtggtctaggagtgacaccatgataagacttacatccatcaatgtaactggtcatgttaaatggtgccgttgggaacattgtatcttgtttgtcatatcccacgggcatcactatctcgctgcagctctatgtaaagatcattcatgtaaatttattttctctattaactagtcgaattatgaaataaaaccatatataaatcattaaaatatctttagaatccactaaaatctatccacgaaattaactaaaatggttagtgctatgcaccgtacgtccgtacccttttaatgtatgcgttcgatcgtgttttagtatgtttttaaaagtagaatttacatacctgccatctccatgcgatgttattgtttgttggctgcgcaaacatttttgtatcatagcaagttcggttgcctactaaagcgacaacaccagcaaaaatccggtcgagtaaattgtatctacggtttggtggattggcgttgattgcgttgcacactttggccacccaaaaattcggacctcggttgtattgaacagcttcggcatatattgtgtccaaaaagtctttgatatcgaagcttccgttcaatggactgataaataattttgaagaagaaactaagcataaaacatagattaagtggaaaaaaaaaacaaaaaaaaattaagatatttctttcttacgcgcaagttttgaattgtttgctaaggatcgagagaccattgggtttgccagcaactctatcgatttctatccaagaattacggattgtattataacatctttcacttgcttcctaatggaatatattttagagaaaataaaaaagaagagtgtaattagttaaaattagtaaagactaccatgtaacaacaaaaacgaaatagttgaaattaatggactgattgtggggaaaaaaataactcctacatgttgatatgggttctgagtggataattattgttaccttgaaaactttggttacaatataataataaccaaatttaggacgagtatcttcaaagtagagaagaggagctgaagatgctaatgctccgagtgctatgtgtggatattttagcctgaaccatgccgctaacacttttataccatgaaaaaaatttattatttaaaaattcattaatatcatataatgctatttaatattatcattatgagataaagattaactacatcacataaccacataagttacggttatgataattttaacatatgatgtatacacatacactgaacttacttccaccataggatcctccaattacaatgatagggctgtgattggtggagtacttctccttaacgtgcaagagaatcgcggcatagtctgctagggcttgtgctgcgttcaaataccccaacgtacttgcgttctttagtgcttcttctgctgatccaaatggcatcgtctccccataatacctatgctgcattatacaacgtttgaatttatataatagttactagggtccctagttactacaaaagattaatctaaccgcatgtattataaaaacacacacacctctatgtagacgaggagcgcatttaggcgaggaccgttgtcacgaagaaaaccgatggcagccaaatcagagtctaacgacgattcttctccaagaaatgctaagattggcgcgttggctttagcaccaccccagtgcgtggaatcaatggcgtatctttgttgaaaagtcatgtagctttccggtgtgaatgtgaagtgatcgagtgtctgattaaagtagtacattttaagattagattcatctactttttgcgttgatccatcaggttcattctttagcgtttttgaggaaatcccaagtctagcgattttggagtgtgcgagggggatcaaataagatgaagatgttgaaaatataaatagaatgagaattgtatatggaagagacattttagaatgagagtgtttatcttagtaagttggagcggtatattcactaagttggcttcccaagctcatgcaccagtacctttttatagatcccaaaagttgtatttgcccaacgaaaaaaagatcccaaaagttgtaatgcactcactatattataaacttatatagttatatgtgtgtatattttgatacttatatagggaatgcaatctaatataagttctatggttttcagaaaacatgtctattttgaatttaacatcactaaaaattccgaaaattagaaagtcaattaaatattcaacaaaaaccaatttgaaatcatacttgtgacgagcgatcatctaaactagtctacttaatcgagatcataatcaaagaaacgtacatgttttggtcactgcacatggttaccgatctgaagtactcttccaagctcttagatattttggagcgatattggacttaactgtcacaatcatctgactacaaatcaactatggattgtccaactcggttgtatcacaatcacaagagttttaattgaaacagaattttctaacatgtggcagttgttacaccatggaattcaagtggattattaactttagaattttgttgcgtaagctgattttcttaatctctcaattttcctaaccggtatattgaatcaatttcttcactgaccgatcaagccatattttcctcggaatcgtcaatcagtaaaaaaaaaaaaaacgaaacttttattcaatctcaaacaaactatgattactttatcaactaattacacacgacatttatatgtgcatatacagtagttttaaattcacacgatctaatgtttcaagttaagaatcatgggcttgttttctcctaaacctttagaagtttataaaacccaatacggttgaatattgtagtgaccattaactagtgcaaaaataaaattcttttaactctgaaatttgcattgaaaaattatatatatgaaagtgactctctccatatgattgatacatcatcattttagcatttgctatatgtctatgtctattaaataattaatgtaaactcttcaacttctaatttataggttaataatacatttattatttaatattatatattatttaattttatatattattttattttacatatttaatgtactattactactttattttaatattacatgatttttcaataaaaccattttaatagctttttcatactcgaagatttttttttgtaatccaaactcaaagtatgagtatataataattatggattagttaatgatttaagtaggttattatcttaaattgatatttatataataaatcaccgaaggtgcataatacgtacgaagttccatcatcaaattcttaggtttctagaatcaaagactaacttctgttaaattggtttaagatgaacgttgtttataaattatgtgtatgatgaaatattgagaatgttgttagaaaaaatatattttaatactaaaaataatttcttattgcattagtgaatgattcgataaataaaattatttaaattaaacgatacaaaaaaatccgaaaaaactgcgacaaatgatgtagaactctgatattttcagtggattatctttctttcttttcttgttttttttttatttttctaatgaatttgggtagcctagatatttctattcatccatcatatttagaactctgatattttcagtggattatctttctttctttctttttttccttttctaatgaattcgtgtaacctagctatttctatccatccatcatatttttgtacaagttttctcgtagagtatgatgtagctagagtgcctgccagtctgccaccttctcattctttctttcttttttccaccttctcattcttcattttattttctagcagtaaatgtttagagttgtgtcaaaaatagaaaataaatggatgttgcattcaagctaagtaaccaagaaaaagtgtcatattgtgataaagattgcgcatgcaaagcgatgtgcatatatgttcattgcagattgggctattggcaccaccaatatacatgcttgcttcatgaaactgctatcatttctttattttttatgtataaatttaaattaacctatgttttcatataatgggtgcctttggcccaaggactttcactttcaattttgttttcggtttaataatcaaatcttaacctatagtttttgagagaccatagaccaactattagtctattaactgaatcttcataaattcacggaattatacctaagaaaaaggtattttgaaagaagaaaagcaaaaattgtaaatcttggaaaactaactttctttaatggcaaagttacatacatatccttataaaattttaatggttaaaaacaaattctaattcacatctggcttgccaaactaattcatgatttttctttatttttctgtcataggctataatgtaaaatgtacgccattgtccctttccttctaacaggttttgtgtggtaattcaatttagcctaaacgaatatgtatttgcctgacaaaaacatgtggcatatattcattattacctataagtgttgtagccgatatatgccttcaacattaaatggagaccttatcaagaatagaaaaaaaatcgaaatggagaggccacgaataagtggtgtatttgttcaaaagaagaaaagaacaagtggagtatatgtaaagctgtgaaattagaataatggttgctcaaaaagcactacgttctattcacataattttgacttggtataattgttctatgcaataggagattattatttggaattacctaattagaaaaaccacgacatctactacaatcagaatggtactctaaggtaatttatgctctggtgcgattctaataataacaaaaaatataaatgtatatatatgcaaaaaagatttttactattagaaccgtacctcactgtacagttcgatttccatttgaaaccttagatatcttatatattctttaattatagatttgattggggtgataaatttaatcttaaacatagtcaaacattcaatcatatatcttccatttgttatgattcttactctatcgcgccaggactgtttgcaattaacgaatccaatatcttcgcatgttacgggtgcatgcaacctattttcttcaacatacatccctctatttctaagtaatccatgttcaaaaataaaaatcaatttttgctttaaaaagttacatatttataatttattatgtgtagttattattctttttcggtttatctctgtaatattatcatctaaagcaaaaataaaattataatattcaatttaataatatttctacaacacattttttattaaaaaaaaaattgtttctttttctcatattcttcgagaaggttcagacaagctagtctgtgttcacatttcacataattattatgtctctttcatgccaacacttttaatcagaatgagctatctttcttttccagtgaattcacgatgctttgacggtcaaagatgattagttaggtcaaaagacaacgaacagataattatctttgcattcctagagtgcaaattgtggaaatttcgaaaaaaatttctgcatattattgtctcgctcgaaagctgataatctagaacccgtttgtacgacaaacttctctcatttgggcttcgagcttcccacatttaccttatctttaattgggtttgaattttttggggttccaatataaattttaattgggcttaaaatcaaaatatggcccataagcaccttgtaatcttgtcacaaattagtttatttcacgtcgtttgtacttaacagtatctataccaatgaaaaaatactatatatattcataactattatacacatattatgaatttcatggtgtaatttttttttttttaatacacagtgttgctagagcagtatttgaccccaaaaatgtatagatgtttagacgatagaaaaaataagtacatatagaaatgcaattcgttcatgcataacataacaatgcaattattagtgtgacaatgcaaagttactaatcaaatatcagcatcacatgaactattttgggatttgttaggctgcgacaaagagaccgtgacatgagaacacttaatcttagctgtacgatgtgatgacttccatatccccactttaaacctaaccctagccttaacaaaaacttcaaacccaatctttcccaacgaattttgagacctcaaatccttaccattggattttgaaacggcaacgttttccgcaatcaacgtttcatcaatctgcttaacgttcatccgcggttggtgaaacggctccactgtgtcgaacgcaagcgtctggtctttgaatttaacgaatatctcgacggaactgtagtaaaccgagattctgtggttagggttgtgcgattggatggtgaattggaatgtagctgacatgtgattgtcgttggtaaggttaaagttttgaaccgaggcgttttcaacagtgtaacgaagtttcttgggtttggtttcaagccatgtaatgagaaaacctacagctgccatgaagattagagttagtataacgagaaaaatgtagcatataaggctagggcggcgcaatggctgcgctggcgaagtttccatcggcatcaattctagcttgggcttgtgacacattggtttatatgtatgttaatgtttgtatatatagagtatatacttgtgatgcaagatacttggaaagtgccttgtattctgatgttcttttcttcagctgtagagcgatcagagatatatgagttatttgttattgtccctttagaacatttttgtcccatatactttgctttcccatcgactttgcttctagcaattgtaagacaacactcaaactggcaagtgggagtgtgggacatgaccctatataatatttttatgtttaaaagcttattttcaagaagacagatcattttaggcctcacaccaaagcttattcttagtgtcattaattaaaattaacttgttacaataggaacaaatatcacctgcgaagatctcgtctatttgatcattcttgttcttattgtcattagtatgcacataaaaattgtagcaccttaacatttgtttataaactaggttttaactcgtggtatacagtgatcgatttttataatcaaaaaatttaaattttaagttgtatatgttttattaatattgtttattttgtttagtatttagtattgtataattgtattttgattgtaagttccaagaaatttcacttgtaatatatcgtctcatattaatatctatccaaatccgtcacactatatatccccgtccaacaatattaaacatcattttgttattcttcttttaacttatatttctatttaaaagacatctgattcaactcaatttaaagtttttttaaaatggttcacataatatatatatttttaattgttatagatctcagaaattattaatattatcaactttttatagaatttatatattaaaactatattacacattttacaaagtttaaaatttttaaagttcaaatatttataatatttgaaacttcatataagtttgaacataataaatattttgaaattttttactatctttaatttattaaataaataacgtgagtaaactggataacacttttaattttgtgacaaaaagacattactgatcgacgtttcttgtaataaaataaaaaatgtcttgttttcatatattttaagttgatgtctcatgcttctagtcactgtctgaaaaaaattagcctgtttttatttatatgaatttaatagaatctaacggtaatttaattccttataaaactctatcataatcgttgtaaatttaaaatataaaaataaaataatttgaaaaaaatagtaaaacataagcaaaaattaagcaaaaatatgtatataaaataatcatatgattagtagtggaactcattaccaacttcactgttaatcatattcaaaatctaccatattcatcaacaatataaacgaataatccattggtgattcatcaaccatctctagactctagattacgcatcattcgttgataatgcaagcgaaataaatttataataggctagacagaagattacaagactttattcaaatctgaatctattaaaaaccaaaaacttcttctaacgttaaacatttcgatcttgtagatccaaaccaataaagcatgtattactctatttagttgttcaaataactgcaccttcaacaataatgacccatatttttatttttatttttatttttaataatgatccatataccaaccctattttccatataaattaaaccactaggaatcactcgaaaataaatgattgatatgtcgaaggaagaaccactcgaaaataaaggttttcattcgttgagtaacctttcaaatgtaagttattacaaacacgttattggaaattattataattagcatagaatttttattatattaacaataaatcaacttctttaattataaaatataatttaaaatataaagaataaaatttaggagaaacttaaattgttttatatagttatatctcattgatatgataaattaatatatataatgtttaaatttaaaagttaacacagaaaattaatctacaaacaatatatatatatatatatatatatatatatgattttgtaatttgagtagttaatgcatgaactcaaacatcaatctttggtaatgcaagtgacatgaatctataatagcctagacacaaatacaaatgctttattcaaatttgagtgagtccatggcggacccactaaagaaggaagggggtcacttgaccccccttaaaaatatataaaaaacatttagtccttttaaaatcctaaagtgccagtatcatatttggtaattctcaaagtggtgacatctcttctaccatgttcgattcttgtagacataattattttttcattttttaagtttatatttatttttctgaaaatcacaacatatttggaggatttaaagtagcaatatttgtgtttgatactaaattaataaatataaattataaattaacaaaaaggtttagtgtttttgtaatattattttgaaatatattatacgatataaaaaattttaaaattatttattttatgactccaataaaaattatttttgggtccgtcaatctattaaaagcgtaagaatatttgaagacaaaaatacgaaagtttactatcaattattctttgatctgacaccgcagtctgtcattatcaaaggcaatttcatctacaaatttacatgtgacaagaaatgttgtaggttttgaaaattgttttcagttgtggtagattttgaatgagaagcggtacatttgcaagattcccaaaaattaaagactaataaaatatatttaattattgatgctacaaatcttcgaaacattttttatgcaaatttacgaagttagcccaataagttattatacgagtacggcccatttaagttatctacagcccaatatcaatttcccagatcgtcacgtccaaatttgtcggttcatacacctccgcggctcggtacaaatcccaaattccccaaatgattcactgagtcgactcgacctcctcatatcccaagtgagatcttcttattgtttatccgtttggttcgtgattataaattttaaatcttgcaagatgttctcatacagttatcgctacagatttcgttcgaattgtttggttgaaatgtttggattatggattcaggacccttgattttgctctttacttgattaagaacatctcgacggattctaattggttttcttattgtataaatgtagtttttgtcgaataatactggatttagggcttttcgtgtataaaaactgttacttttggcacatcacctgtgagatcaatttaaaaaaccattgaggttctgatctatatctgattctcacttatgtcttgatttcaccatctgatattgatcagtttatctggaactgatgttgtaaaccatgtcttgtctgtgaaaaaacaagctctgtgttatgtatctaaatgttgacacatgaatttcagtgtttcacaatgtcataattcttgttttgttacctatatgctattaggtgttagcgtctgagttcaaatgatcattttataacccttatgatgtgacactgattccaattttgattttggtttctctctagatttttttgtttgggttacaaagccaaaacgagagattacaatggcaccatcacgtaacatcgttgtagccaccggtttggttcttttcgcatctgcaggcttagctttccccttttacatggcgtaagcaccctattctatctctcaaatgttattttctcatcttgtggtatgacatttgttgtttactctgtctcatttgggttgcagatcttcgaaacaaccagttatcgatccaacaaaaccattacctcctcaagcaacttttagaggaccttacataaacacaggctcacgcgatgttggacctgatcatcgaacttacccaaagaaatgatccaatcaagtcaaaacaattacgcaggtgttttcattgtgagctttgtattcataagataatatcgttttgtagtttgttctccaatccatttaagtcgttgtccttcatgtaacaccagtccaacttaaccattgaatgtaactgaagaaacagatttattcctgcataagaacttgatttttgattgtctaaaaagttttgagactcaaaatcacataacttggacaatacttctcaaatcaaagcttagatatatacgcaatgagaatcactgtttcaattttttttatctcagttaaagtggagctctttagattctaatcaaaattaacagatttgagaaattgagcaatgaaattgcaatcgaacattggaaaattaagtagatttcatagccgtgccataaattaaaaccctaattcccatattacataaccctcaaagatacccaaaagcataaaccctatttcacattccaactactactactacttctcctccattacaaaaccacattccaaatctaagaactcgtaaacttcgtaaccgccttagtcccttcagaaacagcatgtttcgccaactctccaggcaacacaagtctcaccgcagtctgaatctccctagaagtaatcgtcggcttcttgttgtacctcgcaagcttcgaagactcaccagcaagtttctcaaagatatcattgatgaaactgttcatgattcccatggctttgctggagattccgatatctggatgaacttgcttcaacaccttgaagatgtagatcttgtatgtctcaacgttcttctttgatctcttcttcttcttgtctccggcgccggctggttccttcgggagtttctttccggcttttggtttcttctctgccgctgctgctggttcggctgccggagttttctctgccggtttcttctccgctggtttcttatctgccttcgccattttcaaacttttctagggagtgagttttttttgctgtgatggttttgatttgatactgttatcttcgagaattgtgtgtttgtttatataagagaataggaagagatctgattagttaagatactgaaacgcggatgcgtgacgtggagatatgagtgctgttcgatgaagggttttggtgaatggatggttcagatctattttactttaatgcgcgagtgattttaaatttctttttcgaaatattgaaaaattcgaattttctgttgcgctttttgttatccgccataagttcatgaagcggcaaagagagaaaaagtttttggcgtggatagctgacgtggttacttttgatccgtctaccaatgaacggctatgattttaccgtatctacaaagttggtaacaactttttcctatctaacatttttatggaaatgaagaactaatgcataattataagttttcaactctttcaaaattcttcaaaaataaccaactttttatagatacaaattttgaatttctctaaaatacaaacatttagttcagcttaataagttggactcatcttaataagttaatatgtagttgtattttaacagagttaacgatgtttcttatattttcttaaaattctgcatgatatatcaatagatagttgttgattaatctgagaagtgagagacgtattaaacataaattttgattctcactgattccacatatttctgagattagtgaaaatctatgcatgatacccatcagaaccaaaatcatttgtaacattaacgttaatgcacaagtcactatgatacaaatctgtatattatcttatctttgtgacattaatttagagaatatagaaactcgtgaaaagaaaaagaacaaaaaaaagagagggagtgaatgcacgtgtcatttcttgagatatcgtctatgaaatctctatagacctcaaacttcctatgttcttactttagggtgattgtcggcggcttggacgacccatgtgccggtacgtggcccaaaaacaaagaaacgtggctcatcagcttgtctttcctagaaaatttagtcccacaagagcaaacccactttatatccccacaatgcttctcgtgtgtcctaagatcagacagaaccgagaaatgcttcacactacatctcctgcacatatacattttgggacaatgactcctcttgtaatgattcttggcgcaaatcacagatttcaacggttgaaacttctcgtgcctctggttccatctacacccgtgttgaggacaggagtagtaatgtttctttaacgagtatcctcctttcttgtcttggctcgttgggctgatcaaggcctcacgtgtcttgtactcatccccgtgcgctctcatgtgcatccttagattagcgtctctcttaaaccctttcccacaaatctggcagtaatgcgtgtatttcgctagtaggtccgctacgtctagctccagtatatcgtagctcccggaacttggtttagaacgatgtttatcttttttagggtttatggtttcggtgttgtaccaatcaagattctggtcgggaaacgagatctgccctctttcttggacaccaaaaaggttggtcgactcttgcacaaaatcatgacccgggtcggtttcttgtcgggaaaactccaaaaccattgcatctacggtttgatcattatcgatatcgttgttgttgttgttagatccgatttggagttgttggcaagtatataacatggatgaagcagccgtgatgatctcttgaaccaaacttccgatgttagccacggccaaagacgttgaccccgaggattggttaatgttattagtagataccatgtagaagctgaccagagattggatctgatggactttttcatgtaaggtagatagattgtatagaagagagagtgaaacgtcgtcgtcttccattgatttcgtcccggtcgtggtcacgggattaacatagatttgttttgaggaagtactggtctccccggagaagctagagattgatccttcaactttctttgcaatatgctcatctcgattcatcatatgtatatgcatgtatatgaagaatctagcttgagttttgttcttatattttctttggattttgttgaatctttaaattctttgtggtatatttgtttcatatatatgccagacggtccagactctagagagatgcaatgaagaagacaccctaccctctaccgtataaaatactcgcgagttgtgacatacattcacacaaaataacacacacaaacaaatacatgtcacacatatagtaatttattttttcgtttcactttatcaaacatcttaaaatcggaaagattatactaaattgagtaaaatttgaaaactaagctattgaacctaactatattttgaaccttgcagtttattagtgatttaaaatccaaaagatattttgatccaaacaaaatattgtaattaaaaaaaaaaacattctaattgatatattatgtcaagtaatgtttttttttcttaatttagaagttagaatttaagaattttatgttttctagagacgggacacacgttaggttacattcatctgttttagaaagaaaaaaaaaattagcgggggttgatgaacccttaatcaaccattgggccaaaggacttccacaactatatttgtttatgtttatgtttgattttatttaaaatcagatatttaattaaagatttacaaagatgttttaaattaaaaagacatctagacgtttataaatatacgatacatagaagttgtaaataatgtctttttgtcaataatgacaataatatgcaatatacagattttgatgaacccggatgctggcaagagaaaacgctagaaaagttcaatagactaagtttttgtcgtcatgaatgatgttttttcttctctctaaatgcatttgtcatgtatatgaattatttacattaggttgaaaatggaataatagaagtatgtgatgtggttaggattaacttggaagtcaactcgagatagcaaaagcgaccatccccacataaatcctcccccggatgaaaccttaactagactttgtcagctacatcttatgagttaaataaacgaagaaggtcaatcccgatgtaattaaagaatgattaacctaagtcaagtgttagtgttctttcatggccttttcttgtattgttctatatacaatacgttctgtaactgtcaagctcacatctatataatatcttatgtcaaatccaatcctttaaaaaaaaagttgcgactacattcagttctcttatctgcttacatgcacacatatttttttttcttttcatgcacacatatttgtacacgcgtgcatatacgattatatgattggatcttacatgaaatgtttataatgtggccatcggcatgagttgcaattatattaaataaatattgcttatgcgtgctcattttttaatttcggaagaagtagttttgttggtgactaatcaaaatttctatgcagtgatgatgatatgggtgatcaatgctgtttcttggggttagctttggtgagttacgttactttttgtcctttagaagaaaaaaatgccacgttagttaacgctttttaaaaaaaagaagttgctgctaccattacagtgacagtgtattccacatgcgattctagtagagttttttagttctttttgctgggaaccaacctgcaaaccacatttgtaaataagacgttattaaaccagacttcactaatataggccagtcgaactggctcaccacaacatgggaatgtaggatgacatgaatctctgaattacaaatgtcatgtatataattaccctcagttttaaaatgctacaccaaacaaattcaactcaactactttaatttagttttcaagtttccaatatgtgaccaaaaagtgaaagctaacaaaaacaagacctttgcgtagctgggagttcgaactccactttccctattattacgtactttgtcaaataaaaaaagaaaatataaagaaaaaaaatacacaaatttcttttggaaaaattatgcttgctacccaagctaactatttttgaatgagttttaaattgcaatttcaaattcctccaatctgatcaccgggacgtgagcaagaacacgggatcggagatgattactcgtcatcataatctgatgatccatcggaatcaccggagaaatagaggcggcacgtggtatcgccagaagttggattgtaatttctttcttcatgacctttggcaatttgtctgttgtagtttgctcaattacccgtaaattagcagaattaagttgtaacctgtaaaaactaacagtaatcagacaatcctttaaaatatatatatttatgtcgccggccaaaacctgtttcttgttggtaacgtttgcccattcattatttactattattagggttttaaaactcagatgatcacttgttctttagattctgttacctaaacagtaaaagaagaattaattcatataaaagatccaaatccttgtaatccttctccgataacacattgctcctggaatctttttttttttttaatttgtttcatttgagggttcatcatcatcaatggaggtgtttggagataataagatgttttacatgagagacacatggagagaaggaaccatgatttgtgacgtcttacctatcaaccctagctccaatggtgtttggccgcaacaaaaattctcagatcctaacatcaatgttcatttctggaattacgcgtttccacacttgcaaatgatatttctcatcatctctttcttatggcaattcttacatttcttccttcgacgtcttggcatgatacgtttcacttctcatatgcttgtaagtaatcgaaaatctcgatttcgttttcttgttatctggatttgaaatttgaggtttgtgttgatctttgtttgtagactggtgttcttttaagcaagtcttttctaaaggagaattcagcagcgagaagattcttttctacagaggattacaaagagattgtgtttagtctcactgctgcttgttcttacatgatgttctggttcttgatgggagttaaaatggacacgggtttgatccgaaccacaggaagaaaagctatcaccattgggctctcctctgttttactttcgacgttagtttgttccgttatcttcttcggaaacttaagggacgttggaacgaaaaactcagaccatactctcaattcattagagtatgttgtgatttactcaatccaatgtctttcttctttccccgttgttggaaaccttctctttgagctcaggctacaaaactcagagcttggtcgtctagcgatatcttctgctgtgataagtgatttcagcacctcaattctcgcttccgttctcatatttatgaaggagctcaaggacgaacaaacacggctcgggagtgtgtttataggtgatgttattgcagggaatcgtcctttgatgcgagcagggatagtggttctctttgtatgtattgccatctatgttttcagaccgttaatgttctacattattaaacaaacaccttccggtcgtcccgtcaaggcaatctacttaagtacaataattgttatggtttctggttcagccattcttgccaattggtgcaagcaatctattttcatgggacctttcatcttaggtcttgctgttcctcatggtcctcctttaggttctgcgatcattcagaagtatgagtcggctatattcggaacttttcttccgtttttcattgcttcatcttccacggagatcgatatttcggctttatttggttgggaaggtctcaatggtattatactcatcatggtaacatcttttgtcgtcaagttcatctttactactgttcctgctttgttctatggtatgccgatggaagattgcttcgctctatctcttatcatgtcgtttaaaggcatcttcgagctcggtgcctacgccttggcctaccaaagaggggtatgtaattatgtatacacacataatgaagttcataatcataattaatcatttcaatacaaagtttatcttatgtttatgctttgaacattgcagtctgtccgtcccgagaccttcactgtggcgtgtctttacataacgttgaactccgcaatcattcctccgatcttgcggtacttatacgatccttcgaggatgtacgcggggtacgagaagcggaatatgcagcatttgaaaccaaactctgagctaaggattctgtcttgcatttacagaactgatgatataagtccaatgattaatcttcttgaagctatttgtccgtcccgggaatctcctgtagctacctacgttctccacttgatggagcttgtaggacaagcaaatccgatcttcatttcacataaattgcaaactcgcagaacagaggagacgtcttattcaaacaatgtacttgtctcctttgaaaagtttcgtaaagatttctatggttcggtcttcgtaagcacctacacggctttatctatgcccgatacgatgcacggagatatatgtatgcttgctctcaacaacactacttctctcatactccttccttttcaccagacttggtctgctgacggatcagctcttatctctaacaataacatgatccggaaccttaacaagagcgttctcgacgtggcaccttgttctgtcggagtctttgtataccgaagcagttccggacggaaaaacatcagttccggacggaaaaccatcaatggcacagttccaaacttatcatcttacaatatttgtatgatcttcctaggcggtaaagacgatagagaagcagtgacacttgctacacgaatggcccgtgacccaaggatcaatataaccattgttcgactgatcactaccgatgagaaagcacgagagaacacggtgtgggataaaatgcttgacgatgaacttcttagagacgtgaaaagcaatacattagtagacattttctactcggagaaagcgattgaagacgcggctgaaacatcgagtttgctaagatcgatggtaagcgatttcgatatgttcatagtgggaagagggaacggaaggacgagtgtgttcacagaagggcttgaggaatggagtgagtttaaggagcttggtattattggagatttattgacttcacaggattttaattgccaagcttctgttttggttatacaacaacaacagctaatgatttaggttcttatatacgtacataatcattttgcaattttaccattcttttcattatagacttagaaatttaattgtaagaagaatattttttttgtaaattttatttagaccattcaaatgtaactttttggaaaatccacttagccgatcagttcatcacaaatataatcgcataaggttttgcgatcaacaactatattaatctttatatttatagaaaatcatgtttatattaacactaaaacaacatagagggaaatagagaaactggtcaagatcgaacatatttatttaggttaaaatagtttgaaatttcatgttgaacaatgtaagaaatcgaagtaaaatacaagacattttcacttatttttcgatcagtttcactgaaacctttgttgtgcttgagctcggatgaacaatggagatatctcacgtttgaatttttctcttacataatctgtgttttagaaatcattggatattcataggagtggttatagaactacattgtgcacattactcgtattttttttcattaaagctcaggtgaaattttcaattttgttatttatttattattattattattatttttttaattttttaattttttagcagtagtgtttgcttcaacaaagcgccaagatttagatatttggaataattctgtgcaaattaactgtgctaagtagtacgaaatggattatttgcatacatttaaaatacaattttaatgaacactaaatttagataaatcaataattaactggcttatcaatgtattccaactgcgtcaaactcatctttgtatactatgttagagcagaacaactcatctctcaaaaataccggattattgatttgatatatactattttaggaacaatatatgcatgagtttcttactcaaaaacaatttggtaatgaatggattaaccaatgttgtttagatcaattatattaaatctatttccacgtcaaatgtaaattctaacatttacccatgatgcgagtataattcaatttttttttttgagatcattcactgacatatgttacactcatccatgttgttgttgttgttgaactactaaaacagaaaccctagctcttaaatctttggatgcaagcaaatctccgatgactcctaactccggaagctccatccactgtgccaaccctgttaagtccagcgaataatcttcgtgatctcttcctacaatcatcaaatcatggtcttccgccaccaatctaacggtggtggccaccgcaggtccaccgttgactaccttctccatatagttaaaattgttggccaatgaatatgtcgctttcaaatcattcaagacctcgtcgtcaacaaggtaatcccaattcttggacttatctagttcttgaccagacaaaaatctgataacagtaagacacactctcgagttctgtcccatccatttcgcaagggaaagcgcctcacgatcatctttaccaccaatgaagatcacaccaacgttaatgatactgttggtctttttcttacctttattatatcctcggtagttaagtatgccgacagaacatggagcgaggtcaaggagagattcattaacacgtctgatcataatatcgtctgattcatattctccatcgggtgaccattttcgtcccgaagggacaatgatcatcgatgtgaggtggtctaaagcaagattgcaaatgtcttgatccattaggttctcatgagaataagctgtgaaggaactaacagtggtagattcccaattctcttgttgaaactcggtgaacgcgagcatcattgtttgtatgtaagagttttgaagcaaccgcgctttagaccgcttgtcatgaggtatcaagatgggaaacgtacgtcctgcgagtttcactaggtgtaacgccgtgacagcaatgactcctctgtctttgttatcgttgtttagcggcgaggaaagcaattcaagtagcgagatcgcacctgagatgttgtcaggcttgtgcaaacaagttagaatcttgagatctgagtttgttttaagatgcataatgtctctcttgacatatccaatatacttcctctttggatcatatagtgcttttataatcgtaggcaaaatccccgcgttcaatagcacgtaaataatcatgaccgtgtacgttgctcgcgacaaattctgttaaagaaaacaaaaaacattcaaccattaattcaaaaccatatgatgcaatatatatacatgtagagtgtaggttagatgaagattattttacccttcttcttaaggcgacatcgaagaagcataagtcaacaaaacccttatagttcatgatagtggcgatgataacggattctctagtaggtaactcgcagaagatcaagcaaggtacaaaagaggcagtccatttcactaccactgtaagacccagtagaagtatgttaaaggaaatgtcatcgaacgaatacaatgctcttacaacgtcagctttcatcgccatgaccgcgattgaaatagggaaaaatatgtttgtaaccaagctctcgaaccttgcctctaacgcagatcccagaggcggaccgtctgggattgccaaccccaccaataaagctcctagaatgtacatttggttgaaaacacttaagtatatactcgcggcgattgcggtcaggattgttacgtataagtagactttcggtacgggcttgccttctggggtcatgtccactattcgttgtgccattggcttgaagatgaataggatcacaaggactaagatgatcaatgccactatgtcgcggttggctattccgggcgatacatacctgcagaccgtttcaaactattatagcaaataatgttcgttagatagtagatatacattactaatcaaacactccggtgccgtctattgtgtagataacaattagtattgctttatagacaataaaacggtaacttttcgttgatcaaacttttaaccagttttagagcattatatatattgctttaggtctccggatttgtagactttgattactacaaaagtatatttaatgaggtaagtagttttgtatgcaaatgcaccaattagattcctaaattaatcgacgtcttacatacctgtatgttccaacgtaggagatgcatactagagtgagaaatccaaggaaatcgctgacggcggctgtagatatggcgatgcggccgagctcggagtttgacatcttcagctcatatacgaggtgggttatgaccggtaacagcgttactgcttgaatcgatacaatcacggagcgttctgttggggctagcctcagaggcatataaagagggtcgaccttgtcgagacggaagtttctgaaggctaacccgctgatcatagtcacgaaaaaggacgaaaccgcgattactatcggacgtttaccgatttgatacaccgctctcttgttggtcttcacgcccattaagaacgtgaacattaccaacccaagcctggccacaccttccaacgctacgtttccggggatgtctaacgataatcggtccgatgaatactccagaagatcaagcagctgaggtccaagaatcaaaccagcctagttcaaaaaaaaaaaaaaattgttacttgcagtacaagaaaccaagcgtttggtacttgcgatacaagaaattgacagttgtggacgtttttcttaacttacaagtatgttggagacgaaccgtggtatgccaatacgtctgaggaacatatgagataagacgatgcaaacgaagatgagaatgatctgcagctcaaggagaggcaatgcatatccgaagataacagtaggagtttcatatttttccatgattccataagaagagatgttgaaaaaagtagctccgtaacaaatttcagctttgctatgaggcggtgaaggcccaggaactagtgcttgagaatcggtcatgatgatgacgaagatatgcttttgtcaaacttgtaaaagatcgatttcgttttttttcgctgataatttattcttaacgtcaaaatattcaacaacgtaacggtttgttttaaaaaaaaaacagttgctgttgtttatcaaatagttggcgcccccctttgactagtactttttggttgcgaaataattttgttacgttttggtcaaacttatcaacaaataaatgatgatacttaggcactctaatcctttcctaaaacttgaccattttggttgaccaaaaaaagaaaaagaaactaacccattttaccaaatacttattttataacaaacccaaaagataagcccaatctaagcccattgaagatcaaatattgagttgacactacctactaatctaactcaagaacttagcccacaactttaacactactaatatcaaacttcaaaaaaaaaaaaaagtattccatagtgtgttttagtagaatttataaaagagtggacccaaaaaattgagtcatcaagttggaggacatatccattatccaatcctatcctgttttctgctttttaaaaacaagacatgacatattgacattgacccacacaccacaaaaatttgttcttaatgacccgccaagtcgccaactgaattgaatcttaaaccgagtgtttcatatgttattaactttcacttagtacattaaactttttctaatagaatataaaaaaataactttctttttaatgcataattacaagtaagatattttttttaacaaaagtccgacaacgaatctcttttcacttttcattttcaattttttttacctctagttttctcattaatgttgatgaaatttggctctgactaattaactattatgtattttatttaaaattaactattatgtaattttttattatttaaaattatgtattctgctaatgaattccaattaggagtaaaccataaacaagtggaaaaatatttctgtttattaagaagaaaatttatatttagcaaaaaaaacaaaaacgttaaaacctttttaataatgagtatgggatttgttgattaggcaaaataaaaaatctggcgtgttgctgagtcatcactcatcttcatataaataaatatcatcaacatgattgctttttcatctctgcaacttcctctgtttctgattaccaaacgtcgtcaatacatttcttcaaattacgtttcttttattctttcgttactctcaacaaattttgatatctgattggtgttgattccaagtaagaaagatcaaaactttaggtaaagtatggatatgggtttccatgaaaatgagcaaaatcaagaatttgcgaatctaatggagattggatctgggcattacgggtaaataacatcttttgagtttcttttgagttttgaagctaaagtttcatttttttttttttttgaatttgattatccttgtgtgtgtgtgtttaggtgttcacattatagaagacgatgcaagattagagcaccatgttgtgatgagatttttgattgcagacattgccacaacgaagctaaggtagaaaactaatattaaaggaatagtctttttacttctctgtctttgtaacttgtgtgtgtgtgtgtgtttttgtgaagaacaagttttggttatagatgttaatgtgttttgtttgtttcaacaggattctcttcatattgaacagcatcatagacatgagcttcctcgacatgaagtttcaaaggtttttaactttgaacattctggtttatgaacattttgattctgtttattcattgtgataacaattttggtctactttttttcaggtcatatgctcgctttgtgagacagaacaagacgtgagtatctacattttagatatacaaattctattggtaaatatgtttattgatgtagaagagacctgtaatttgttttcttcaggttcagcaaaactgctccaattgtggtgtatgtatggggaagtacttctgttcaaaatgcaagttcttcgacgatgatgtaagttttgtaattgagttattgctctttctatagctggaattagtagtaatgagacttaatattggttgtttcagctttccaagaagcaatatcactgtgatgagtgtgggatttgcaggtatagaaactggcattgtgatttttgcttacctattcaaaaaagaatctgttgatttttggtaactaattattgatatgttatctcatgatgttggtttaataggaccggaggagaagaaaactttttccattgcaaaagatgccgtaagagacaaaacctcatgttcttgtttctacaaattctcgtgcctttctttgtttggagatcttattttgttttcttaaaacaggatgttgctactccaaaattatggaggacaaacaccaatgtgttgaaggcgctatgcatcacaattgcccggtttgttttgaggtataagaatcagattcacccatttcttaatgcaacataatggtttcttacaattgaacttgatgtggatgtatttgttctcagtatctgtttgattcaacaagagatatcactgtcctacgatgtggtcacactatgcatctagaatgcacgaaagatatggggctacataaccggtaaaagaactctcaaatcttttatgcaacccatgaatgaagtcattgataaacaaagattaaaaaaattcttgatgctttgtgtagatacacatgccctgtatgctccaaatccatatgtgacatgtctaatctgtggaagaaacttgatgaagaggtgaggtttcttgatctgatgttcggtctccttgtatagtctcttatgtttcactaagtcttacattcaaaattttgcaggttgctgcatacccaatgccaaagatgtatgaaaacaagatggtaaaccaaaattaaattcgatatttgattctcgtgtgtgtgtgtgtgtttgtgttatgtacactttctgatttggatttaaatgtgatgtgttgagtcaggtatggattctctgcaatgactgcggctcaaacacgaacgttcggtttcatttgatcgcgcataaatgcagtagctgtggttcctacaatacaagacagacacagagaggctctgatagtcactcttgctcctctggaatgcctcaggttgttggttcaaccggttaatttttaaccagagctggttttggtgtctgaatttcccatgaggagattatttgtactttctatagtttggtatcagtcaatgcctttggttgttaacaattatatcatcacagattcaaaagctgctttgagccaatccaacttgcaagtctagaccattatagcccaaaacaaccatatcttgaaataaattatatatattaatgtttaaataagtaaaattttggtaaaatcagtataagaatgtacaaatatgccttatctttttaacacaaattgagatagaaatttttgtcgaatttgcacattttcatgaaatctctataactctatttcgtttcttgatcaagtgaagttaaaatcctttcttgttgtggacataataacttgaagctattgcccaaataatatactgaaaggtaaatcaatccaataagccatgagtggactgtctattttttgacacagcttaacaacttatgttagtgacatggacaagaagatccggttctagatcttgaggacctacccgaaccgacaatgaaatggcttttggaccatttggttgttgggcttaccaacgacttctcacccatttcccccaaacacaaaaatatttaaataaaatatctcaaaagttacaaatcatcaagcacacccccacaagttacattatgaagacaggaacataacatcatacatagagagagagaaaatgaagctaaagtcttgagctttagatttaacataatcatccccaactgatagtagagggaaaaatcatagagtacaaaagaaacccctaaattagtttcacaatcatggagccaaaacatgaatgtaaaattgggtttttggggttgagatacaaaacccaacaacaacaacaacaaaaatagcaagcataactagagaaagaagtaaactagcaaactctctcacttagtattaactcttcattgagctaagagttaaaccaggggagttttttttttcttactttctcatcacgctaaatctaaacccacaatggagcataaccaaaagccctaatgtacaaaaagatcactctcacttgaacactagaagtgagattaatctggaattgacctatgtatgtaatggtatattagatgactattagtactacttgagtaagataaaagatcagtagccagaaatgttttcattgcccggtcattggagaagaactttctgatacttagcttctgaataggatccatctgagaatactcttttcctgttgaacttcccacatccattgttgacaattgggcattggactgtgaccggagggatctcgaagctcttgagaggcggtggcggatggcgccattgaggtaatggaccagctaagagcagtgtctgaagtaaaggccctgccttaataacagcttgtaaaagcttacccttctcaggcagtggcttgtcttgcaacaatggatccatgataatctcagttcctgagacttcttcaagctgacatggtggtggattcatgatatgatcagttggtgacataatgctctcctcgcaatcagaagatgagaagctcttgttggatcttagttgttgaggctgcacttgttcgtcttcaatgcttgaagctccagataaaggaggagtcatatgcttttgctgctgaagcgagtggctatcgaacatgagacgctgacatttctcgagagcttcgtctctttctttgatggttttggttaagatgtctttgagatggatcaattgctcgtctcttttccttatttcttcataagcaaacatctttgtttggtccagctctagtgttgtgtacagtagagactgtcttatttcttctgttgtctgtaaaaagtcgtaaaaacactcagacacataaatcaagaaacagaggaaacagaggaagcaaacaaaagaagaaagaaacatggaacccctaaattgagcaacctcttgctaagaaatgcaaaatatgaaaaatctagatgaatcgttaacaagtaggtgtagatgcagggtatattagatagaccaaggagaagaaaaacagaaaaccctcgagaaatttcttgtttttggacagacattatgtgccagtttaagcaaaataaaaattgaaagaaaaggaaggcaaaagccaaaacctgccactactcactcactagtgtttaaagaaacaaatgaaactcaaattaagaaagaaaaacaaatttacctttgcgtgagagtagtaaggccaaccaagaagagcattgctttggttatccataaaattcaactaaattgaggttaaaaaggatcttctgattctctaaataactgttcgtgtgtgagagagagagagagagaaagagaatgtgttttaacttgaggggttagggagggaaggagttatatattagtaaaaccttgtagtggactgcttaaagcagatcaagctttttcaggtagctctctttcgagttttcaataatttaatcgaataactaagaaattaaaagaaatataaaatgatgccacatgattgtatcatatcttgcaacattatttcaactaaccccactttataatttacaacgcgcaaactatttagaatattatttaaagaacaaaatatctcacaaaacttcaaagtaatgttaacttacaatgtcaaaatataattttatgaacagcagagcagacaaattatgtccctaaacgtactaaaacgtttcaaaaatataactatagttcatgtcttttttcaatcattcttatacattcgtttcaagtttagttcttgtacattaaacgatattaaaaaaatttaagtgggcgtatctttttaatatatattgctatagtttttgcctttttcttttttcttttgccgtaagtatttggtggaagagaagaccttggaccaatatcgtagtttactgactttggtctctcactcactcacattatagtctcaactcttgtaaaagtcttttgttttcttcttcggttttcttgggatgtgcaattaagtttcttgtctttatacaagaaaaatcgagtagcaccgaaaagagcgggaacgaatgcttcttcgaacaccatttttctttttctttttttttttgtttagaaatcaaagaagcatagagtcaatgcgaagtggattccacagtcagcaaaagaggcaagtaaccaaacttttcccaccaaaatattgagaaaagttgatatggaatccctttttcaattattaaatcgatcactactcgtggaataaaagaagaaatgttctcgctactcacattctcgttcacaaatgttacgtgaaaattacaaaataaacagctcatttttttatttatttttagtgaaagataacatcgctagatcataatataaccgggagcaagagatatatatcgtcggtttttaatattatagtcagtataaaatctaccatcaatagttaatttttcctttttttgtcagtatcgattatccatggggtagatcttatattcaaaattacggatataatcttttttgtgtaaaaatattcatgttcttttgttttgctaatcgatcattgatcaagtatgatatctagtgtaatatagttttttttttcgtaactagtgtaatagtatcaacgtcaaaaaactatattttgtatgtaactggagtaacaacttaaaatacgaaagtaatcaaataaatatttagtttcctcaaatattcgtctaatatcaatttagactgagcaaagttttgtaccatgtctttacttttggtgtaaaacttgtaaataaggtggcgaaaaatcaatctttatttcttgggcagaaatttataatcaattttttgaaatactttgttgaaaatgattattgacttttactgcaagtggaagtaaagtgaatatccatatttggtttgctgggcatcagcatgtgttaagtgataatcatgatggtgatattcctaatattaataatagggccattaaaaagagtgtaaatgattctctccttcaacaatatacagatgaatagtataatattattcccaaaaaaaagaaggaaaaaaaggtatttccaatagtaaaagtaaggagacaagagttatcatttcatggtctctttcaccaacattaatctaagagcatgtcaagcaaatctttgtatttctacttttctttttattgtgttgaatattaagagcttctctctttcgtctgcttaggttttctgtgtgaatggtcacgcacgaagataatgtagctttgtgattcgttgtacttactcgtgctttttataacatatacagtagtgtattagtgtataatgtacactataatatataaatcactagtacgtaaaaatgaccaactaaatatatgtgagccaatagtatttctagtctgtgttaaatgggtttaattagaacgactaagttgcggaataacctgtttttcattattattttttcaattaataaactgaggctgatctaaccaacaatatttaataatattgtgcattaaatgttatttttgcgatataagaaatgagattgtggaaaactggaaattatggaaaatctatatgcgaatcgcgataatgcgataaaatctactataatttatgttttgtatcgttttctttatatagatattatgaagaattgctattacgttatagatagcaagctaagaaaaaatgttttcttagatatggaataatctaattattgataactagtcttgagttagaaataaatagacattgttattgacttcatagatctctatatcacttacagtatgattttgaatatgatgacccaatatccaatatcttgtaatgccttattaatatgttggcaatattcacaacaaagataattcaggataagagataataatacgaagccacaaacatgggagctatccataaatgcataggacatgctttgctttcattcttcactgtcatcatgaatggaacaagtttgtatgcgtattagttttctccaattaattaagatccttaaattccatattaagggaaactattttgtcggccaataattcaattcctcatgatatgccttttaaagaaacattttaagaaacatgcgaaaacgaaattaccgttgtggcagttaaagaaatattcaatctcatttctccatatatgccttttattttcatcgtacacggcatcataatttacacctaattaacattccaaaaatcgcatgtttaacatttagcatgcaggaccacaatagataattgtcaaagttggtctgtcatgcatgttcttcattaagaatatatagaatcgatttagtctaaaaatagttatttggacgttcaaaagaatcttctaatgacaatgaataaattgacacatatcaatatgtcatctactaatttaggtttttcgtttactttctatatgagattcctaacaattttcaaacatggcatgtatacataatttacgaatattgtttttgtgtgtgtgtgtgtcataaagtctacgtgtattgttttgatagttctataatgtggacttcgacgtccgagtgtttctgatacataatatcatccagttgttttccagtaagcacgcgaaccattagacaagttctttttgttccttcttgcatgtgttatgtgttagaattttgttgactaattagcccatctcacgttgtctaacaatcttagtcgtcttgtgtttgaaaaaatgcaaaaaggaaattgaaaaacttaaaatatctaaaggtttcagttttctcgaagtagagtaattaaatggttggtgttcaaaaaaaaaaaagagtaattaaatggttgaagattttagttttttttcgtcatgttgaatttttttgttttaaaagggaaaatgacatgagttccattgagcaatcatatttgtaacgtaaaagataactactcacaatccttttttaaagaaaataaaaggtctcttgtaaattaaactgtttcgtgacatttcaactgaaggttttctcctttctttctttagttaagagttatgagttatgactttgaagaggtgtttgaaagatatttaagccatttcagatatgtcaaagcccaatacccaacccatgggcttctaaaccggtaggacaatcctgactagaattcaaattcaagtggctgaagttttagaaacaataaaatgtgcagaactccttcagttcaaatatttacaatgggttgcaaagtccttcaaggcccatttaaatgtttgttggagttgaactaagaatcagataattaagttagatagtttaaaaatataactatatatatatatatatatatatatatatggagagttttctttttgtgctttgtttttatgaagaaccacattgacacacatcatgtcacgtttggactggttgaaacaagacttgtagagaaaaaaaaaaaaaaaaactgaataaaaccggtataaacaaggtttttgtcaagattttaaaattttaataaattatataccaaatcaaaaccttcaaaacaaagaattcaagactacttttaaaattttaaaaatcaaatgtatgtgatggtgaaaatatttacaatatatgtataatgactatattgccaattattttggactacaaggttattcaacatttttatgagatgattagtaaaattgcaaagattagcaactttaggtactttcgcacaaagccttataaacaagactgatataaaaccgtttttttttgctctcttgtttttaaaagtttttctatttgttaatgaaagatgttggagtggcagaggtagagtataaaaaataatgcagatagcttcttccttctgatttaagtctaagcgacccccttaccaaacatattgcttcgattgtaatatttctacaataactatcataatatatctaatctacgtatgtacatatagacattatatagagagaaaaatatttaatgtgaagaataatatatatatgccgaatcatgaatgcctcgtgaattcattgacaataaggagactcaaaatactatagactatttattatatatagtcaaaccaaacagcatccgaagagatagtaaacagtcacaacgtataattttattagaatagagatgtggttcgtgattaactgattgttattagtgtcgttattgtgtcaccgttgttattaaaattagataaaacgagtgtatatgtataatgtatatttcaaaatgtttgatttgtaattttctatacatcaacacgaaagatccgaagtttggagtgttcaattgcccaaaaacaaatccatctagcctcgtccaaaaccagatggcagatacagaaccggaaaagaaaaggttccatggctacgctacgcaatgcaaatgatttgaatctgatgctaaggctatgtcgctgtataaagatttctagtttccttctgattcaaaatcatgacagtttcaaaaataaaataaaaaatcaagaatcgtatcataagttgtgaatcaaacgattgtgcaaatatataattagcttgaagtagtttttgcatgtaactaccaatcgtcagtgatcgatgctgcaccattgtcaaataaactacacatttttcaattaccaccaagtataagttaggctggcgaagtaacaaaattgaatctattattagaataaaatactaaatatcattccaattgaagtaacaaatatattacgccaaccttatccaataattccaattaatatattttgaacaaagtaatgaaaggaaaaaaaaaacgcatcaaccatagttggcaaaaatagtcgctcaacgttaaaatggataaatttatagtatactgtaattttcattcaattcaattgtcaatactatacatgcacgtaaatccatttttgtctctatgtatataaatatacatgtagctttttatgttcagatgggtaaatgtgtgaattgggttggttacaatattaaatgttgcatttactgtagtctatctaggtgacttaaaaatgcgaccaatcagtagctgaattcttattaaacaataaatacacccaaattttaacagatgccgttactaattaaccattttgtgattggtacaaccactctgatattctttatccatgttgttgtgacggtagatttcgtttcttagaacattcaaaattttgtgggggatatagtatgaaattatgtacggtgactttgaaaccgtgactgattaagtgattaagttttggaggatatgaggctaaatatttgtttgaaacgtatttataaactaagttttacaaagtttattattagattaataacaaaaacctaaacaaaagatattcgcctcaagagtcaagaacattcattttctctttaacctttcatctattatttgctccaaatcacagcagagaccataacaaaaagctgttgtattttagtatttatatgcttcttttacaacatacaaaaaaaaactttatttcgtcttcgttgtcttaccaagtgggcattacttatacctaaagatagaagatgtccagcttctatcatcttaggcaatgtccgtgctcataaccacttttctaagtcttacttataaccacttgtctacttgaattgattggtgtgatgattaattggccattgatagaagtataattaggacaaagtaaatatggttttaatgatatctaaccccttaaataatcatatactccttccctttcactatttaaatgtttaataacgttgcatgcatattaataagtcaaaatattattcttaaaaacgacaagattatgacaatactaaggagatactactatacttggagaacaaaataaatgtatacaaattgttagccaaccaaagaataagtatacgaagctcatgcatgtatgacacaacgacacattctgataacaaccaaacacttccgaatttaacaactaatgaataacattacaaaaacaatggattttaaagtctttttcgtgtgtgtatgtaaatgtgttgcactctttctccccacacacagagtcacagacccagtggccactggccagtgcccttgtaagctttttagataccttttgcatttttttccaagccccactctaaatatatttataatatataatattatagtggatttgttcgattacaattacatgttattattttccaaatttaaatccgaattttagatactaggttgaaaaaacggtattttaatactcgtttgggatgaagtacgatgtatttttggctgctcattttctaactgaaaaaaaaaattatcttatttttatgtagggactattaacaaaaaggctaaaaagagtttagaagaagaaataggctaatcttttgataagaaaaatatacagtttctgattcaaggtttagaatttatatttgttggattagcttttaggcttctgagtttagttttaagggtttggaatatataggactgataagcgtatggtgcaaattgcattgtatatcccatcgaattattaattaacttagtttcattaatttgtcaagtttcatttctttcattatgagaactttgtaatcagaagtgagttataaaaagtgtatttaaagtcacatctaacttgtcattattaaactacaaatgataaacgtaatccaaaaaagcaacaattagcttatcaagacacatttacataaaaagcacatgcccctcacgggatcaaaacatcccaacttaccaaaatccgcaaagtaatgatcacggagccaacaagggcattatagtcattccacgttatctgctacggttacgagaaacttgaccagcgatgaacccgagaccattgccgagctctattctgctccattgcccatcaccatgtgacgaccttctctctctaaattctctctgtactctgaaaaaaactctttttttttttgtgtgggtttcttaatgatttgttatgaccctgttggattcaaaccaaacccacacgagagaatgatgagaagtagatcaccggttttgtaattctttcaacgactctttctctacatttctcccaaatctctgtctcttgagtttgatttagctaaatcaagcaatgtcgcttgacataaagaaaccgaacatcaccaagacgaagaagaagaagacaggtttcgtcgtaaaaatgcagcttaataacaacagaggaggaaataaaagaaacatctttatcttcttcttcttcagaaactattacacatggatcctctggttttgcctctctctgtatttcttcacatcttacttctccgtcgaagaccaatcctcaccgtcgtcaatacgtctcttgtctaaccacaaaacgtcgtcgtctctcccatctcgtgctctcatcgaatcttccgccattaaaaccacctccattggtaaaaaagcctcgatctttatctcttctctgtttcaaatctttcacttctcctcaaaaattgattttttggggtctctgattaaaggtttgttcaccggaatgaagatatacgtttacgatttaccggcgagttataacgacgattgggttacagcatcagaccgttgcgctagccacctcttcgcggcggaggtagctatccaccgtgcacttctctcctccgacgtccgtacgttagacccagatgaagctgattacttcttcgtccctgtctacgtttcttgcaatttctccacatccaacggcttcccttctctaagccacgctcgctctctccttagctccgccgtcgattttctctccgatcattacccattttggaacaggagtcaaggctctgaccacgtcttcgtcgcttcccatgactttggcgcatgcttccacgcaatggtaagctccaaagtcctcatgtttaagggcttccatgcctaaagtttgtttttttaattgatttttgattggtttgtgttctgtgaaggaggatatggctatagaggaagggattccaaaatttatgaagagatcaataattttacaaacgtttggagttaagtacaagcatccatgtcaagaagtggaacatgttgtgattcctccttatattccaccggagagtgttcaaaaagctattgaaaaagctccggtgaacggacggcgagacatttgggcgtttttccggggaaaaatggaagtcaaccctaagaatattagcggacgcttttacagcaagtgcgttgtgttagccaaaacctttcacatttttttcttgttgactttgacttttgtgtttttggatttctcgtttaatttactaaaatgccattttctcccggcgtgtaggggagtgagaacggcgattctaaagaaattcggaggaagaaggcggttttatctaaaccggcaccggtttgctggataccgatcagaaatcgtgagatcagtgttttgtctctgtcctttagggtgggcaccatggagtcctagactagtggaatccgccgtgttaggttgtgttcccgttgttatcgccgatgggattcaattaccgttctcggagacggtacaatggccggaaatctcactaacggtggcggagaaagacgtgaggaatctacgaaaggttttggaacacgtggcggctactaatttgtctgcaatacaaagaaacttacatgaaccggtgtttaagcgggccctcttgtacaatgtgccgatgaaagaaggagacgccacgtggcatattctcgagtcgttgtggaggaagctcgatgatcggtcgtacagaaggtcaagggttttaagccaacgagaagtcgacatgtaggattctgtgtctgaatggatgctaggctggaatttttcggactgtttcggaattggttaaccgggaatgtctcgagtggggtccacaacgtgaggggattaactcgggcacgtgagatgtttactgagctggcaattattgagtggaatattaacgtgccccagggaagtgaaagtgtaaagtattgctgacgtgtaattcttttgatgagtaggcatataaattcttttgaatatagttgatcgaaatgcaaagttatatcaaatgtcaacttcagtttaacatttaaaagtaacaactctatcaaattaattttcttatatgaatttactaactacaactacgcagctaaataatatttggtgtcaattagcaatataacaactaacaagtttagtataagaaattttgggtctagattgattttttttcaaatgacataaattatctaagtaaggtgtaatatccatacaagttactttagtataatgccgtttaatatccgaattgtagttttatgaaaaaataaaagaaataaacatttatcttcatccagagaacaattttaaatgaaaaatccaacataaaatttatttagttagaatacaaataaattaatttacaatcgtttagttcattctcggaattctgacatcggatgtaagtaaaatgaccaaaactcaacagtaatatgaccacatcaagaccacatcaaaactcaacactagacacttacgaaaccatccatggtcttgtctttgcaagaccacattatttccattggtttttttttccttctctaacaacatataagctagaaacaacattattcgttattgtgttctttctcataacaagtgtttttcattatattgttgtaccaacttttatcgaattaagtttcctatataaaattacttattaactactaccacatagctatatagtatttggtgtcaattagcaagaagtttgatacatgaattttgtgtaaagacagaatgacaaaaattgtttaactaagttgcaatatccatataattagctttagtatcatgcaactttatttcacagttgtagttttattccaaaaataaaagaaataaaccacaattatttgggtttaaattaaactcaaaagctcttgtttatcttcacacaactaatttttttataaaagaaataaatccagtataaatctacaatttgttttaaagaatacaaataggtaaatttacaatttgtttctaaattcttctataagttctgacatttgatctagctaactaaaatgatcaaaactcaacacattaaaaaaacgctctgatcggatctaaaaatttagttgaccatctttaaatatattttatggataaaataagtaagaattaggaagatataattgggaaagtaatgaataaagataaaataaaaaggatggtgtttgtatagggaaagatgaaagacagagcaatgtgagcaagagacagctagtgtgtcagaagaagatgcatatatcaataaatgtattgtctattaaattcttatttacacatattttttgaggcccacattactttcttatcttatgtcttgtagacatcacaaaacaataaaccaatcaatattattgtaatactataagttacacaattatctatgttttaaacctttaattccttctactatcgaatacacttaggttgatctatattcttttaattacaattagcggaaatacaaaatcattgcgacaacgagcacagtttggaatgattatcatataacttgttagagtgaaattgtactagtccaaaataccaacttcattctatatttcatacacaatatgttatttttttatgaaaagaaatgaaacgtaacaatctcgcttgacttgactgtatgagcattattttctttacaagttatttgatacatgtaatgtaaccccacagttagagaaagtaacaaatatgtgtcgtacagttgttttgttctaaaatcgcaacaaaaacaatgaccattaacataattttggttcgaacgaaagtgacacagtagctcatctataatgggtatggtcattgcctcattggtcaagtatcatccctggcactaaagattggttaattggggtctgctggatccatattggacctattatctaatatgaacgaaaattatataaaagggcctccaaaaatttactttactaaaaggcccaatattatgttggcccgactttgaccatacttctaggctcttttttttttgtttggacatcatttcagttcggtctgaccgtttacgggtttttttttcttccaaaccaacaattccttaagtaaaaaaaaaaacataagataaagtatcattcttattttaatagttttggtccgccagaggcataagcatacaaatattcttttctcctaaagttttaagaacagagcaaggttaaaaaaaaaaacacaagtcgcaacaatggagagagtgatgaacatcataaagccaaaacctgatcccaaacaactgttgcgtgattggcaacgcaaattacgtcaggagtgtcgtaacatcgaacgccaaatccgaggttcttctattttacacatcttctctcgcctttttcttatggtcaatttagggttttcgaaatctaattgaattagatgctagtttagattaattggattgaatctggttgatcgcacccaaaaattgcgagaatttactctgaatcagatttggatcggatgattttgattggtgtatgaatttttcgatttgatcatatgggttgggtttgaatctatggaatttttaaagttttgattttgttcagatatacagaaagaagagagaaatgtacagaaagctattaaagaagctgcaaagaggaatgatatggtctctgctaaggttagaacccaaaaagtctctgtctttgtaagctgcaaagagaaagttttgctctctcttctgatttgagtctttggtgttcttaggcacttgctaaggaaattgtgagttcgagaagaacagtgaaccggttatatgagaataaggcacagatgaattctatatcaatgcatcttggagagagtgttggtaaataaatcttttgtgttcatcatttgttattactatgttttgtgatgtggtggttttcttgaactttgttcattggaaatctgcagcgattgctcgaacagttgggcatttgtcgaagagcgcagaggttatgaagcttgttaataatctcatgaaggctccacagatggctgcaacaatgcaagaatttagcaaagagatgactaaggtacctttaattgtttccttatctcattgttattgatacgtgttctctgtttgatgattcagagttatgatcactgcttaacagttagtatctttgtttataatcctgagtgtattctttgatatgtgcaggccggagttattgaagagtttgtgaatgaggccattgacaatgctctagattcagaggatatggaagaagagattgatgaagaggttgataaagtattgacagcaattgctggagaaaccgctgcagagctcccagtagctgttaggaaggagaggataaaggtacctgcacagaaggcgagcacttcacgtgaggtaagatgattgaacttgaacatgacaaatggttgaggcttataacttctgcaagattagattctgagagaaaaatttggttttcttcttttgcaggaagaggcagttgcagagggtgttgatgatgaggaggaattggaggaaattcgagctcggctcgctaaagttagatcctaactgtttctagtgactcttttaaacgctattcttgattgatatgatcaacttttgatgagaacacaaggagatcgcactgtattgtataatataaatgaataaccatgcttcaaagttcaaaatacatgtaaacattattgttaacgaagtgtttttttcttctttttatggtaatttcttcctaacctttttccttaatctagaaaatatggttcagcgattaaaacccggtttattgttttttctcggtttatgtttagtttacatttttaaacatattttggcaatattgataaatgattaaatataactttaggctatattgattatatgacttatctgtaaatttatcacttggttagggcaagtcataatctgagtaattagattgggataatatatttgtttatagatcatacgtataaaacgaaaaaaaacctacagtataatgaaacggacgtgacaagttaaattatagaataatttggtgacgaatcattcaattcacaatatgtggttaatagcgaaggtgatacgaaaagggagatatatatttccactcgaaaatatacttcccaacaccgtaccgaatcaaaattatagaaaattatttaggggacatgacacatgaggagagtattcacgagtcgttaatacgtcgagtggcgacgacgaagagctaccggagatagatcctaggcagaagaattaatcttccacaaaccctaggattgcaataaataacactccaaaatctctaacaaacaaaaagaaaagaaagtcaataaggacactgctttaacttatttttcttgcattggaaatcagtaaggacattacaccaaaccttatttactcctacaacatatactcgtggagtgttgaccattactcctaaatcatagactcgtggagtgttcatcattcacagaaagtaataatatccggtttaatagttcggttgagtcggataacttaagcaattgtaatatgagcttgttcacactctgttttcatttctaagatcaaatacaaaaactttaacaaactttattcatcttctctctcgttcgtaatacaaagaagaaaaacatggcgaccaaaaccttctctctctctttcctcctcatagtttgcatcttctctcaactttcatctacctttggtgatccttccgtgaaagatttgggccaacacgctggctacttcagccttccgcgttcaaaatcagccaggttgttccatttcttctttcaatcacgaaacaatagtagtgatcctgttgtgatctggttatccggcggaccaggttgcagtagcagtaaccaaagatatatcagttaccttaaggtttattacaatcccttctttcttttcgtttccattgtggactcgcgaagctaaagcgggaatgtagtggccagcgtaagactcaccggtgatatagaagtcatcttttgctaagtttggatgctctttgaaaaaagcctacgaatatgaaggtagaactcaactcaatataattaattcaaagaaaaattcttttgaaatttttggaagaccaacaacaaatcaaataacctgtaagaagtcgtataggtcattgctgacactgtcctcgtcatgcctgagatcggtgctgtcgttcgcgtaactaaaccccgttcggattggttggtccacgtaaattagattggatatctattaaacaaaaaaaataatagttaaattatggattaatttgtttcttgaggaacaagaaaggaaccaacctagtcccaaaaaaaaaacccaacctagtcccaaaatttgtgtcagcaatgacctatacgacttcttacaggttatttgatttgttgttggtcttccaaaaatttcaaaagaatttttctttgaattaattatattgagttgagttctaccttcatattcgtaggcttttttcaaagagcatccaaacttagcaaaagatgacttctatatcaccggtgagtcttacgctggccactacattcccgctttagcttcgcgagtccacaatggaaacgaaaagaaagaagggattgtaataaaccttaaggtaactgatatatctttggttactgctactgcaacctggtccgccggataaccagatcacaacaggatcactactattgtttcgtgattgaaagaagaaatggaacaacctggctgattttgaacgcggaaggctgaagtagccagcgtgttggcccaaatctttcaccgaaggatcaccaaaggtagatgagagttgagagaagatgcaaactatgaggaggaaagggagagagaaggttttggtcgccatattttcttctttgtattacgaacgagagagaagatgaagaaagtttgttaaagtttttgtatttgatcttagaaatgaaaacagagcgtgaacaagctcatatattgcttaagttatccgactcaaccgaactattaaaccggatactattactttctgtgtacgataattggataataatagagagtgatgatgaacactccacgagtctatgctttaggagtaaatgattaacactccacgagtatatgttgtaggagtaaataaggtttggtgtaatgtccttaccgatttccaatgcaagaaaaataagctaaagcagtgtccttattgactttcttttctttttttgttgttagagattttatagtgttatttatgacaatcttaattattcatatatgtttataactgatttcttgatcataagttttatttatcgagattaaaaaacaattcttggcaatatttaattcgatgagtcttttctgtcatatagacgtggacttgtgtttagtatatagacacaaggatctatctccccgtaggattcgtggaagatcaattcttctgcctaggatctatctcccgtagctcttcgtcgtcgccactcgacgtattaacgactcgtgaatactctcctcatgtgtcatgtcccctaaataattttctataattttgattaggtgttggaaagtatattttcgagtggaaatgtatctcccttttcaaatcaccttcgctattaattaaccacattttgtgaatttgcagactgttctgggatttggtcaatgattctaatgcatgtttaggatatctgatttcaaaataatgcgatacaatattagctttcatcttttgttgattcaagatatttaagatttttaaaaaacaaactgaaaatccatattaaaatttatttagtatccaaagtaaatttgaataaagatgtaaaatcaccctagtttttaaaaaataaaaataaaaacgaaaatggagaaaaggaaaaacatagtagtttggtcggaaaataataaggaggttcattaatatgtaaatcacttttcttttcttttttgtgaaaaaatgaatgtagtaaaacttaaaaagtgaaaaaaccccaaatgttatcaaatgtgacaaatgggtttgaattgtaatcaaatgttacaaatgggtttgaattgtaaacaaaagttatcaaatgttataaattgggtttgaattgtagtcaaatatcacaaatttatatagttcgaatctggaagtataacgttaaacggaaataaaagattaactagttaatccaaaaccttggagggatgagatcgaaggttttcttgttattgttccaactataaaatccatagtctttggcaaaaatggaacacgagtctttgcagtgatctttgtctgatgaatcgtacaaaacgaaccacatcccgtaagctgcggaacttttcttattgtaaaacgttcctacacatagcgtatgtgataactgtctagatcccgccactttttcattatcgccggcaatgcttgggatctctatcataatcttttgacccaaaggtacggatttggacagttcaggggttgggcggcacgtgacgaaaacgggaacatttggaagtgtttgcatctcgttggatacgataagtgtggcggcacgtgcagatccagacctagcaaagagcattaggaccatgatcgataccaatataagtgtgtccataattttgattcggtgttggatggtatatcttttgagtgcaaatgtatctcccttggcttttcatatatatatacatgagctagcttcagtttctcaaatttgggccataaacaatatctacgttataggtgattaatagctgaatctatatggttacaaattagagttaacaatttcagcttggtacatatttaatttatgctatttacactcgttatgaaactcaaacatagggtagttttcaaaatcttcctttttaatttatgctatttacactctttacactctccaatcgtacaaacacctagatctagcacacacatagtaacttcacatctcccctaaaaacctaagacttcatatcaaaaaacaaataacaaaaatacaagaaataactaaaaattcagaaattcttagttatatatgtcaaaattaaagtttttaaaaatgagttttttggggactcaaaccggaactagctcagactctcaaatcatacaccttcctgaaccgatttaaactaaatatttataaaaactcgaacgattctaaaccgtcacctaaaataccaaacgcgggaaaaaattctgaactgacccgaaaacccgaatgactagacctagtaagcatcatagccgctaagagatttgtctggtgtggtaaattcatgcatgcacctaaattttaatttggtgaattggaatttttttttcacttggtttttggtttctagaaggtgaattagataaccactaaatcaaaatttgatagaaacattgtatcgacgttgattgaatcaataacatattttgagcaaaaattttcatttttaatcatctggtgtattcctaacaaattataaaagctataagtaatgactggaaactaatttggctaaacattaatcaattaaagttataaaatatattttatttataacaattatatggataagagtttaagttttaggacttaggatttagcatttggaattgagactttaacttttaatttttactctaaatttagtttttagggtaacttagaataaaatataaatttgggggttgaatatacaagatttgttaactttttgggcttttaactttttggaatattttcttatttttgatatatataaacttatatactgaaatcacttttggaaagatatcttccatatatctcttcttaatccaattttttgccaagtccttatatatctccatttccaccctacacccaactctcgtacaaagcaggaaaaacaacaaaaaaaacaaaaacaaaatggaggccaaaacattttttctcttcatgcttttcatcttttctcagtcttggctctcaacttctaaaaggatcctaaacaatccctctgttttctcatcgtctttgaatttttcgagtggtaatgcagagagacttataaaatcattcaatctaatgcctaagtatgacgttaatgtcatcccaaaaggaagccttgatgctccaagactcattgagagacaaattgattttctggcgacagccggttccaaaaacgcttccgttggtccttctgttcaagagtttggccactacgctggttattacagccttcctcattcaaaatcagccaagtaaagttttaatctgttcaaataatgatttgctttaatggagatcaatttagtagttagtacttagtatagataagtacacgtgttttatttgatattgcaggatgttctatttcttttttgaatcacggaacaaaacaaccgatccggttgtgatctggttaaccggtggaccgggctgcagtagtagtgtggctatgttttatgaaaacggtccgttcaagatctcaaaggatttgtctctctattggaacgattttggctgggacaaggtttgactagtttagtagaaataacatctttcttgttactcaagaaacatatctatctacaataaacatagcaaaaatgcatttcttcttaactcttgttttaataggtatccaatataatctacgtggatcagccagtcgggactggtttcagttacacatctgacgaaagcgatatccggaatgacgaggatggtgtcagtaatgacctttatgatttcttacaggtttgatggctgttggtcttccaaattttgttatctgtattgttcttttgagttgtagtgactttggttctatctttgaattttggtaggctttctttaaagagcatccaaaattcgtaaagaatgatttctttattaccggtgaatcttacgctggtcactacattccggctttggcttcacgtgttcatagtggcaacaaaaagaaagaagggattccaatcaaccttaaggtaagtgatcacaatggttttgtttttggggggaataaaccaaattttcttgtttaatctcgattgaaatcagggttttgcgattggtaacggtttaaccaacccggagatccaatatggtgcgtatggggattatgcactgcaaatgaagttgatttcagagtctgaccacgagagcctcaagcaagattacgttgagtgtcaaaatataaccaaaaaatgcagtaatttcaataaaaagctctttcttctttattttcgttagatacatattgttcgagttaaaagataagaaacttatattttgttaatatcaggtcttggtggtggtttagtttgtgattctgctgttgaagtttgcaccagtatcttcaacaagatagtggcaaaaaaaagtggcctaaatgtaagcataaaaaaccttaaactgattgtgttttctcaataaaatttcttttgtttacgagatttcctcgatttgtttgaagtattatgacattaggaagaaatgtgtggggagcttgtgttatgacttttcgaggatggaaatattcttgaacaaagaaaatgtacggaaagccttaggagttggagatatcaagtttgtgtcttgtagtagtacagtttatgatgcaatgatagaggactggatgcagaatcttgaggtcaagatcccgtctcttgtcaatgatggaatcaatcttctagtttatgctggagaatatgatctcatttgcaattggcttggtaagattttattataatttcccgttgccataattattttttataaacatttttggaattttaaaataggtcaaaagtgtagtttcatttgtgctatcagtttagctagttttagatgaaaatggttttgtctaggcttagagttttaaagggtttgtcttatactctcgactatgttaagaatattgagcggaatagtcttatactctcaactatgttaattgattaattttcttggtatacaggaaactcgaggtgggtagaccaaatgaattggtcaggccaaaagggttttggatcagcaaaaaacgtatcattcttagtagatggtaaagaagccggtttactgaaaaatcacggtcctctcacttttcttaaggtaaaaaaaaaaaaaaaaaagacgatgaaccaaacctatatattagtgtaattaatataattgaaactgaacttttcttcttttaaaggtttataacgctggacacatggttccgatggatcaaccaaaggcttctttgcaaatgcttcagaattggatgcaaggaaagcttaggactactcctgtactaggatttagtcaatgattttaagatatagaacatttgatttaaaaataaaatgatattagcttcatctacaattatatgtctttgtagttttgaaactattttcgatgtttaaacattgattcttgtcataaccttatatttcccatcctttgaaatttaatgccatgaacctcataattcctcctctacccttataagccatctttactttttagctcgcagactcagattaaactatcaaaaataataacgtcgaccgattctttgaaaacacattataaagtctagccaaagataactcatcttaaaattagcaaatcgctatcaacatctttcatcaaatgagtcaaaacctacaatagtgtagatgtgtgtctaacagtctaagtaaaatgaaagataattttaaagtgatgttaattcatttggaaaattagctaaaggtaaattcattctattttccaactgagcaattccttaacaactcctaaccatacccggaatttttgttaagagaatttatataatttatctataggtgactaatttcagtgccgctaaatgattgctaattgaaaagttaaatctaatctaacgaattttctatgacttcagtcatttattatgtttgtcgaatcatttggcaaaaacaagtgtacgttcttaacacacgtttgccagttgacttagccattggtgatgttagactagaataaacaaaacgtatttacaatttgttcaatattttgcatatttgtacttgttccccatttataacgctctcatggtccttccatatatttttggcattacaaatgagtcaaaacctacaattttccaagtgtacccacgaaaacttacaaatacaatttctttcatcaaaacacataagaatagaaagatagagactcatatttttaaataatttataatataataattctaaataattgtaatgttcatttgagaaatgcataacaaggattctatatcctttgatttttcttgatgttgtaaagtttcaatgtcacttgctacttgctatgttgttatcgcctccgctttcctctgcaactatctcttctggttggatattgttagattcttcatggatc

SEQ ID NO: 725 - DNA, 18446 bp, Arabidopsis thaliana
atttggtttcttttacgtaatctctttttgttccttgcattatatctcttaaatttctcttctatggactcatttttgtagtgcatcgatgatatatgtgcagcaaacttttgtgaagtgtcaaacacactgttacatttgggacatgtatatggaccgtatttctcatatggtaagctatgcgtccgaccatcgtattcaatatcttttccagaatcaaaatcactaaaagtattttcaaattttttggttggtctacaatgtcttttcaggggttggcgatacgaaacatattggtgagggttctgttttggtgaaaaagaaaatttgtctacattcctaggaaatatggaagcttgatgtggaaaaatggtattgaggggtgtaggattcaagatctggcattggtttccaacatttttgtcaacaaaatttggagggtaaaaaggaggattgaagatgttgggttctttggcacgttgatattcattttgggaagtaataagattataggtaggaacaatagcagaatagctatttgtgatagtttgagtaatagagatttgagaaagatgagggttatttgagttttgagttatgcaaggcatcccaaaagtggaaaccatgttttttctcatatgataagccatatgtgaattgttgaaaccaaaagaagatgaagaaacatgtgaatcttgataaaaattaaacacacgagaggaagaaaacaaaccatgatgattcgtgtggtcagaagtattgaacattgagtgaaccatcttagactcatgattcctaaggttggaactcatttcgatgggagtaaaaccacaaatgttcacagtatcgtcaacataagaatttaagccatttgggattgaagtcattttgaaaatcaagagagcatattttacattttcaagtatgtcgccttttatattgatatgtacatattaataaaacaaacagataaattcattataaaaaagatattaaacacgaaaggagaaaaatctagtccatatttattatttttgaattataataaatttttatgcatgtaatcttctaatattcattattacttttgaacaaaaataaaattctatgtgtatgctaatattttgataaagtaaaaaagttctttttatttaggcaatgatctcgaaatcctcttctatattgccaatgttttggaccactaaatacttgttgactccgtttttgttcatctgttttaaatgttagatataacttgagttttaaaaaaaaaaaaaattttgttttttaattaatattatcagacttgaggttttttttttaacatttattgtgtagatttctaattatttgttttaaaaatataacatattagatataatacataactatgtcgagatttgttttccaatattcaccatcaacattattttcaatataataagttttatatgaaatccatggaaagtttatataggatatttagataagcttttgatttattaatagaaaattggatatatataacgttctatgtatcagatataatgagttcatataataaaaaaattgaaagggaaaaggaaaaatataaactaaaattatctgactgggttaaaaataatattattttttcttatggctctattttaaaacaacaaaataagaaaaatactatacttgatataatttgcttagctaagaattcaaaatataaattaaactatcgattgggtcaaatttagtacccttttcataaaatctcttttaacatactatatagtaaggatatatactgctggcataaaattactaatgtctatttgtaacagtgggtattaggtaacaacttttataattaataggttgaaaaatatctgtttaatattaacatataatataatttataggttgaaaaatatctgtttaatataacatataaagtatatatatctatataatttgcttttagaaattgatatattgaaatggtttaacagcctggcaaaaaacttcagtaaaattgtccactttagtttgccaaccgttgaggaaaaacagagttataaacacttagtcaaactagaaaaagactcttgtctttttggtatccatcatccaatcatagtttgactcaattaaatctaaattatttgttttgtttcaataaaatataaatcaatctcttttcgtcaacacatatatagtagcatacttttatttatttactgcctccttcacgcatataagaaatgagttgttgttttcctaataattcttattatggatgcaattataatactgatcagaaaatatacaataattgcctgtctaagaggtgacgcatgagaaatattcagtgatactaataatttctggtgcaaaaatgtttaaaagcaattatgagtatatatcgttcttaattgcgtctggaaaccatggaacaccaatgagtcaatactgttttccctcttatgctaattattccatactattttctacatatgcattgaacattacaactcaagggcagacgtaggagaaagggattgatgcaatcgtaaattgacaaaagaattaaaaagccaaagatcacctgcagttcaaattctttattattttcattaaccactcaataaattacgtgtttttaattaattttacctagaaaaaaatattgttgacattatttgcctcgacaaagcttcacccaaaatccagtccctagtacttcacatgataacacgatttactcgagtcaaaatccgacgtataagactacaaatatagaccatcaaccatttgactaaagacaccttttcttatatagaaaatataaaattaaaataaagatattaatatgcatatttttaactacaacatcacatatatatttagaatattgtttttgattatattttacattaaaagagtagaatattgaggatactaatttgacattcttcacggcatataacatctagaagttgtaaggcacatacatacatagcttaattacaatgtgtattattatttaccatgtttaatttcagatttgtatttaaaaattaatttttttttaataattacttatcaacctaatatcctatatgtttgggctgtagtgaatttgcagcccaatttggagattttaaacccttaatttatcttacaagactagacaacatttcaacaataacaactaagttaccagttttacaagaaaaagagagaggttatttccctataattatgactaaaagaatgtaactacacgtataagttccttttgtaacacatgtaaatgtaatatagcaaatgtaaggagtacaccacgaatcaggaaacttttgtttggccatttgtaccatattacttgcacatttgtggaaatgagtgtgtgactatatctgcatgcgtaaatcaaacacatgtaccttaaatgatgtaaaacagtagatctatcaattgtacacatatatatggatacatcgatgggtcattatagctctgaagttgattagtcgggccaaaaatacacctgatcatcatgatattcatatatgtatagatatatagagcacatatcacgaaactcatctatgtacatatatttatatgtttgtgtgaaaaaataattcaaaagatttattcatgcatgcaagtgtccatcaaagtagtacgaatgaataattatgaagggttcttttggcactttactaaatgtaataatgaaaaacaacattggtaagtcaactcgtgatgatacatttttggttaatagaatttcacaaaaattgagttttgtttttttgtcactttataatcagacagttccatatagttcactggtccgtccaatgcaatcttctcttccaacatgttttcttccttttatccgtgtaatatcaacaccacttgggactgttttttttttctttttcctttttacttttgaaattcatgatgaaaactaactagcaagttgatgtgcatatgtatgaaaatacatttggacgaatgatcaaatcaagaaacctgctgataattttagttaatgacttttttttttgtcaactcattacaaagttctggattttaaatatttgcatttctcttgatattaatgattcaattttgattgtttggagtttggaccatgcgtatgctgacaaccaagttactctggaattactctggattttggtagggatattccagactaaccccaagttatgaaataaaagacattgaaatcctcataaagaagggataaataaagtttatcttttgaacagttaatttgttttaacgtaattttatcaaacgaagcgcgagctaaaataaaatgaataattggaaatctaattttttcaaacacgaacaataaatatgcatgcatgtcaatcatgttgacttctccatacccatagctttagagacaaaatgaaataaataattggttctccagataataatatataataataattgatagggtgtgtccaaatccaagtctcttattaaaagggcacatattcaactactcctccataaacacaaaaagtccatcctaaaaaaagcaagtaagagataacaatttctctctttttcttttctcttcttcaaacttcaattcactaacgagagaaatgggaagagctccgtgttgcgacaagacaaaagtgaagcgagggccttggtcgcctgaagaagactctaaacttagagattacattgaaaagtatggtaatggtggaaattggatctctttccccctcaaagccggtaagttcatacacatgttcttaatcctagataaccttttcgagcttctaagcccaaataagagcttatgccattctttgttgtggtttaaggtttgaggagatgtgggaagagttgtagactgaggtggctaaactatttgagaccaaacataaagcatggtgacttctctgaggaagaagacaggatcatttttagtctcttcgctgccataggaagcaggttctctaattaattccttttgaaatcatctttaatcatataagatccttacaaaaaatgtagaaatgaaatcattttttcgcccacttgcctgtgaaggccctttcatagttatctgcttagataggtttaaagaaaatattaattcacactctccttcaattaatcttataatagtaacaaaatttctcctaaatctaattttgaatttatgtgttattttgaagtaatgatcaaaatatttccaaacgtgcttaatttcttcataaatctagtcaaaatcacgagctacattgattccatgatttagtcaaaactacgagcaactttaattcatcaagagtgctatacttttctccaatattagctattaatatacatcaattgaaacttgtaggtggtcaataatagcagctcatctaccgggacgaacagacaacgacataaaaaactattggaacacaaagctaaggaagaaactcttgtcttcttcctctgattcatcatcatcagccatggcttctccttatctaaaccctatttctcaggatgtgaaaagaccaacctcaccaacaacaatcccatcttcttcttacaatccgtatgctgaaaaccctaatcaatacccaacaaaatccctcatctccagcatcaatggcttcgaagctggtgacaaacagataatttcctatattaaccctaattatcctcaagatctctatctctcggacagcaacaacaacacctcgaacgcaaatggtttcttgctcaaccacaatatgtgtgatcagtacaagaaccacaccagtttttcttcagacgtcaatgggataagatcagagattatgatgaagcaagaagagataatgatgatgatgatgatagaccaccacattgaccagaggacaaaagggtacaatggggaattcacacaagggtattataattactacaatgggcatggggatttgaagcaaatgattagtggaacaggcactaattctaacataaacatgggtggttcaggttcatcttctagttcgataagcaacctagctgagaacaaaagcagtggtagcctcctactagaatacaaatgcttgccctatttctactcctagttcttctagactctcttgtcttcttatataaatatatcttggactgactgttagtaatatcaaagatttgatggggtatgggaggagagagaatgagatagagagcgactatgatcagttttatgggattttgtattttttttttgtttatttatctctctttattggatttctagttaagaagagacaatgttaatgggactatgggagatttgatttgatgaaacccaaaaggatgtaagagtagatcttcgttttggtcgagaagagtagatcatttcagctttcagataaaactaagaacaaagtatgtgatctatacatacgaacgactatacacacacacacgcccacacacatatatagcattttattgtttctataattagatgagactattaccattatatgtgtatgctatatatagcaaacaaaatcgtatatacacgcacttttttagttaaagatatatacgcacttgcaagacatatatatgttttattgttaacaacacatatgctaaagaactaaacttccaaactgaaatgtccgatagataaataatttgtagcgaatgatcttactattttatatataatgttttaacataaaacctatgaaagatatattttatttaatcctaattgtatatttagagtcaatatagttaaattgttgaaagtaaacctgggcaaaaaaaccgaacccaatatccaaactgatactcgaacaaaaaaaccgggttgagaagatctagagttgaaaattattttactgaatagagttttagtaaacatgtgggtatcgggccagtccgtaaattatccattacccaaacatataattttaatatacaaaatattaattatatttaattttactataatctaatatctaaacttataattataaatctaaatctctcaattaattttaaacctaaatacccaaagcaactaaactatataaaaattatttatcctatttgtcaaaattttataaaaaatattcaaatataattaaatttattataaattaacaaaataactacattaaaaaatatagtaagatatctaaaacccgaatccaaatgagttatctatattctcagccctagttgaaactatattttaaataaatcatagtataactaattaagaatattttaaggagatttggtacatatgtttatgtctaaattgttccttttataactacaaatagattttagttaaatcgaatatatcaagtacaaatattttatacgactttaataacatgatgaaatttgcgttgaaatattttgatttttttttggtaactttatattacggggtctcttggtggaagtttagagaccgtttgtaaattaatattcatagtaaaattgttctgaccatttcttttttgtaaaaataatatattttctaatgactaccaacagctaaccaggacctgcgttgcatcacaacgttcaaatgaagaaacttttagttgagaactgtataaacattatgaagcggtataaaatagtttccatgattattgttaaacatgtataactatataattaatttaatatataattaaataattatatatataacgtttgcacagagagttgcaacaaaactaatcaaacccttaaatcaatgagaaactaaaaaaactaaatcaaaagaagaccttaatttttcccatgattttattttccaattctttgtaatatcaaattccacgagataaagtttttagatgggataacttgtaagaagtctttgtttccagtagactatctgttcattataaagagtactacacactacaatatataggcatatatagaaatatctgtattatttgtcgttgtgttgtttgtattctctttttgagaaccggtctaaagttttgagaggcctaaattaaataacgagcaaaatgtaaagattgtgtatagttgtctatagagaaagagaaggaaaggattgtgtataaaagtcatcacctttggtcagtaactcgagcggccaggagaaattgattgatggaaatgcagatactattcatttgtgaaaatgacatatatacccttcccagatggttcatcttttccttcagcacatatccttcgattactattattctctgctttttcttgtaagaaaatttactaaaagtaagaaaaagtaaggtagggacaataacgttacacgtcggtctaatacaacgttacatatggtaaaataaatagaaaggatcgaatatataaaatatttgagactttataaaacaaataatgtttaactgactttaataaatagatcatattctgatattcatcttaaaaaagagatttatattcatctaaactttaagcgaacggaagagttgaaacgaaatggagggatgccaccaaccaagctcaagatctctctctcggatggttagtggacccttagtatgtggtcgatatattaagcttttggtccaaaaaagaattgggacttataagcccataggccctttaatttgtgtagaaattgttcatcttacttcatgacaaacaatcaactctctaaaaacttgattatgtatggattttgataataattcccttcaaattgcaagtggaagaatacgtaaaaacataatattaagaaactttaattcagcatgaagaaaaaagttggtaaacatagcagtgaactctatgaatctttaaccatggaatttcaagagattccaccaaaaacacttcaagttattctatgaggaaataaaaatactggaggaccgtataacaacctacatgcaagttaagagttttcaacaattacccatatccaatcgtcacaagatccgtatccaatccttctatttttagtttctataaattttattataagctataattttaaatgaagtactagattttaacccgcggtacaccgcggggacaattaattttttaatatatataaaagtttgcaaattgtatctatatataaaatatttttattttaaagtttacaattgttattaagtaatgtcctgtcaaactcgtcccgtaaaaaacctatttattttattaatgttgattttatttatgatatgtttataaatcattgtataaatattttgtaattttgtagtaattaactgctatcaaatatttatgcagtttgatgcttataatcgaattgttataatcatgaaaaaagcaatatcaaaaatgataattttgtagtgtttaaatgatattaaatattttggaagttttattttagtaactaattgtgtagttaatgtggagagatttcgggaagatagttaaatatcaaatatttaattcgaagatttactttctaattatcaaaaataattattaaatattagtggcaaccactgtaaataagtcccaacttgaagatttatttcacaaaatggctgcaaaaatgtatatatagatactaattttggatgaatttcattaaattcacttgtatatttttttattataacgtaaaataatttagttacaattttatataattaggatccaatccctctattttagtatctataagttttaatgttttattaatgtaaaataatttagatataatttaattattagtatctaattttttattataatataaaatagttttttttgttttttttggcaaaaaatgtaaaatagtttatttattactttaaattagtatccaatcccacagcactgtatggctgaagttatccacaactcacctacctatacaagcatacacgtgatgatatcatgctaatcacttctgaaggaacaatgccgaaaattaaaccttattatgcattcattaacatccgaatccatttttctactttgacaaaatgaacaatatccacatgccagcatctagctagatgcagacctggtaaggcaccaatgggtttgaaaccttcctccatattgttccaatttgtatatattgcatttcaaaaaaccagaaatatttactgtaccattcacgatcgacccaaaggatttgaacccaatctcatagcctaatgaatcgtattcaaaattgatatgcaccatgagaaactggtatcataaacaaaaactgatatgcaaattaattaattaaatcacacatatgctatattttctctatgggctggactggtgttttgttttaattattatgataagaagaattgcaccaaaaaaaaaaaagaaaaaaaaaaagaagaaaatcgtatctttttgttctacctatacagacacataatgcatcattttagtttttgggacaaagacataatgcatcaacgtgtcagcaatatatgaaacgtgaagaatgttttgtctgagtctgagtaaaattactagaaattaaaattagtaagactgactaattacaaatatcccaagtctgtgtttattctaagacaactactagaaaacttaactatattagactaccaactaggcaacaaatatcacaaagaatatcgtatgtcacctacctggaggtgcataccacgtgattttatccccattttagatatggtcatatcgattagttattgtatataaaaaaaaaattcttacaggctataaactattatgctacaaattttggtaaaaacctattacttgttattccgtttccaaaacatattatggctatattaaagtgtgtataaatgagttaaaacatttttaacaacaaataaatgtaaaaaaaatgagtttaacatcgttgtaagtaaacttaggatttgtttgttacctcaaacttaaatattattccctctgtttctaactaagtgtagtttaaaggttttttatttttttcagtataagtattgttttcacttttcgatgcaaacattaaatgtatttaatagtttttaaccaattatattttacatcatattttttattggttggattagttgtaattggtgatattttttttaaaaaaagataaatcaaatgagatttatatattttcttaatttgcgtgcaaaaactttaaattaaaaatattaagaaacagagagagtatcttttctatacataggtatatcacttatatatatatatatgtatacagctaaatatttatgtaaaaatgtaaacatacgaaactgtttatagaaagtataatattctaaaataagatatcaaacacagtataatatttaattttaaagaagatactattttgcgtttaatgttttcatcgaatataatttcttattccgctaactcaaatgtttattatttttaacatcaaaatgtttctaatactaaaaagtttaataaataaaaaaatctctctataaatagataaattatatcgtataatgttcaaaacaattcccacactatctttcctccacattaaagtaaagtatctctctcttttttctcctacgtactccatagtgatggcttcatcgcttctgacatcttccgttatgatccctaccaccggttccaccgtggttggccggtcagtgttaccctttcaatcttccctgcactctctccgcctgacccattcgtacaagaaccccgcattgttcatctcatgttgctcttctgtgtccaaaaatgcggcaactagttctactgatctcaaacccgttgtggaacggtggccggagtacataccgaacaagcttcccgacggaaactatgtgcgtgtattcgacacgacgctccgtgacggtgaacaatctcctggtggatccctcactccgccgcagaagctagagattgcccgacagctcgctaaactccgagtagacatcatggaagtcggttttccgggatcatctgaagaagagttagaaaccattaagaccatcgccaagactgtggggaatgaggttttttctttatttccttcacttaaatgattatgtacatattttaacacacaaaaaaaaacttgatataattttatgttcaaactatatatatatagttgataaattgcacatgacccttatagttgaggccgaaataaagaaaacaaattatgtgtttagaattttttcaaaaacggctgatgaatacattaggactatttgtcttaatttataaactgtattagtatttaaattttactactaattttgcggtccttatttatttttattttaatccgtttgttgtagcctgctgctttttttgttttccttcacttggatgtagttttattcgtgtttttttttcctaccatctattcttctagttatagtgttatttataattagccaagttctaacgggttagagaaagcacatgcacatgattagttagagccggtcgtatagttaagattttttttttgtgacatatatatgacaaaattatgtgtaaaagtgtaagaatcccatatatatcagaaatacaattctagcatatacaatatatgagttaatattatatagtcattactagttggttttgtgttgaaactcatgaatgctcccaaatggagcgagtaacggtcaaagttgacaacaacgaacattaattactatattgttgttttgcttaggtggatgaggaaacaggttacgtccctgtgatatgcgccatagctcgatgcaaacatagagacattgaggcgacttgggaggcgctgaagtacgcgaagaggccaaggatactcgtattcacatctactagtgacattcacatgaaatataagttgaaaaagactcaagaagaagtgattgagatggccgtgagtagtattaggtttgctaaaagcttgggcttcaatgacatccagtttgggtgcgaagatggcggcaggtccaaatctttaaacctttatatatctcaattgtttctctgcgtttttggtttagttttatttatgcttagtttgtattaccaaactatttttgttagtaacttatgtttgcgttgacatttgggtatatttttggcaagaataattcacaaacaaaaggcatgaatgattgtgagtttttttgtttttttttatatagtttttggtttctggattttagaatttggtttttggattttgcaaaaatagaaaatagataagtggggaaaaaatgttatgttaagaatttgttcaggaaaagtgaagaactcaaataagatggtttttagattgtcactaaaacattgttaagatctttcaaacactagatttctagatcataatagaaaaggcggttttagctgttactagatatgttatggattttgtgcgaattttacatatatgatcatgtcatatatatatatatatatttgattttaaaatatagtgtgattcaggtcggacaaggatttcctatgcaagattctaggagaagccataaaagccggtgttacggtggtgaccatcggtgatacggtagggatcaacatgccacatgaatacggggaactcgtgacttatctcaaagcaaacacccctggaattgacgatgttgtcgtcgctgttcattgtcacaacgaccttggtcttgcaaccgccaactcaatcgccgtacggaactaactctttttttgtgtgtgtgtgttagatatattttcatatatatatttactaatatagattctcaatgtgacaaaaatatgaacatataaaacaacgaatttacatgatatatatatagggtatacgtgcgggagcaagacaggtcgaagtaactatcaacggaattggtgaaagaagtggcaatgcgtcgcttgaggaggtatcatcatttttgttaccataatctcatcactaccatgatcatgatcatgatcatcattatcaacatgaccatttaaatggtatgtaggtcgtgatggctttgaaatgtcgaggggcatatgtgatcaatggggtttacacaaaaatagacacacgccaaatcatggctaccagcaagatggtatatattcacacatgccatatatatacatatatatatatatatatataattaattaacaaaaatttatgtaaactcttgagcaggttcaagagtacacgggcttgtatgttcaagcacataagcccatagttggagcgaactgttttgttcatgagagcggcattcatcaggttcgtaattggtggtaaacacggatattaagaaattatataaactattttagatttttgtttttaaaatccctttaaccaacactaatcgaatattctagatgtacactataactaaaataaacatttacattatatatgtgataataaaaatacatacgagattaaattgatttatatgatgtttgttccaatatttttcaggatggaatattgaaaaataggagtacttatgagatcttatcaccagaagatattgggattgtaaaatctcaaaattccggccttgttcttggaaagcttaggttaatattctatttagtgatacttttacctacgaacaattgttttatttgtcttcttatatattaattttaacaacaatggaaatgtgcagtggacgtcacgctgtgaaagatcggctgaaagaggtattccttgtgacaattgtacctacctactagattacacttcctagagataaatattagatgattcatatacttacttatgtgtatattttctattttcagttgggatatgaactcgatgatgagaaattgaacgctgtcttctcactattcagagatttaaccaagaataaaaaggttttcaatttctatatattttgtatctcctcgtgcacatgcatgcaatacggtttaactaacaaatttaatcatatatggtataagaatgtaagaaacgaactgattttaaagttttagaaaagaaaatctcaaacttttattttgaaaaaatatctcgaacttaatgtgttttcatttgtcaaaattttcagagaatcacggatgctgatttgaaggcattagtaacatctagcgatgaaatctctttggagaaattaaacggcgctaacggtttaaagtctaacggctatataccagttcctcaggtttcatcgaatgtgtaaacacgttgtatctcttgtatatttgtgtaccacagtaatatcaatttccatttgataatgccgtttttgttgtaatgtattaaaaacagtattaaataaaaggaactgctttatttcctaatacatcaatttattttgatgcaaaatatgaaaaatacagtgttttgataatagtttcactagtatgtttttagtgtgtttttaatagtatatgaaataaataaattatgaaaaggtatattcttacataactcgcaatgcctctgtttcaaactttcaaatgagatattgttttatctacaattaaaataagcactgttttagaatttcaattttagcatataatagctataccctccaactatatagaaacattgaaagtcaccaatcaaagcttatttttttatttttattttatagttacttaataagccacttactcatatctcatgaacgtatttaaataaaattacggattggtgacaaacatgattgtagatagcgattagaaaaaagtgaacagaattatgcacaagtaaaattaagcaaaggtcacctacgtacctacctggaggtccaaacaactcttctgccgaactggagttgcaagtaccccacgtgctctcttgtatattacttttcaaaaaaatcagaaatatgacaaaactgtgaagatttggtcttctcataaaagagatatatataatcgactatatcataactatgaagatctggtctcctcttttctttatttttacttctaaaaaatcaaacctttgctttaacaaaaaatgatgaaaaaatcaaaatatttcaaaactatgaagatgttgtattctcattaaaaaagaagtgtaagtttatattcaaatttagcgtaagttaacataataatcaaattcccttatgaaaagtatcactcaaatactaaaacaaatttcttaacttgttcaagacaaaaaataaaaacattttcaaaatattctgtagacgttccaatgcgaaaataacttcttttttatacaacaaagacatgcatcatcaatgtttgtagtttttcgttctaacattatttttgtagtttgtaggttttaaaagttatttttgctgtatattttagtttgtttaaaaacttgaatggttaatttgtttagtttttggtcttatctataatatttatgaaaaatgtctttatgcttttaaattttgagatttagtttatgtgattataaattgacaaataaatattttaattatactgataaaataataataacacacaaaagtttataagtaaaaaaagaaaatcatttatgagtccattgaagttctaacttattatatacttgatttgtagataaatggagatgggaatttggatttggagttgagaaaaaatggattttgttttttttttcctttaaaagtttgtaaaaaaaacactcccaaaaactagttttccctatatttttcttcaaaatcttggatggctataaaatatgtttcaaaataactaaaacaaaaaaaaagatcctttccaaaaccacaaccatccaaggccatgatagtcttaaagaaacccttatatatcaactcaaatatcatacgcaaattatgtttaaaactaatataggcagtctaagatatactttcaagttggaaacttgaaaaaagattttaagttacctaaaggaaaaacaaagattttcagttacctaaaggaaaaaaaatttacctcaataacttttggattttttttgtcaacaacttttggaaattttaaatcaagaaatggtagtaagaaaatcatgatgtatagtgagatagttatatatattaatgttcagtgatatagttatataagtgctttcattttttccagtaagtcattatgaaataactttatgatgaaattataattaagtttgaacattaattatgtatatgagtgaaacaaaacacaattagtttttcataaacgaatatacatatatttaactaataaaccaaacttataagttttacataataacacattaaccatcggataaaaataaaatctgtggactgacatcgaatataagaacacacaaacaacggcggtcggtgttacaaaaagtgaaaaactgagcatcactaaagctttataatagacttaattttcttcttggggatgcaaattgaagtttttggtcatataattccgaatgacttccataagattaattccgtatattttttaatatattaaaatgagagttgcaccatgtagtcatgtagagaaaatgaaaatgattgtgcctttttgttctaaagataaagataagataagaacgtctcaatatcataatgttctttaggaagaaataattactggaaacctcactatgctcaactagttgcaagtctgtttttctagggaccctttattctacttatagcatctccacaatgattaccgtatgtgagatatgtcagtgacaccaacctagaggtgcataccacgtgatatatgtgtcctaacgcgtatgtactgtatatgataaaaaagaaaaaaaaatgtattgtatatatatttaatttgtgactatatctaataaagaaacattctaaaaataaaccttatttttacgtgttattaacaagaatatcatgctaaccgtactcataaagctccataacccatttaattatttatccttctgttactagaatatttgcattaatttgtcattagaataactaccacatattttcagtcaactaattaaccaaaattacaagttattacccaattaacaaaattgaacacctaataatcggaccttaccttaagtatttggaaaattagtcatactaattattattatctttattttctgtcgtatataaccaaaaagttgtatatatacaatttgaaataaatatcttattgcatcatttcaaacatatataattttatgaaagattagtgaaataacatgcctaacataatcctaaaagtttaaattaattatatataaaaagaaaaaaattgtataaaactaaaactttggattctcctccgattttagtttttgatccaattattatttttatctaacaaactgcctaaatcaaaagaattcaaaaatattaaatcacttttttcaagttcaaatatttcacagatggaacgtacttttacacgaaatatacgtaaatttaaataaaacaaaaaatttaattacatattttgttatatacaaataagtgtta

SEQ ID NO: 726 - DNA, 78844 bp, Arabidopsis thaliana
gatcccacataataattttagatataatagtttaattcaatcgttttatcccgcattatgtgcgggttcttatctagtttcattatgtataagagaaaaataataataaacaaatttccaataacatatttcctccatttcatttcttttcatttagtagttcttttttttgataaagaatttttttcactcacttagttgaatacaaaaaatgtcgagctttaattaccgattgagaaaaattgaacatataaattaaagatgaccaagaattttaacatttgtttagtttcatctaagaatttttagaatgaatgaattaacgaccacaaattaaaatcagtgtagatagtatcagagtcagcttttgggaatacacctcctcccaaagggaagtaaactagaggcacaatgaaaccaactccaagtactaaaccactagagtatcacacctttggatgggatggttattattaaagaggtaaaattgatattacaatagtaaaaattaaactagtgtaaagaagagggaatggtaatatcaatgctactcattctatactaaattaataacctcttatctaaatgtgatttccatcttgtttccttaataggaagtttttattatctttcagataatctaaggaaatatccttgcatgaactaggtagtcttcaaaacaggtagtatacatgaaaaaatccaagattatagataggaaaacatcgaagatatctttgagaaacccatgtttataagaaatcaaattagttttattaagtttgataattaagtaacagattacttcttaagaaaaaattgccaaaactaattcatataagctataatttgatttttttttaacaccgataaatttgatactttttttattcttaggattgaagttacaaagaatcaagtttatattttttgtcactttaaaaaaaaaaattgttataggttttctacgcccaaaaactaatcttgggccccaaaaaacatattaaattattcaaatgccagtggtcaatgctactcgaacccagataacgggaattacctctttttaccactagaccaatgtgactttgtttttttgttacatcttactatattatttgggaagtatattttaaatataaccttatattttgtaagtaattacataggtatgctattagaaataaaattttaaaaagtaaattaattcatctctttaagaattaaaaactcaaatagtaatttaattaattaaatttaattaaaaaaacgaaatacattattaatttccaaacaattaaccaattaaaatcaacaaattagatttgatatctaaatgattatattaatttttttattaattattatagttcacctctcatctttatatgattctatttttgcgaaaaataatatcatcgttataaaaaaagaattagagtttttccgcatctgccataatttgaatttttaaaaacgaatataaactattcaatacatgaaaaattattataacatgtcaaaaatagatttaagaaaactttctaccgagtattgggtcataatttgaatatttatattcaatttcatatatattattttgaaaatttataatcttatatactacaataattaataacatattagattttttatgtgtatgatgtgattcaatttttaatacaagctggaaaatcttagaattgacgggtttagatcgatattaatacaagatggtatactacagataaaactctaaaattaacaatcaaaatacaagtgtataattttaaatactaaacaatataaataatatcaacaaaacatatacaactcgcagtttactatacatttaaaatcaaatcaaataatatcatatatttataatcatctttacaataaaagtttttagtttaactaaaatataagcctacctgcggtatactacaggttaaaattataaataagcagattaccatcacgatgtctgtaccttctcacatacacacctatcaaaaatttaaaacttttcaaaacctcttggtatattcaaattaggattcttcattcatggaatcattattccaagggttttgggatgtcttatgaaatgattttggcagaagaagatgtaaaatttttcgaataaaaagtagtcagcaaaaacatatgtctttttggggagtttttagataattaaatcagagaatagagctggacatatgagtaacccattcgagttcgtatagaacccgttcgggtttgggattaatgggtatatgattaactacccaatagaataattctaaatatttggttctggttcgggtcgggtccatttgggtttgggtcagtttggataaaaagtttcaggccctaaaaatacccaaaaaatagaaacgggtattttgtatgtatatagcgggtctccaaacaaaaaaaacttttaaatttgttaagttttaataaatttaattatatttgaatatattttactaaattttgacaaacataacaaataatttttgaatagtttagttgtttaagatatttaggtccaaaattaattgacatatttagatttatataatcttagataattagattatattacgattaaatataattaatattttggatattaaattaatgtttgggttttagaataccctttttgggtaacaggtaatttttgaaccaatcggatatccacgggtttactaaaactctacccaataatgaaattttctaaaattctaacccgtcctaacccagttttttggttcggatattggattggttatcgggtccgttttttcgtgagtcctatcaaagataatctaatatagggccaattaggttcataaatataaccaaaatactatacaaaaactaattctaagttaggccaaaaattagatcctctaatacaaaggaaacatgtttcttaccaaaacaacttgtatacaaattttacacatttacttaaaactatatatgttgtatttattataaaaataacatttttaaacaaagtcaatccaatacagcattatatccaaatagtaaaaacattgaaaaatattatggcatcacttttatcctatactatttcttatgtaattcaaataaagtatacaatttaatttatacaaatattaatgcccgtgctgtataacacgcgttatgatctagtttaatgatataaagtgagacatactgtgtaataatgatttagatacatttgaaaatattcgaaattttatgaaaatctagagagattgtgatataagcaaattttccgtaacaatttgtggaagctcctcctcggatagtaactaattcaattaaattgaattaaaataaaacagtgaaggatagtaactaattaaaatgaaattatttatttgtatatttaaattataattaataaccaagtatcatcttgagtgatactatttctgtttcaatataaaatcttttgaagctaaagtgcgcttattaaataaaatttcttcaaatatatcattaaatattatattagttaaaactaatcaaaaattatgaacaaagttaaaaatggtagagttaaattatcgacaacgagttatcctagtgcttaagactggattaccaaaaatgtaaggattttggaagtcaagagtttgatctacgttggaggaataagctctccaaaacagaattaattacatggtctcgcgtagggataggcataatatccgaacatgagcacccgacctgaaacagatctgaatcccgaatccgaattcaaaatttaaaatactcgaatgggttctacacttctaaaccagaaaatctgagtctgaacaagtagtcaaacatatctacaatttaaatacatagtaatagtctattattgatatttatatttgtataattagagggtccaaaatattcagattttttatattttgggtatttaatctacttaagtaaattttggtaaaaaaaagtataagtttttttagatagttggtgtattttcaagtagtttagataaattttgttataaattttttgatttttgggaacttctgagaatctgaacctaaaatatcgacctgaacccgatctaaaatcaaaatctagaaaacaccgaacgaatcctatacctctaaacctgatataccctaacacaaatgcccacccctaatgtcgtggttcatgagccatgaacctcctaatcataaaaacattttttttgatatgtgtatgtgtcttaaaattggatatataatcacttatatattaattgagaaacacttttaaaaaataattttatcagcatgtattattaatgaaattttcatactaatgtgtcgctttcagatcgtttcttaactcatttaaatcattatccaatatttagtacaatgtttacatatttttccattactgttatatatatgtatttatgacaaaaagaatccaactaaattaagaatattatgaagaaaatagaagtatttacaaatatgtatatgattatttgttatttaatttagataataaacaagatttttcaatcattttacggagaaacaaattttaatacagaaaatcgatgatttgaataacataaaatatatagggagatctgcaaaactacccttttttactatccttttgcaacaataccattttatgttgtccattttaaaatatacctcttctctcgaacattacttgattacactttaaaatatattacatgattcgtaatatttctgatttttgataataatacattacatttgtagctaaaattaaatgtatttacttaataatcatttggcttcgcagatagtatgggtaaactacataatattaattcagataaaacttaattatgactttttccttaaactcctcattattatatgaaatcgctattaattgaatatgtgtttaaaaaagactttctatttaataattataaaattatacttcttttgttttattttataggattgttttaatacttacttgacttttacgatcacttctattggctcagttagaatatagagctatttccacaaataccacaattttaagttttattagacaaaaatagcattaaaaatatttttggacataaatagcattcaaataattattttatttttaattattaaaattattaattataaaaatacataaatttattacccaaagttcccaacaatattttcccaacaaaaattttcgacaatagtttcccgccaaactattttgcaggaaatataaattccgtaaaaaatttcccgccaaaaacaaattacacccatattttcccgccaaacaaaaggaaagtcaggaagaatattaaaaattaaggaaagattctacgcaattcagtaagggttcacgaaattcagattttttttttttgtaacccttcctgaattttatagaatatttcttgaatttggtgaaatctttcaaataatcatttctgaaatttataaagaattttacaaaattcagtaaggatttcaatacagattttttgcgaaatctgtcctgaatttcgtagttaccttcttgaacttttttggtgggaaaaatttgacggatattttttggctggaatagttttacggatatttttggcgggaaatttgtttgcagaaaattttttggcgggaaaatttgacgaaattgttttgcgggaaaagtttgacaaaaaaaattggcggaaaataatttcttttatttacttttttaattaaattacttatttatttttgacatataattaaattttgtagtgatatttttgaaatatttcaaaagagatgatatttttggaagaaaaatttattagtgttatttttgtcaatcctcctagaatatatatactattttatatagatgtagttttcctaattctgaaaaatttaaaatttcttataaattaaaacggatggagtaattaaactatcatttgttgagattaattttaaatttttattactccatccagtttttcttctcctttttactttaacttagtatatattctaattgaggcagtaaaagtaataaacctaatttgttgagccaaaacagcttagataacttctaagctgtaattgaataatataatgaattttgtatttgggttagttattagtaaaatataaaaagcataacagtaaaaaaacaaggatatgatcaaaattcaaatgcttatggaaactgattcacacgtaaaaatatataaatgtatgaaaactagatgtatttaaaatagaaattaattgtttgatctaaaaataagaaattgattgatatatcttttaacatgtgttacgtagtttttaacaaaaacatatgtgttacgtaatcttaaaattctcttaactgcaaagattgattatagtcatttgatatgttataatgttaactatattttttttgtatgaatgtaaacctatattcaacacaaaaacgtttttctcattaaatgtaacatagagagtagaaattttgaataattgcaaagcagcttagaagttatcggtacgacgggagtgaaaccaaaaccgcagtccgtcgtcaagtttagagttgcttagttgttgaatggtgctgaatctgttccaaacattatttttctaatgatttttgtgacttttggagccgggatttgcaggctcaccgtggcgtctagcgttctctccacatgatatggatcaatgcttgaaagacatacctgagagtgaagacatagaggttggcttggaagaatcgagtagaagggaagtgattgatctccagctctcgaagtgttgactacatttatatcgtgcaacatggttactttgcaacggcactgcatcagggtccaatttctgcccccaaatacttttgttgaagtactgctaaggatttgtttcaccatcaacagacaaaaatatctgcattattatgaagctcgcttagcaaaattctctcgattcctctctcacgatcacaaaacaacaatcacgaacgcatactcaattgtacatctcttgaaatgttgtcacttctctattcgattggtttgtaactccattttcctcgtttgtgaaagcaaaaacaatatttatttacaaatgtatgcatatcgaataaataaaagtataatattaaatcatactaaactgaagaaataccatttgtgttaacgttttcatgctgagtttcaatggtttttgataatgtgatgagagtttagaactggaagaagttatacttactctcataagaataatgattaggattacataggtttatatagtaaagagatttcataaactagatgaatacaaatatgtaaaatatcttatatcataactatacaatatttgattatatattgagaatcttctagatacttccatacccttctatagttttaactcaaaaatcaattggcaattggatttaaagaatataatgtgggattccattacacttacgatggatttgctcaaaaaaagaaaaaagaaagaaagattccattacatttaggatgtgagattcgtaacacgattcaaaataatagctaagaccttttatcttaccgaattcccttttaaaactgcaatataccctacttggatcaccctaaactaaagtctaaactatcattttatggttataaacttaattaaaaccaactgacaatgaattgaaaaaataatgtgagattccaaacattatttaatttttggttgtaaaatcccaaaaggtatatttaccgcctttaaaaaaaactaatgaaagcaatttaaattgtttctgtgtattctcatcatttcccgtcacttttgtaacaattccaacgttagaacgatcattcactcgcgtaaattgtttttattttattttaaagcgttttaaaccataacataaaaaagtttaaggatattataattttttatcaaaaattaatgatattaggttatcaagtggtcgagtaaatcatctggttatataaaattggagaaaaagattttctacctatataaatatagatatcatctgtacatgcactccacctcattgcaaaacaatttccccactatctatcctccataatatagtattcttcttttctctcctactttctctatagtaatggcttcgttacttctcacatcgtcgagtatgataaccactagctgtcgctccatggttctccggtcagggttacccatcggatcttcttttccctctcttcgcctgacccgtccatacgacaaggcgactctgttcgtctcatgttgctccgctgagtccaaaaaggtggcaactagtgctactgatctcaaacctatcatggaacggaggccggagtacattccgaacaagcttccccacaagaactatgtgcgtgtattagacacgacgcttcgtgacggtgaacaatctcccggtgcagcacttactccaccgcagaagttagagattgccaggcagctagctaaactccgagtagacatcatggaagttggttttccggtgtcgtctgaggaagaattcgaagctattaaaaccatcgccaagaccgtggggaacgaggttagtttctttatttccctcacttcaagaaaataatataatgatttatgttcaaactatatatagatataataaaattagatgtgcaaagtgttagttaaagaatctcacattagaaataagaagtaataatctatactagcatttaaaaaatatgggccaatctactcactaataaatgatttttttttaacttggaagctcatgaatgcttacagaaaattacaaacacatatttagtaattgtccaaaattgacaggaacgaaaataaactactatatattgctgttttccttaggtggatgaggaaaccggttacgttcctgtgatatgcggcattgcacgatgcaaaaagagagacatcgaggcaacttgggaggcactgaagtatgcgaagaggccgagggtaatgctattcacatctactagtgaaattcacatgaaatataagttgaaaaagactaaagaagaagtgatcgagatggccgtgaacagtgttaagtacgctaaaagcttgggcttcaaagacatccaatttgggtgcgaagatggcggcaggtatcttgaaacttagtataactcgattgttctttttttccggccactaggtttaacgttacaaaatctttgttagtaaacttactttttttttttaattacgtacgtttatcttttacaagaatattgaaaatgttttgattaatttttttttgttttataaaacaatatttacatgcaaacacaaaagcataaattcaacgctgaaataatatatctcataatctaaaacgcttttagctgatttgttttgtgaaatttaaaattttgttttttgaaagttgtttttatataaggtatgagaatgaaaaatataagggtgtgccttatacagttatctggcccagttttgatcatgtcatatatagattttatagtatactagtttgtgattcaggacggagaaagattttatatgtaagattctaggagaatcgataaaagcgggtgcaaccacggtggggtttgcggacacggtcgggatcaacatgccgcaagaattcggagaactcgtggcctatgtcatagaaaacactccaggggctgatgatattgtcttcgccattcattgtcataacgaccttggtgttgctaccgccaacacaatatccgtacgtaattgctctccctttgtctgagttagattaatcaacaaaaattccgaacaaatttaaattatcgaggtgacaagattataaatataaaacaatgatatgtatagggtatatgtgcgggagcaagacaagtcgaagtgacgatcaacggaattggtgaaagaagtgggaatgcgccgcttgaagaggtaagatcgtcgtcgtgagtatttctttggtatgtgtcggcagggtatggtaaagcaaaaaatttagaagtgtggtcttacacttctctactaattttatcataatttaaaagactaaaaaaaagttgtcgtaaaactaaagtaaaaccacataaacggtacggctagctagtaaattatttaatagtaacgccataaaagtataaatataataatttaacattacaataagaccaacattacaatctagaagcgtttatgtgttaaaaaaaaaaaaaaaaaaattacaatctagaagtaggctacaatggaattgacatcaggaaagagaggaattggaatcgaatgcttcacgtaacccttacattaagtatttcaaacgatagccaccaaaaagttatgtaatgtgacccctaaattgcgtatttaaattgtggactagacgtacatgcttcatgtgctttatgaaaagactggttctgtgattgtatgtaggtcgtgatggctttgaaatgtcgaggagaatctctgatggatggtgtttacacaaaaatagactcacgccaaattatggctacaagcaagatggtacgtaacaaactagatattgaaatttcgatatttatatgaaaacaatgatgctaatatttggcctttatatataataattgactaaaacgtaaattcttgcgcaggttcaagagcataccggcatgtatgttcaaccacataagccaatagttggagacaactgttttgttcatgagagcggcattcaccaggttccatatatatatatatatatatattacttatgaaaattgtatatgagattgttgcgttgtatgtgtataattgtccaaacattttgcaggatggaatattgaaaaatcgaagtacatatgagatcttatcaccagaagatgttgggatcgtaaaatctgaaaattctggcattgttcttggaaagcttaggtaattattctattaagttatgtttcttggttttagataactataagtctaaaactatgtaccatcgtctgataaatttatttcaacaactatgaaaatatgcagcggacgtcatgctgtaaaagaccggcttaaagaggtaccacacacacacacagtatatattagtgacttcgtactatttttagtctttacttataataatcacacacacacatatatatgggaccatggcacaatagagactttatagagataaatatttgattagtcatatgttttttttttttttttgtaatctcaagttgggatatgaaatcagtgatgagaaattcaacgacatcttctcacgatacagagaattaacgaaggacaaaaaggttttcatattatattttgtatcttctcatttacatatgcgtcaaatttgaaatatttagttatacataaaatacgaatagatttataaaattctaccaaacatataaacccccatacttacttgatttcaatttgttaaactccacagagaatcacagacgctgatctgaaggcattagtggtgaacggtgctgaaatctcatcagaaaaattaaacagtaaaggaattaacgaccttatgtcaagccctcagatttccgctgttgtataagtttgggaagacattgtgtaattttgtactacgatggtattaagtcacttttgttttactgtgttttgtgtactatatatacgtaccttttggtttttatgttatcgttgtaatgaataaaacagtattaatagggagtgtttttattctataattaaactctcttttttataatgattttcaccaaagtattggaaatttaaacaaacattaccatattccattgaagattcaacaaagtattgttcattttcagttgtgatcattattcttcctcacactactgcattaaattgttaatcaaatgctcccgtcatgacaactactataatttactgttaactaagcattaataaaattttgatcatctaccgttaaaattataaaacatgaattgcctcatcatagtaagagtcgtatttttctttcaggggtggttgatagctatattgtcgttctatatgtgggacatgttaccctaaacggaaaagtatttgtgtttctctttcaactatttgtggaataaaattgctttaattagtaacctttgtagtagcctattggcttcttcctgtctccatcttggaacaaacttttgattccactacgtacttgagagtgtatattgccggtctaattgagtgtccagcataagcggccgtagttgtcatatatgcatgcttgacttcttttctttttgtgatattatcaattgttttaagaaattaaattaaatttacagccttttcaaaaaaattattatcgtttttcttttatataccattatcgtggagagtttagtttggcatgaagaagttgttggatagctgaatatttagaaacaaagaaaattgcatatagattggatcattggatgaataagcagaaggcgtttttttttttcttttgctaaatgaataagctcaagatatgtgttatacactttattagggtaggctcgataaattcagagtcttaaaaaactagtcatctttatactaataaaaggaccaaatcttaaaactctttaaaattggcattttcttcatactaaaaaaatatttaggcctttttcatgcttaaaattaatttggacccgaaataattgctctcctagcatccccaaagagccggacctgcactttctatttcgtttttgcaatgtaactttccccaaccctatgcagccgagataatgtgttcaaaaatattttaattcataattttgtataacatattggcgaaacattataatcaatagtaccatatttgtgtagtacgatgatattaaaagtctgttttgttttatggatgtgtgtttgtgtatatacgttacaagaaaacatagggttttccaacgaccatttccgacttaaataagttccttttggttttatgttaaatcaggttccatttgatttgcatgtcttgttgttgaatgaataaaaacacaagttatcaactggctgtttttaactctatacatttacttccaccttctcattgttttctacatatttagcatttttaatgatctttacccttttttcttgggaaaaacaaacataaagaaccaagtgaaaattcaacaaaatattgttcattttcagttttgatcagtattcttcctctagctactacaatgatttgttaatcaaatgttcgaacgttttatatgtgggacatggcgttagcacatccacgaaaagaaagtccgatttcggtaaaacacttggaaaaagtcatagaacttaaaatggaaaattatttgtgcagtgtctctttcaactatttgtggaataagatttcttttgattggcaacctttgtagcctattggcttcttactgtctctccatcttgggaaaaacttttggttccactaaccagccaaaaaagtgttctttagttcgttttacttgagagtgtattgacggtctaattgaatgtccaacataagcagtagttgtcatttatgcttttcttctttttctttttgtggttttatcattaagatatctttttgtcgtctacatggaagagtttaatttggcatgaagttatctttggatagttggatatttagaaagaaaaacaattgcctacatatgggatgaataagctcttctaaattatttatttttcagtataatagtttgtttatttcaaaaaaatatacaactcgagttaattgaaataccgaataaactgatatcaccagagaaatttatatatagaatagaaattctggcaaatgttttcgaaaacaaacattgcaaacatttttgaaattctaaaacaataaactattaaaacatataaaagattaagtaagcaattttacgtcaaattcatttcctctttccatcaccgtacgtaactttttcggaaaccaaaactatagataaaaaccgtacgtaactttttccaagtttaagctgtatagtaaaatttaatgtaaatttcactacaaaatactccctctaatctattttagaagatgttttgcttaacgtacatatataagtttaaaacaattcaaaccgatatagaaaataccgcatattataatgattagaaaacactaattgtattcaagtcgtgcataaatttttacaaaacatccaataaaatagaagaaaaaaatagtaaaacatcttacatatattaatattatatatattagaacaaaactagtcatttttttttaatgatttgtatggtcagtaacacattgatcttgtacgaggataaattccacgattgaaggcaggtgtggggatgtaattaattttctttttgggaacccacatgcacattaaatttataagccaactagttccgaaaggagtattgtttaatatattaagatgagaactggaccatgtaaagaaaagaaaaagaaaatgaatgtgcatttttgttctaaagcgaaagataagataagaacgtgtcgacataaaaacgttctttagcaagaactaattactagaacacctcattataatatacaagtctgtgtatcagtgtatgtgatatgtttagtaacacctacctggtggtgcataccacatgatttatatgtcctaatattgtatttgcattaaatttataactataatcatttaatattaactactagtaaaagatgatgtatggaagaagaagtaaataaaataaagagatatccattatatgtccacattattttttcacttatattttgcaaaagaatcaaaaaagaattaaatattaattatcaatctagaaaactaaaaaatattaaattaaagatagactattttttttttcatcctaagatttcttagagcataccaattaataactcttggttatcactaaaaagagagtatttcagacatactgaataagatttatatgagtattttactttcaaaacagtaaagaatcaacattattttgtcgacaactaatcctagaaagcttaagttattaatctactctagattttcaaaggttaaagatatacatcactagccaacaagaaaaaaaaaaatatatatatatatataccagtaaaggactttgaaaatggatgtgggatccacagagatggtggttcgggcatttctaaatgaatctagccgagtttagaattataagtgtattcgtattatagaggatgccggtctttatgcacaatatgagtttgtggggttttaaatgcaaaatggaaaaactaaagctacactaacaaaaaaaaaaaatcataagatggaagcgttagacaataaaaatattatcaaagaaacatatatatatatatatatatatataagtatctaaattaaacaagtattaaagatcaaattcgatctgttcacaaagtagtttaccatcaactgtcgttgtgtgattcttcttctcctaagaatctaaatggttaaatcaatcatatcaaattgtgtattgttcactgtctccaagaagatttaagacgcaggtgaaaatgatcactccaaagtcgttaaaggatgtgttatgctgacttgacttggctctcgcattctccacttcaaaaaaatcatataaaacaaaaaatttcattctcatatagtcatatggaaattatttgtccaatattatatatgaatagagacattgatgaagcaatagaggcaaagtcaaagggcttacctaaaacaccgtccataacatcatcaacattattagtttttaagtggaaaccacgttaaaacgtagtgctgaagccgatgtgggaatcacgtaatttatggccaaagccaggggtaaaacaattgccatgttgaaagataactaaactactcacaataaccgtttctactttttacagttttttcacacattttttccgtttcaattgttttttttgttcgagcaacataacgaacgtttcaatcgttttaaaagaactttttgtgtttcgagataagaatggtttgaaagacctcaatgtatttttttgtgtgacaaatatctactttacagtttaaacataatcaaaaataataaaataaaagccacattttttaaaagaaagatgattatataattaaattttttcttaaattgtcatttcgatatatacttatattgaaatgattttttaaaaaatgcttaccaaaacaaatcggttgtggaaatgatatgatgttgatatatatgtaattatatatgtagtatgtataagatacatatttatgttaaacattttttggttgttaatatataagttaaaatggtgagaaaccctttaacaaaaaaaaaaaaggttaaaatggtgagacatttttatctttaactagtcttttttgttaaatgctttggcaataaaaaaaccttgtaatattaaacatttttgaagtcattctatcaaatgtactatcgtcgttagttgaaaacaaaaccaaaaaaatatcataagtcgccgaccagtgaattttcaaaaatataatactcacattttattattctattatttaaaaaacattttataaattctttatgtcaaacaagttcaatattttcttaaccttctcgtatacacacatagatgatagacctgtatttaatatctcacacttacgacgttggttttctccacaaccccacttttgtacttctcttccctctccccctcccaaataaccgccgataaacaatgctccggctaagcaacgccgccgtaataacaaccaatgcaattctcgcattgatcggcctcgccgctctatctttttccgtctacgtctacgttcaaggcccatcacagtgtcaacgtttcgttcaaaaccctctcattgtaactgcggctctcctcttcttcatctcgtccttaggccttatcgctgctctctacggtagccacatcatcatcacactctatctcttcttccttttcctctccattcttctgcttcttgtcctctctgtctttatcttcctcgtcacgaatcccaccgccggaaaagcgttatccggtagaggaataggcaatgtcaagaccggagattatcagaactggatcgggaaccatttccttcgtgggaagaattgggaagggatcaccaaatgtttgtctgattctagggtttgtaaaaggtttggtccacgtgacattgactttgactccaaacatctctctaatgtacaggtatgtgtttatagtatacatctataggattcagattgtttcactaacaatgtagtaataaaagtggttttttgttttatgtttcttttcttttagtttggttgttgtcgacctcccgtagaatgtgggttcgaatcaaagaatgccacgtggtggacagttcctgccacagcgactacggcgattataggggattgtaaggcatggagtaacacgcagagacagttatgttacgcgtgcgagtcgtgtaagattggagttttaaaagggataagaaaaagatggaggatacttattgtcgtcaatctccttcttatccttctcgtcgtttttctttactcgtgtggctgttgcgtgagaaagaacaatcgtgttccatggaagcgccggttcttctaacaactctttccatttgttttccaaatgattaattaattctttatatatttttctgtttttgaaatatttagttgatgtttgatgtttcttttagtgaagttgtcctctggtcatgattgttggtttgcaaatgcatgcatgggtttggttatattaatgtgtgaatgtattgatggaatataacctccaaaatatatgacatttgcaaaatagacaaaacattatgcaaaaaaatattgttcgaagaataattcatgttttattgttcccgtcacacgtttggataacataattagaaaagagagctacattaatgttttttaacacgtaaatttggttgtgaattaggagggaagaaacgcttagagcaaacacattgttggaagatacattgtctagcaatacaatccagacaattcttgttgcaaatgtcgtcgtcggtgcattgccctccatcgtgtatttcggcctctctcactacttcactaactctcgttctttgttccgatgctttagctacccacaaacctaggacatttttaatctaacaaatatcaatattgtgtacgggtatatataaatcgactagaagtctttaataacattgtaatactaaaatcatggtgtttttaaagttataaaatacaaaaatgcacatgacaatttggtgtaatttaaagttgacagatgtacttacatgaaagagataacagaagtgcaagaagaactactttgctcaacatcattttctccaatatgataattttgattcctttatcttcttgttttgtttagtgtgatgataatttcgattcaacatgtgtatatatacatcaatattgcaagtttgcaacggcaagtttaaggcaagagatttggaagatttctcataccctatatagatgatcgaaattacataattttggaagcaaattcttgttttgaccagtttgaaatacaaattcatgtattcgaaccagaaaagatatttatttacatgtatataatttagaaattgtttctcttttaacatcgagaaatccatgtatgtgaatgtgaggatatttttactaccacgttacaacgtttttcggaagacacgggaaacgagtatcaattcatgatactgcgagggagatcatttggctttttcacctgaaatgagttcctttatagcatgcacatagttggtactcatagagtatcattaacaattttttactattaattttgatatttatttatttgttgagattttttatgtatcgagaataaatcgtttatagtggtaagatcggtataagtatcattgagaagagaagagaagagcaaataatatttttttgctctcttttcgcacaaaaaaaacattttcttattaatcacaatccgccacatcattagagaccggtatcggaagtatcactacaatgagctcatacccaaatggccaaatcagttgttttatttattaatttaatgttttgggtttctaatgttttgggcttctgatacccataaaaagtctgctatgtacatggtcttatattgcgttaatgtgacagccattcaccttagcacattttttggtttttcatgaacaaaccaaacacgttgaagtcatttacattaacgcataaaagaaaactgtgaaaccaatcaaacacttaacaactttcactaatttttccgaaaggttctgtaaatgtctgggcgaaaagaacaaaaagagtttggataaaaccacaacgtaacttacttgaggaaagtacaagaaagaaacaaaaacacataagcgaccagtgatgttaggagctcgagtgtccatgtaggctgaatgagaaacgtcggaatcatgggaatgattaacgaaccgcagaaccacccggcaactaaagctccaattctgcaatcataagagccaaacaaatcatgaaaaaaacgagtgaccttttaagtttcgtttcagctaattcgataggactagtagtattttacccgattaagcaagctctccccaagctctttgtcttctcattcagaaaatatacgcacgcagccaatgataccgccacctacaagtacaacaaaagatttcagaacccatacatgagacagaagagaaactcaagggccattgtataaagtaacaaacctgaaacgcaggaccgccttctgcagagttcatgatactccaaccacccatgaaggcaaagaggaaaagtcttctgaaaatagtgtccatgggaggcatttcaacgaaatcgagaagagctttgagccacggaggagattcctcaactttcttcttcaactttgatttaagattgattttagtcttcttccttctgataaaactagacatgagaagcttctcaaaggctccttctatagactcttcgcttctttcatgtccagcgtactgctgtaaaagaaagttacgagaggcccagatttcttcctcggaagcatatggactaactcctagacgtttgtacgggtcccaaactctcgtccgagggaacgtgggaacattgcctacacagagtcgttcgtttatgagtgaaacagaaacatgtaatatcacttctcattcagagtagtagctagacatgagcaacaacaaaaaaagctcaaaacttgagaaagataagtgaaacacacaaagtggaaacgctaagccagcttatgattcttcactgagaagtcaatgttgttaaagaatcctaacatactccatttgttccacacaagttgaaatttttggataagaaacgaccaattcctaatagcaactaacaaattgagaaaagggtttttataaattgagagagaagaagtgacaaatacctccatatgaagaatcaacggtgcacttgacggttttgaagcttctcgaaacattacgaaatggtaacagtgatgtcttactggaatttcgtacgagagaactgaaattcagaacacaacaacaacacgattaacaaaagctcttgcgaattcaatcaatttctggaacttacataaacaaaccctaaactttaacaaatccgaattttccgcttccgagtagaaggaagacaaagaaagtcccaaaatcgattccacgagtaatttgaaaataagatgaagggagagagagagagagaatattacggcttagatggagcgataaacgaagaagatacagtagaaccggagagaagaagagacgaggacatggttcctccgtcggactaacccgacgccgttcgtgcttctattagctttggcttctctctgtatcccctgagaaaagaaataagggaaagataagcgaatcgttctatcttgcgccgcctggcgtacattagataatttacttcccccctcatctttcgtcttttcgcgtttatgtccatgtatctagtaaaatattcgaatttcacccctaattcgtaaataagtaaatagtacacctcttaattggtcaccccaatcatcaattttctttttttacatggtcaaaagcttgttactattaggtgataaacgaatttgataattcttgttttctgttgcgttttggatagcaagttttatttaatatggtttttgttacgaaataaaatcataaccaaagttgagattcaaattgagggacaaggatctcactagatgtatgtacactagctccactcttatttatgtgaattgagaatcatttcttgatacagacatggatgtggattcttacaacaaagaccaaatattgtttcctgtgaatggcaaaacccaacatttggtattagagagaaattgcctcatagcttcgagtttagaccagtctgagtaagctgttgccttagaactcttctcataaccttatttgtggccgtcctcggtagagaaggaagagtcacaacagatgatacctgccagatgaaaaaaaacattcacattagccacacaacaacttcaactctcttgtgttttgtttttggtataaaccttgaacaaaggattcagtttcttttgtatctcggagttgaaggacttcttcaacaggttcaagtcgggatttgaaaattctgggctcttgaacacaacagcgattactagctgctcaggacccccactaggaggtggaacaccaatggctgctgtctccagaacactgtcatcaacggaattacagactcgttcgatctcaatagaaccgacctgcacaataacaatcaacacagaatatgattatgatgacaatgcgttaggcttgtgcatttcaatactatatacgaagatgtacagtaaggctacctttataccaccaagattcattgtgtcatcagcacgtccatgagcacggtagtatccttttgaagtccgttcaaataaatccccatgtcttcgtaagatctatcgaaaagcaggcaaggcacagacttaaaacagatgaaaacctctgtataaatatgacaaaggttggattacctgtccttggaaggtgggcattccttggaagtaaactttgaagtgattaccgttcagaagagtgcttgaagctccaaacatgtgaggacaaagagccaattcgcctactcctgcagcatatggaggctaaaacgaggaaggaaaggaaatatcacacaaccttcatactgtaagatctttcagaagaaatactgtatcatctatgagaccataaagtttcttacaataggattgctatcttcatcgagaatgaaaagcttgcaacccatggcagctgtgctaaaagcagccagcgactgaggttgaagcaaagaacctgagataaaactgcctccaatctcagttccgccacaatactcgattacgggtttgtaatgtgctctgcccattaaccatagatactcgtctatgtttgaagcttcaccagtggaaccaaaacaactattgaaaaagtatcaaatataaaacatcaatgttactactgcatagaaaaatcttcttgacttcaacaactacataagatgtttgttgaacagtttttaaagaactagcaacaatacttagatagatttatttctggaaaaaaataagtggtggcatgatacattaaaactaattaactttctttttctcaaaacatctaataaggtccacgccacaacaaaattcaggcttaacaacattctaaagatgcactttcggtattaccggatccgtgaccaatcatagcctgaagtggagtttgagttttgccatgtccggacaatgcttggtatcacgcctagcactgatacctcggcatcctaaccccagaatataaacatatggtaaattaaaggctgcccaaatcccagactcaaccatgcaatgaaatccagtcaatcatagatcccattttgatgttttattttgatatgtgcaaatatttgcacaaaatatgttttgcttttgtctcttttaaggtttttctctctgcttaaaccatgagatgagaatgcatagtttaatggcatacctgcacaaacttggcaaaggtaggaccaagaggtgatccattgtataatcccatgcaagccccattgatcaaggaagcataaacaagccacggtcccatcatccacccaaggttggtcggccaagcaacaacatccccccgctgaacatccaaatggcaccaagcatcagcagcagatttcagaggagaaatgttcgtccatggaatagcctttggctcacctacaccagaaaaccaaaacttggtaattcaacacgacatcctcatctacataccatgatgcctttttcttttcattggaataccagtggttcctgatgagaaaaggatgttcgtgtaagctcctgctggtttctctgcagcaacatattccacgcctctgaagaaacaagtatagcatatatcattctccgggaatttggaatagcaagctctaagtgtttctcaaacaaaatcgttgtaattacatttcataactctgtttgatacaacagtattgaattcactgggtgtacctcaaatttcttgcgtttcccaaaaagttgttccaagacaaatccttctcgcgcagcttcattctgcagctagagcctctagctgggacaacaattgccagaggtgcttctgcatcaacgactcttctgcagaatggaacatataatgtgagaccattgttacagcctgcatcttgagatcaaaccagccctgtcggattactagaacttcacctatagagaggaatacttttatcaccacgaataatcacatcctgcaaacaagaaaagtcgctttatacagtgacgattacaataattcaagaaaatgagtagaagccatgttatatgctggcttttatagagtgaccattccaataaatcaaacaaaattgctttttccatctaggctttaaactagggctatgttttaaaatccagagatcacataacaaccgttcagaatttggccacaacttgaactaaattcaacaggcaaaaagcaatcagctctttactaaaaccgtcgcatcacactctagtataacttaacagcaaagcttacaccttcatgttccatccatcaaagaatcatgagaaagttacctgagtaaaaatggcttttgcttttgatattttaagccgtgttgatatttcacggggagagaaactatcagctattgaaacaactacgtggccagctaaaacaatagcaaggtatatgatcacagactcaacattcattggcatatcaaccgcgattgctgactcttcctccaaacccaaagcactaagagcatgtgcagctaacctacacaatagataacaatagtcagtaaaggaaacaactttaaagcgttattcaccaaagaaaggccacaaggatgggaatttcataccagacctgcgatcttaactccaaaagtgtcatggtattcacaggaagatcatcgcttccttcatcacgccatcgaatcacaatatcatccaatcttctcttgaaaccattagtcaaacaatttcttgcaggattcaagtaagctccaggaagccatttacctccaggattatctccagaagtatccttctctaatatacacttaggaggtacagagaacaatatgtttaactcatccaatacagttttccaatacacctgatcaagataatcaccatagaattacaaaacacataatcacgaaaacttaaggcataacaataataataacaccaatgttagttacctcaggatttgatacagagaactcttgaaaactggagaaactcgaaactggattcttgtaatttccacctaaaaactctttgcctcgcttttctaataacttgcctacgttagttaaagaagcaaccttcctataatatacaacaaagccaaaatcataagaatctgaaacaaacggagaaaaatcaatttatggtaaacaaacaattcgtacgggtcgggtatccaagcgggtaggtcgggtccgaaatccttgtagcaaccgtaatacatcatctggtgaaaagagaaagggagattagggtgaaggatccgccgagaaatctgaatccacgtctccggcggcgtggatgaaccgtgaataatgtcttcgagatctctgagaagcttctcggagacatcaccggagattcctagagcttcgatatcagatttggtgattgaatttagggatttgtacgccatttttttgagagagctaagaaatcatgaatgattcaaaaaatgatgagagtggcagagagaagagtggcaaaattgtccacgtaatataaagagagctcgtgatcgccacgtgtcaatctgattctgatatttgatagctttttttcgctctttacacgtctgattggattatcttcttcttcttggtgataggagttactttttttttatcttcatgttatattatgatatgaatctttttattgatatcagtctatatacattgtatgagatatgaacttgtattcttaatctatgaatcatttcagaatctaggctccatattatatacattgtcgatatgttactatgaccaattttttaccttaagtttagttgggtatttttttttttgggacaaactaagtttagttatttatatgttaggaatcataatgaaagtgaaagaaaaaaaatgttgattgattgatatattgaggaaaagaagataacactttacatttggttactttatatgattttatgtatcttgaaattggtctcagtctatatacattatgtagtggtactgatctcttacaccttttttttttgctttctcttttcgacttttgatcatcatcttatttggtttatgtcttttatttattgatttcagtctatatacactatcaatttagattgtatggatcagtagagcaatatatgttagtctatataaattttatttaatttggtgtagaatccgttagcaaaatagacaattttgttacaattcggagtgaccggtgttacaattaatattaattagacaacattttgattaaaaatagtttgtatatacttcaactattgcacaatatttataatagttttcaaaatttatatcttggttttcacatgattgaaagcactaaactaaactccacaaaaaaaaaaacttgtctaatttttattatcttcaaccatttgtaaaatggattttcggcaaaaagctattggcaatcccactaagtgataaggctaggccacacacacacacctaccagatggtccaaaatgattgtgcatctatgtgatattacaattagttgtccataactcattatgaatttagtctttatcccaattttttcctaccactataggccaaactcatcccggtttttgatcatacattttttcttttagatgattagctactacttcagtttgatgtaatcttttccatatatgatcatcaatgtaaaagacaagtaagtaagtaattcgaaaatcttatcttatcaaaagatctctcaaagttgagaaataaaggaatactaaacaacacttgtaaaactatatatatcctctgttttcagtcggagctaggaaggaacttggttccggacctagtgccaaagcttctcgaagctgccgggataatccgcgatggagacaagacttgtgcaaacgagaagttgtaagaatcagtgcctaaacggctctgcaaccatcctctgccaccagagaatccatctgtcacaatatagcaattcttgtacccgagaacctttaacgttttcgccactatcttagccgaatccgtgtacctacgagccaaaaagaccaataaagattaagcaagattcacaaaaaaggtcttgtaaaagagtaataatcaaaactcacgagtccaagatgatgatattggagcctttgttgattttcttgaggtaagaaatctttaatgctgctatctctgcttcaactcgtttagagttcctcacgattccttttactttgtttggtagttcttctaatctgataatcacaagaacaggttcaatgttttgagtataataataatgaaaagaattatcaaagttagatagacacatacggaatggagatcacgcggttcttagcattcgaagggagccgtggaatcccggctttctccttgtctttctctgatcttatatccaccatcaagtagttcttggtgcaaagaaggtcaagcgtttgagccggcgtaagatcacctttattaaaaaaacacaaaccagaaacacagagtaattgtcagcattttgctatggtgaattagactctagatacaaaatagatcactaataaccaaatcaaaaacttatatatgttctcaagatgatctatatggagtcttgaggtacctttgtaaccacggaagttaaaagagatggcagagaaaacaggagggagaagaaggtaagcaagaaacgcagcaccagcagcaacaacaatgacactagggtcagctgaagaaatcgtatccatggtcgatgaagcaatcggtttagcatcttctatcgcttttgacgtctgttgtgctacatctgttactgtctacatcccaaccaaaacacagacaaaccacttcaaaccctaaaccccaaaacctaaattgttatgttctcatacatatttgaatgtaagaaatctgacctttgcagcattaaagacaggctcagaatcaaaaccagagctctgcattgcttcttgagctttctttgaagcttcagagaaagcaggagaagcaagcttcatagcttcttcaccagcttgctttgcaatgggtaaagcagtgtccaaagctggtttaagagcatctcctactacttggaacacacgctgcgttgcatcaaatacactagaaccagtttcttgaacttggttgattgttttctccacctgttaagacacaagaacactcatcaacaaaaaggagacattttggtcatttcaagaagtaaagtgagattattatatatacttcagtgagagaggagacgatttggtccttgggaatggaaacagcagctttagcttcatgaggaggagatgcaaagagagataacagagagattgaagttgatgttggaagtgaaacagagacttgtctcagactcagtgtcttcttagtagaagaagaaggaagagtgagttttgcagatagtgaagacttcgttgccatttccgccatagccatggtttctctctgccacacttttttacaaatcaatgcgacagagaaagagacaaagaatctttagagcttctcttcaatgttgtctgcaaactgtttcttcaagtacctttttctaaagattataaataaattgagttttctggttaagattgaaggaaggggatttgaaagatggattcttattggtcagactaatcctacgtggcatttttgtgttaaagcttagccgttcgttgccaatccaatactttgatatatgtcgtacaagaatttcattgtagcagtaatatcagaggtgtactacagaataagagcaacaaaaaatgaatactgtacattgaaacatgcttatggttgtacacgaagtagctatctgttttagccgcctcttctaacaatgagttccatcagttcgattggtaatcaaagaagcggttcaacctccgctccaagcgcctcaaattgtgttaccaatcaaagccaataaacatcatcttgtatgaaccaagaccgaaaactgctattaaacttcattccgtacaaaaccaagtatcttaaattggactgatgttggtttaggttccgttcttgtggttcctgtttactctcctaaaaatttgaacagatttgagcatgctgatcaagtgaagtaaactacctacacttggtcaaccgtctactagtaaaattatagactcactttattaactttcccatgattgaaggaagacgagcaaacacacatgatcactagttccatagcatttacaagtatataattccacaaaatgtatagtagtaccattactagaccttaaaacaagcaagctcaccatttaaactatgctattaagttcatgtttgttaaagcatcagcctagagagtggtatcatattattagtagtgctaccatcatcacaaattctatataagaacattgtagagaaacagtattttctcatattttaacagcccctcttgtgtgaggaatataagaaagataacaagtcttgatcttgaaaaagaacaagattctccttttcttacctaatttgaaaatggaatcatgataccatttgaagttttgctccaaggaattttaaaacccacgagctaaggaatcctttcacttcacaagattccctcaccttttctctgtgctgccaaaggtgagggaaaaaaagagaggacacaggaagaccaatgacttataacaaaagtgtcttttacaacaagaaagtttaaggagtgaatttgattcttcttgaacagccagtttcataaatagtaatacgaaaagaacaagaagtatagcatggctctctagaaggttattaatcagtgaatatcaccacttggatcctgattaaagggttatcatcacgcactcattgcgcaatgtatcaaagtttttgattgtattatactattctacgtggattccttatcacttgccaagaatgaacatagtaatgcaaaagcaaaggttttagaattatgcaatgtctatgtaggtaatacttaaaagagccagagaagtaagcaaaagcacacattgcatcaagaaaccaagagatcacagcaaatttcatatcaggaactcataacaacatagccatgctcaggaacaaaattagcgttgagggtctgtagtgacaaaagacatagccaggaaaaaaaccgatctactaatctgcaaagctgaagaagtacaagttggattcagtggctcaacaaacaaaaacaaaaatgctagatgaagaaagaccatatggaacacaaaccttgatacatacatgtaaaccaaaagtaaaactgcatcatcagaattcaggaccattgttaaaaaacagatcaataaaaaaaaaaagttaagacaaaactgaagttgtaagatttaagaatatgagtcaattatgaagacatgactacaaacaaaaacacatatgataattgatctgttacccaaaacaataacaaacaaacaatttcattttatccttttttcatatacaagaattttgttttccctcactatctcaacagctaaaagatgaatactttgaattagatttgggataaattttaaatatttagtttcagcagctgagaagactttatcgaatccattgtcctgcttctcagcaatactcaaatagatatcaattaaacaaaagtcatgaagagcaagcagcgctggatgcagaggtttatcgatcgattcttgcttttgtaaacaaaaataaatattcacaggaattgatcgatgaaccgctgcctccagcgacttcactctttcctcattcataaatcataaataaataaacaaaaataattgacagatctgagaaaatcggttgatgaacaaacacaaatcattattaatctcaaaaagattaaaagaaacatttagataaatttacagagagaggtggatagatgcagagttataaaactaggagctgctcatatatatagagagaatgcatgtgagaaataagtggaaggagaggagatttttcaattggaatcaatgaaatttgaaaaagaggaatctgatgactcaccgttttaccgtacattacataattttctctcatcctcgtcttttgtactttttggtcaataaaaaatccaactctatgattgacagtctaatgattctcactctagtttttctcttcttttctacttcttttcatttttatataattttcacttctttttgttaaaatttatcaaatatcaccaaaatttatcaactctataattttcactttttttgttaaaatttatcaaatatcaccaaaatttacctacgcattacaaaagataaacaatagactttaccaaaacctaactctttaaccataagctaaaaacaaaaaaaaacaaaaaaaaaaacaagactttttgtcaaataaataacaataaatcatatatatctttttccttctaaaaatcattctattatatggaagttagaattaatgttaaagttatacaagactataccacaaaaattattacataaacagatatgtgagtcattttctaaaaaaagtacgaagaaacaagatttaacagtaaattatatattagtgcaattttcatcactaaagaaaaaaataagttaaatattacggtaaaagtattcataacaataaaaataagaatcatcgaacaaaacatcaaaaaaaaattataataacaagattactcatcacattgaagcaccaaaaaaaacagcttgaatgatttaatctcatcacattcaagatagtgagattaatgttctcatcgaaacactataaaaaaaaaaattataataaaaatttcgatctaatactatttctttgtcatgaaactagcttgaattgataatcaaaatatttatttttaaaataatatgtaaagaaatctgttcaaaaatcactccaaaactagctacccattaatacaaaaaaattcaaagagtcgttccaatagaccccttttcccaataaaccctaattccttgcggcttcttcttcttcctcctcctccattcctctgtaattatcaaatgtttggtgtttcgatgagaacattaatctcaccatctcttgctcccttctctcttcatctccataaaccctctctcttctccaccgctcttcgcttctccttctcaatcaacaacataacccccacaaattcacctccttccaccatttccaccagaaagctacaaacgaaagcgacgagggtaacatcatcatcatcatctcagccgctctcctcctcatctcccggcgaaatccacgtcgtagtcggtccaatgttctccggtaaaacaacaacacttctccgccgtatactcgccgaaagagaaaccggtaaaagaatcgcaatcatcaaatccaacaaagacacaagatactgcaccgaatcaatagttactcacgacggtgagaaatacccttgctggtcactccccgatctctcgtccttcaaagagagattcggattcgacgactacgagaatcgattagatgtgattggaatcgacgaagctcaattcttcggagatctttacgagttttgccgtgaagctgctgataaagagggtaaaactgtaattgttgctggattggatggtgattttatgaggaggaggtttggttcggttcttgatttgattccgattgcggatacggttacgaagctgacgtcacggtgtgaggtttgtgggaagagagctttgtttacgatgaggaagacggaggagaaagagacggagttgatcggtggtgctgaagtttatatgcctgtgtgtaggagtcattacgtttgcggtcaaaacgttttggaaaccgctcgtgccgttttggattcaagcaataatcatagtgttgtagcaagttcactttagtttgtaggatttgagagtgtttagatatttggtttattagctttgagatatttggaattttaaacataattatgtactatttaatcaatgattttaagataacactcttatttgtgaatttcttgtagaaacccttatatcgaaaaaatttcaaacgcataatctaatttgttaccaatatataaatgaaggacatgacagtatctctctacctcagacgaagcaatgaacccaacaacaagctcatcatttgctatctaacctgaccatctcgagacagtgcagagcatcattcatggcataccccaaaactacgttatttcaatgttcacacaaaaatctatgcaagtgctctgatttctctccagttttagtcagtcaacagctttgattaagtttcagtctcgtcgcctcttcttctcccgccttgactctttttgttcttcgtctgagctataccgtgaagaagaagacttcttggtcctgcgatgctttgagtgcttcttgtggctacttctcttctctctagaagattctctccgcttgctcctagatcttgatccttgcttatccctgctgtggtagtcgctggatgaatcgctctctgaatcgtttctatgtctatccttcttattatatcgttttctcctccgttcatctcctgaggattcactcgatgatagatcgttgccaccactccgttttcctggcgatttctctctcttttttctactcttttcttcttcagacccaagtgtgaggctgcttgtcttctcctccactttctctttcaatccgggtcgatcaagtcttttatcagaagaatcttcgggtttgcttctggacttgatctcttcttccattggcacctcgaaccctagttctttccctaaagattctaggaaatcgccagctataagccggtttaatgtggttgcagccgcttcattcttcttttcttgaccctcttgtatctttccattcattggttgatcttcatcatcttcagaatcatcagagaagatagcctacaagtgaacatgacccaatattaatagatcgaaactatcaaattgagttagcataaactttctcagacaaagacactcgctttaccttgtaaagatcaacaggtctctccacattctccacttctacctcaacttcaggctcttctattgatgtctctttcttaggtacttgcgactcagatacttgacgtgcagatgcagctttcactgtatccggcaagaatacgagagaatccattttgtttctcgctcgcggagcaggtggcagctgtaaaattgaagggaatgtattgatcaatcaagtactaaattttacacataacaagaacatggcaccgaaaattgtataatttacagctaaacaaaatagatcaagtagaaagcagtggctccgggttttttttaatctttaacatgcacatcattcaattgttaacatatcccaccacatctgagcaaaattgcattggatgtaattaaagtcatgattatacaaacttcaccaacaagtgctctccagtataatgttaacggtttgatgagtagaccaagctattttctagtgttcaatgaatttaagctctaaatgacattccatgacggagaagcaaggaaccacttatttacctttcccatgaatggatcggggagatcaaaacgtttgcacaaaagaggtgaaggacgccattggaactcttcccttttaggatacgtcttactcgatttcatgtctaccactccagtgtctttaatttgctgtaaacaaaagttttacgtatgagtatagaaccccaaaaatgaactgataactgcaaagaagattctgtagacatacctctgttcccccagaagtaaactgaagacctccagcaaggaaatcgagaggctgttcggtagcccgtctgacctccttgtaagctttccctttctcaattgcctcggctgcagcctcaaagtccagcctctcttgtgcccgagctgattccgacatgctattaactctgttggagtctgttgtacgtaaccctcctttgtatttctccttgagaaactgctcaaatctttcttgtttagctggatcatctttgaagggcttcacagcatctgctgcctcttgctatttcagggagagaaagataagtcaagaatgtcagtgcaaggaaaacaaaggcatatcacttgaaactcatctatcaagtgtaatcaagctaaagtcttgtaaggtgtgaagttgtttacttacagatgaagctgatttggtgaatgtgtcagagagattggtcgggaactggaaggagcctccagaagaagcagaagtatcggtttctttcaaacttctctgcaatggcttttcccctaataagctgccacgtgtttctgcagtcattttctgtacggttggagacaccttaacatctaatgtcagcttactttgatctttacgcttttgctgctcctcccacagccttcttgcgtagtagtcatgaccgttaccttcccgaagaaaatcaaacagctgatttgattggttcttctctctagaaagatcctcgtatagtttcccgcaacgggaaacaaaagttgcaaacccctcgatcagaagtttcagattattatctgcaggaggaggaacttccggaggagcagaaacagttggcttagtttcagcctcaagaggaccagaaaatttatgccgggccacaaaatccttcgggattatcggaggattaaatctgatataatatacaaaacacacaatgatatgaattagactatctgaatgtaagtagccataatcagaaaattctgagagtaagagctctattagacatgcaattgtgtgatgacattgatttaacaatgtcctcatgtttgtgaatcattgaaacattacctctccatactgtagtcagaattcttagcagctccaaaacctggcagaacgtcatgctcttttgaggttaacctcagtctattgtcattgctctgtcttgctggctgttcgtcttctatgacataagtctgatcaaaatcgtaacctgaaagaaaagaaaaacactttggtattgcagcatattctgagaaacaggaggttgataaatccaaaactagcacttcaaattgtcaagaaagtatttacacctataaccaatattattcttttacaaaagcaaattacttttacaacatacaggagctttaaattaacgactgtgggacaatggtttgtaatctttagaataaataatagttcaacctgaacagacacttatgcatatatgaacaaagaaaccatgattagtgaaattgcacttctgtccttaccagcatagacatcttcatcctcaacatcaagttcctcaagtgctccaatgccaaaacccggagcaatctttcctgctgattgttcaactcatgttagtaactaacaaaacccataagtagttttcacgcaacaagaatgccaagtaaaagctggcatagagatacgctatagatgcatgtaagtatctttaagcaaagaagagaaaattaacaagaaagaaaagaaaaaatggtgagtcaaaatcttacatttgggtccaaaaagactttccttcattgataaaggttttctgaaaccaacctccttattggcagacatgcgagatcttttcttttctacagatcagaataatgtgaagcaagtcaatgaccaagaatgccctgtcagcagaaacatcataaaaagtccaaactaggtacctctaaattcaggagcatgcttaaaaggatcatatcctaatccatgcagatcttgctttggattcagaacatatacctgcaatcgataaagggggaacaaaggatatcatcaaaatcaatgtaactaagggtaatatctgaagaagctcagcagcagattagaagcagtattcacagtccgacgttaataaaaagtagaagagaagttcaagaaaagtatgactaatagaagtatcacaccagtagcgattacaatcaacaacatatagctcgtttgaaaagagaaacaggaaaattgactcacaggagtgctttcagaaattttaatatcttcacccagagaagtttccacttcagtctcagaaacaagcgagtcgggcgtttcctttgtattctcatcagtatagaaggctaagaatgcttttctagcttctctacgagcatctgcaccaacaaggtataaaagagagagagagagagacgaaataaagagcttgctgtgaatttccaaaatagaaaaagtattgacggcttttcttggtgcacaaaagaagattatggattagtgcatgttaaacaagttcaaacctgaactggcacgcacttcctttattgaatgaccacgccgccatcccatctttagcaaaagtttgacccctgaaaaatataaagaagcataaatgtgagatcaggatttctccacttgatgcattcgaaaataaagaaaacgaaagaaaaggaacttttgcaaaatattaaagaggcttattgaaactaaccaattgactctgaaactggagcaacaagttcgtcaggaacagggccaggaatggctgatggcctgtgatacagaaacaatatgttacaaatatatagatagcaacttcttataaaaaacagactacagataagtacacagacctctcatgctgttctttctcagcatgcttgcgggaatgttcggctgccgtaaacccaaatgtgtcaaattgtgagctcgcagacagtgatttgccctccatatcctaaaatggaaaaggatttagaatggtgtaacatcgttaaatatggtgcacatcttccacagagcaaaatataattcccaaatccacactccattttaccattgataaaagtaacagaagaatcatgcaatatgcggtaatcaaactttgacaagcttaaaataactcgaaataaagctttaacagatctaacaaggagaaaaagatgaaacataccgccttttcatcttcatctagaaagtctgaaatactttgctttctcgctccagctctgttctgccttgatgatgtaaatgactgtggagcccagcctgaagtacgatttagattgtaaacagcatagcacagataaaaaagcctttgaaaatcaggtaatgtaaactttaccctcttttgatccaactgtattgtaatacccagcagaatatccaccagtaaatgctccatggaaccttctacggccttcttcatcagtcacctgagtatggtaaaactcgagatgttagcaactttccacataatagtacaactatatacagatagactttatttccagtaaaaactcatagtggaaagctggacaacgaattcttgcaatatcatgcatccattagtaaggacacaaattttcatcacagattgcttcaattagtttgcaattagagaccaaggaagatgccacatacataaatacatatttcaaaatgcctacaaggcaaacacctaaatgcagataatcaatctaataactatccatagatacattaataagcaaaaacaaacacagcaaataacaaaaactcagaatctaactgtctagcatgattttgagtattaaatcagctccagtagagacattcacttcgattttcttgcttaaggttaatttcattccgggatactcacaaattttcaagctgattaagctgaaacgggaatgcctcaaagttatcccttaccttactcgacataaaacctattaagctctctacaatacgttagaatcacgaaaacaagcacaacgaaaaaactcccatgttcatggccaaagcgagtctctcgaagctcaaattatctaatcatctgcaactaaatagacgaactagaagatcaaagaaaaactcacctcttgcttccaagcagggagagttctaagattgccagaagccccagcgactgctttcttcttccggcttgcgatttcttcttcgcgctctattggcgttccatgaaacacgaaatcttcctcgtctgaccccattgtcttcaccaccgagaccgagaggagcagcagcaattcgagattctgaacgagtcccagagagaagaagaagaagcagaatcagagaattatggaggagatatctgggcctggttcgggtctcttttcggcccattagttttgttttaaaatccaattgctataaggaagttaaagttatcttcacgcgccgtctctaagcgttgtaaaagaaagtgtgattcacgcgctttgcttcttccgtttgccctaaacgactctgctagagaagacgaaggagagagaaaatccctccgattatattccgtacaatccgatcgatttcccggcgccagatctcaccgcgactcgtctactttccgatttggttcgtgttgactcagttacggtgagtcgattatctctatcttctcgtttttttccgatctccccttgatttgctctttatgcagatcttcgtgtacaagcacctttaacctgatgaattctgtagattaaactatggatccaatggatatagtcggcaaatccaaggaagacgcttctcttccaaaaggttagtgttattgctcattgatcattaaataggaggatttgtaaacctagctatatataactctgcttgaaggttataggattcatgagcatcataaacttcatttttttattatcttgctaagaatatgttttgttgttctctattgttttagctacgatgactaaaattataaaggagatgttaccaccagatgttcgtgttgcaagagatgctcaagatcttctcattgaatgttgtgtaggtaagatcatatagtttctctctgagttcatctatatatgtgagagttcttggttttcttactgtggtttaaaacattttttgcagagtttataaatcttgtatcttcagaatctaatgatgtttgtaacaaagaggataaacggacgattgctcctgagcatgttctcaaggcattacaggttcttggttttggagaatacattgaagaagtctatgctgcgtatgagcaacataagtatgaaacaatggtaatgattctctactttcttctcctactcttgataacgaggagacgaaaaaacgattaatgttaaccgtttcctacatttgtgactctatagcaggacacacagaggagcgtgaaatggaaccctggagctcaaatgactgaggaggaagcagcagctgagcaacaacgtatgtttgcagaagcacgtgcaagaatgaatggaggtgtttcggttcctcaacctgaacatccagaaactgaccagagaagtccgcaaagctaactgaaaccgtaagggtaagtgttaggcaagaaaaaacaacatccttttaacattcccttgtaagttgcaaatgcgtatgttctctgtttatatgctcttagtatgatatatgttagttagtgtttcacgatctaaaaacacttgtgattcagatgtaattagtaagcattccttgttttgtgtttacttgtgtcttgactaagcatggtgggtcaggtctacacaaagcatctgattcgatgacttacaggaatcttaatgtttgtagattggataaatttggtgattggtgtaattgtttttccataaacacaatgcaatcattgtttagtgttgttaacatttgccctgtgattctgacgcgaaccgagaatactgtactgagccaaacatagatttttggttttcggctaggttttggttctctaggctgaaccgattggcgtactttcaatttgccttcagtaacctgcgaatttcggttcggttcgacattggtttctcagatagttatttgtttcttaaagaacggattataccattattagaccgttttttaccaaaatttgatcgggtttcgcaaatgattacgaaccgattttagaaaataaagaaggaaccaaaaccaaaccaaattgaatttcttttcggtaaccagttagaagaaatacttcggttaattgataaccggaaaactgacttggtttgtatgttttgtctttgtcattagtagaaaaaacataaactgatgaaattatttaatagactctagttttcccagtctcaaattttaatctgttcgtactaaataactgatttgttcattaaatatatagttccttacaaagcaaaagacaaatggttcattaatattttagtttcttactaaaaatgtacataaactgatgaattatgacatcattaattaaagtatatactgtaaaaggtaggatgacttttgaccccaaaaaaaaaggtaagaggagtgagggagagtcgaagaaggggaaggtactagcaggaccatcaccggagtgacgtgtcagttcgcaggtttctgtttactctgcacccgacaactaataagagaatcagaacagacctatttcatatcttactatttatgacgtcaattgatcctaactatataacttacgtatttatttgtaacattattatacattcctttgtattattataacagtatgattttattctttgatatacaaagacaaagcctgtcgaatgttgtattcctcttaatggcccgtcacaccaatctttatttgagaatatttcgtactgaatcgagactattaatgaatagttgtataattgaatacattcatctttccatgataaaccatactataagtgttagacaattacttgaacctatctataaagcataaacttaagtatccatgtaccaattgatatcgagtcttgttgtatgtttaactttttttaatgacggattgttggaaacctgtagtggttgtatggataatatgtgtactaattactatattatctaacatgcacgatttaagtttcgtattagtaagtgttgttacagtaatataaggatagtgacgtcaagccgcttgtgccaaattattgtcttgcgttttttaccaggaaaagttggaaaaaaaaatcttacttttactgccaacaactagaaaaacagttctcagaactatttgctttaacatggttaaaaaaaactaataaccgcatacaattcaaaaagtgagatggaaaaatagagagtacaagaggttcaacaattcacttgcatttgtttcaatttagaaatgtttatattctatgttgcttttgatacttaatctttactttttttttccctgtccattgatttgaaaataagtttgaaatcatctacgaatctttaatatgattagagattgtataatatgtacaataaagatttgatataaagaagaaaggatttgatataaatgtactatattttggtaaacactccactctttttttttactgtataaaagattgaagtcaaaaaaagggtttttgagtcaaacaaaattgagggtctttgtagattaccccacatagaaaatgaaacaacacacacactttgtccccagattcctttcttttgtctcatttctcgtgtttctcccaaagtattcaacaaaaacacaatcctcctctccacttattctcttaactttatattaatacaactgaatcaaccattcatataactaaaataaacaaaaatcaacatttacaaaattcagcaccaagcttttcttgtatatttatactttttatatattttctcctaaatacatattttgccttggctcagatttattaaattcatattggcaaaaggttttattggtggtgttgagaggaatggaagagataaagatgtaaatgaaagaaaaaatatttctctcctctttacttgatagaatcagttattttacattttcaaattgtctaacaagaattgagcataatccgttttaaaaaaaccaaaaatatctctagaataagcaactaattgagctaaaaagtctaaaactaatcccaagctgaatcacttaacacctaagagcatccccaatggttaagatgttaaaacatcttaattttggatcttaatcttttttaaaattaaaattttgctttttcaaagttaagataagttaaaaaaatatcttaacttatttatgctccaatggttaagaagcaaaaaattcttaagggaaaaaatttaaattatttatgttctaatggtttttttttctttccttttgtttatttgtgtacccaataaatacaccgcacatgtccaattcttaaacttaagaaaatatattagttaagatataaatcttagctaatcttaactgtttttattaaatttaatcagtttatcaattaagatatagacaagatatcacttatttgaaccgatggggttactctaatatggttaaatattgaactaaaaagcaaaagccaaatctacacttatattcagaaactattgttttttctcttttctttttcttactttaaaattttgatttccgaaatcctctacaaagatgaaaatggtgggtccaatcacagtcggattctctgtcaaattgtattatcttctctctcacaccaacacactcacaacgacaagagatagagagagacaaaagcaaagagaagaagtgagataaagagagttatattcaccaaatagaccaaaccctcaagttaaattcacaccaacaactttgatcattaccacattctctctctctttctctctagagcttctagcttctctttcaatggctaaagactttgcctccaagagacacaatagtttccactggacaagaaaagtcggatcagacgaaaacgacgacgtttcttctcataaacctcttcctcatcacaacaacactaaaccttcttcttcttcatcttcatcttcctctaatgtaatcactcacaaaaaaaagcttcaatctttcgccgtttctcgtctccggtcagttatcgctactctaagcagagcacgacccggtaaccaaaactccgggctcgggtcacgggtcgtgggtacacttttcgggtctcgtcgtggtcacgtgcatttctctatccagaaagatcctaattctccaccggcgtttttaatcgaactcgctactccgattagtgggttagtcaaagaaatggcttcaggactcgttagaatcgctttggagtgtgataaggggaaagaggaagaagaaggagaagaaaaaaacggaactttacgtcacggcggaggagacaagacgaagacgacgacgacggcggcggtttcacggcggttggtggaggagccgatgtggagaacttattgtaacgggaaaaagtgtggatttgctacgaggagagagtgtggtgagaaggagaaaaaggttttgaaagctcttgagatggtttcaatgggcgccggagtcttaccagagacggaggagataggcggtggtggcggcggcggaggagatataatgtatatgagggcgaaattcgagagaattgttgggtcgcgtgattcagaagccttctacatgatgaatcctgatagtaatggagctcctgagcttagtatctatctactcagaatctgatgaacaagacgatgatcgatgaagaagaagatgactcaacaaaagcctcttcgtcaaaaaaggaaggttcatggtttagtaagattttccggtttaattacttaattagtcggttaagtggttaagtaagtcgatgtctaatacttaaaatcgaaaacgacgtatctattattgcaaattcggattagatgtgaatgtgatcgattaaatcgatttcgtgttagatcagttttttttttttttgggaggggtttagaggttttttaaaagttggtatatgggatctggaggactttgtaaatgtataaatttcgttttaattaaatctgtaatcttttgttgttatttcaaatgtttaatgttataattgagggcaccgagcctgtagaatcataatgattaagagtattgattttgttcccactccattagtgtcactaaattatgatttttaaagtgtaaattcatcattgagtttctttgatccaagaataatttagcctgaacaagtatggaccatttggaccatacgttattatgagttacgcgtatcgactataacgacgcattatttttaattttatattcttccatgtggatcaatctattaactattcaaaattaaaacatatttttaggcttacactcactgattgctttagttattaaattgactacggccggtccatcagttttaatttctttatttcaaaatgaaattagaaaaccaagaaacttaaaatacaagtaaatatttcttcttatgttatacgtataacttacaagattcgtcgataccatttataatcaattaccatagaaatgcttttaatcaagtgttaacgattatcttgcgaaatagagattaggttatgtgttgtgtttgtatcgaatgaggtaaaagaaaaacaaaaaacaattacactttgaaagggcattaatgtcatttgatggacagaatcagttggacgtacaatgtttttactggtgagctcgtatgtcttttccctagttttaaggctttaccttttctagctatcaaataccaaactctatttttagtatttaaatcccggggagcctctgctttatttacattttcattaagttttaatggaaaaactgtaacaacaattcataactcggctctacttgtcgggttatgaagtcttagttacttgatgtcgagaaatcatctctcattgtgatgggaggaagcagttgttactattggttggctatgcgcagctttggtaaatcgcattcacagtttcttcaaaaaaaaaggtcttctttggtgcttgggtcaagtgttttcttcggattttagtttgtatgtttctatgcttaggttttggtttcgatctctttcgatttcggcttttaaatttctgtttatgtttctctttcatacgattttagacttcgggaaattcacgtttttctccagctttagtttccgaaaacttttctctcgtccgtcggctttagtttccgaagatttttctttcgtccgtcagcttaacttccgttatttgggatttgtatttcaccttagtttcaaaacaagtttcataaataaaatatttcagatgataaaaaaacaattcataattcggaaataaaaagttacaaacaatgtttaaaatagtacttaactgtttccatattttaaacattgtttttcccccacaaaaagcaggttcttgtacattcacaaagcacacacagatccgattaagatttagactgcacaatactcaaggaacgtgtcttcttcttctttttctttaaagaacatgtttactaaacaagaaagtgaaatttcttcatgagaatttgcaaaagagacaaaagctgatgcctacaacaactaagattataataacaaaattatgaactgaaaaaagagacatgttcagtcttttattgctttatatctttctgcagttaataaacgaatttgactacaatgagaagctttttctttcctattttttttattgtgatcttgtaagaaaaaatagtgtttaacactgttatttactattatagtttgaattatgttcttgatcaccaataacaagtaaagttggagatgtggtgcagtgataatgaaaatatactaaactaacaaaattaatttaaaaggctcaatggtttaagcatttaagtgtaaccccaatgtaaactcatttttctgcaattgggccaattaaatatagacaaccacaaataaatatcaatgacatcatcactgtatatcctaatgcttctcaaagaggcatataatactgtaatctccaatttttttgtttgtcaatttcttttaatcccaccctaccattgacggctgtggaggaaaaaagagagacaactaatgaagtaatgagtaattatacttttgctttagttaaagagccggctttagccgttttttactttcttttgtttagtttttgttttctactttattcttcttaagtagaaagtttacccaaaaaaaaaacccatcttaagtggaaagtaatagagcataaataaaaaataaataaaagagggttacaaaatatgcatatttattaaaggatcacatgtattctaaaatctgatatacgttagccatacgacagaacctcgtatagccttcaaatgtattaaaatgtaaatgcttcgtcgaattatgcgatatcacagattatatcttgtgcactaaaagtatggactatttcaaagaaatattcaataaccaaatgtacttcaaataatcattattagatgtaaaacccattacatggataatgtggatttcttctagatcgctctccttgtagaaagaataattgacatagtataatagcaaattgattatggaatagttaaggatgttcaaaagggttttaacttttaaggccaactcgacctgattctaaattagctcagttctgaattaactctaacctgtttttggtccgctaaattttgcataaataatatggttaagcctttttgtaacatggttttagtctgccagtttttttatttaattcttttttacaatatttttgtatgtataaataaatagctcagattttcttctcttaactaacatttaaaagttattatgcattcatagatcaggtatttgtttcatattttagaccctaatgcctaaaccccatgtagcgagctacaagagcaacttaatgtctgtacaattaaattaattatcgtttatagggtttttagaaaggcggttaaaaaaattatttatatataaatctaataaatgcttatattgttcaccaaaaagtaaataaattttaataagttcaaatttaaaaatttatttttaaaaaataacaaaaatatgttaaattttattgtaattataagttttactctaaatgaaatgattaatatgatatatgtctaactttatctctaattaattaatttttaatatgtgatttaacattatcaaaatatatttatatttacattagctcggtaaattttctgtgttttggattaactacaactttagtatagtgtaattagaagtggacaaatatgtataaattttaataaatacatcatctgaacttatctctttattttcaatattcttaataggccttgaattagaggcccaagtaaaaatgtcgaatattgtttttttttcacatttgtaacaatcggctttaataaaagttttaattctgccatttcctttcaaagtaaaaactaaaaagcttcccttgaggcaccacttcttctagagtcgatcttcttcaaccttgactcgtgagtcggtgcgacccagattcttcatgatcgtaatctcatcttctttatatattcatgggggtttgatcatctttctgcagcaacagagataacgtttaattcgaagatggattcacttcttctcgaagattttgggcagaaggttgatttgacccgacgaattcgggaggttttattgaactatccggaaggaaccactgtgcttaaggagcttatacagaacgctgatgacgccggagctactaaagtccgtctctgtcttgaccggcgggttcacgggtcgggttctttgctttcggactctttggctcagtggcaaggtccttctctattggcttacaatgatgctgttttcactgaagaggatttcgttagtatctccagaattggtggaagtggcaaacatggtcaagcttggaagactggtcgatttgggtataattttgattccttactgtcactttttttcccgttgtttcttgcttatgaagatagcagtatacttcttaagaagtacgtggttgagtcaatctcagtgtgttacatatttgttttctgataaaaatgttctgactttggtattatagggttggcttcaattcggtataccatttgactgatataccttcttttgtgagtggaaaatacgtggtattgtttgatcctcaaggtgcttatcttccaaatatttctgcagcaaacccagggaagagaattgattatgttggttcttcagctctgtctcagtataaggatcagtttcttccttattgtgcctttggatgtgatatgagaagtccttttaatggtactttattccgtttccctttgaggaatacagagcaagcagcttctagtaggctttcaaggcaagcctactttgaagatgacatttctttgatgtttgatcaacttttcgaggaaggtgttttctcgttgctatttcttaaatgtgtattatctattgagatgtacacatgggatgatggagattcagaacccaaaaagctttactcatgttcggtcagctcaccaaataatgatactgtgtggcatcgccaggcagttcttagattgtcgaagacatctatttctggagacagggagatggatgcatttactctggagttcttgagtgagtctgaaaagggaaaccaaactaaacggagaacagacaggttttacatagttcagacaatggcatcagcgtccagcaaaattggtttgtttgctgccactgcatccaaagaatatgatattcacttgctaccgtgggcttcagtagcagcatgcatatcagacgattcatcagaggtactgtgcaatattgattgtgcctttttgctatctgcagtaatattttttcccatgtcgcaccttcgtcattgtgtgtgtttgcctatcatccagataacatgtattaacctgttaaaaattgtttagatttttgctcatgttggaactttgtgtacattcttgcattactaaacatacatttatttatctgtgttatcgtaatatcctccatcttcatgcttactggtaatccatatatttgcattcttttcaattatcatgttattactctgtgccgcgaaaggaagtcatttgtcactgcttttcgattggagcttgcattcactctgttttcatatggttttgacagaataatatcctaaagcttgggcatgctttctgctttcttcccttgcctgtacgaactggattgacagtacaagtcaacggatactttgaggtgtcatcaaatcgtcgcggaatttggtatggagaagacatggacaggagtgggaaagttcgttcagcctggaataggcttctcctggaagatgtggtagctccctcttttgcacgattgctactttgtttgagagaagtgcttgattccagagattcttacttctccttatggccaagtggatcttttgaagcaccatggagcatattagttgagcaaatttacaaaaatatctgcaatgctcctgtactgttttcggatcttgatggggggaaatgggtgtctcctgctgatgcttatcttcatgatgaggaattctcagggagcaaagatcttggtgatgccttattgcagcttgaaatgcctatcgtgtgcctcccaagactagtttttgatatgcttttgaaacacccttcatttttacttccaaaagtggttacgccagatagagtgcgcaactttctcaaagaatgcaaaacgctttcagctttgaagaaatctttgaagctagtattgttggaatattgcctggatgatctgactgatgatagtgtttgcacacaagccagcaacctgaaactgcttccattagcaaatggtgactttggcttcttttctggacgtacaggaagtgtctcctattttatttgtgacgaattggagcatatgcttttacagaaagtttatgacagagtaattgataagaatattcctccaccattatataccaggctttttgccattgcagagtcacgaacagcaaatgttgcaattttcagtatccacaacttgcttcagttatttcctaggcttgtacctgctgaatggaaacacagaagcaagatttcctggcatccagaatccaaccgagaccatccatcatcatcatggtttgttctcttctggcagtatcttgacaaacggtgtcagagcctatcattattctgtgattggccaatcttgccatccacgtctggctatttgtacatagcctctccgcaatcaaaattgattaacgcggagaagcttcccgctgcagtcagaaatgtcttagagaaaattggtggcaaaatattaaacaacaatattaaagttgaacattcagacttgtcctcctttgtttcggatgcaagttacacaggtgtcttggagtccatttttgatgctgcttcatcagatttggatggggttcaaaatttaatttatgatttgaatgctcaagagaaggacgaacttcgtagttttcttttggatccaaaatggcacataggacatcagattggtgacctatacctcagaatctgcaagattttgcccattcatcgtatttatggagaaaccagtgctcaagaatccaagtattctgatcttgttaatcctcctaagcatttacctccattagatgtgcctgcctgtcttctaggatgtgagtttattctgtgttgccaaggcagcgaagaagatgttttgtcaaggtactatggcattgagagaatgaggaaaagtaacttctacagacagaatgttttcaacagaattgaagttttgcaacctgagattcgtgatcaggtgatgatttctattctgcaggatcttccacaactgtgtctggaggatagactcttgagggaagaattgcagaacctagagtttgttccaactgtaaatggtcctcttaagcgcccatctgttttacacgatcctcgtaatgaagagttatatgctttgttggaagattcagattgtttccctgctagcggattccagggatctgctatcttggacatgcttcaaggtttgggccttaaaacaactgtttctcctgagacaatattggagagtgcacgattggtggagcgattgatgcacaaggatctggaaaaggcacattcacgaggtaaagtgcttttttcatttttagaagtcaatgctgtgaagtggctgcctgatcagtcgagtgaggatgatggagctataaacaggatattttcaagagctgcgacggctttcagaccacgaaatctgacgtgtaaccttgttaagttctggagtgaacttaaaatgatttgctggtgccccgttttagtctctgctccatttcaaactttaccatggccagttgtgacatctactgttgctcctccgaagcttgtacgtccaaaaacagatatgtggcttgtatctgcatccatgagaatactggatggtgaatgttcttctacagctcttgcatataacttggggtggttatcacatccaggaggaagtgcaattgcagctcagttgcttgaacttggaaagaacaatgaaattcttattgatcaggttcttcggcaggaactagctttggcaatgccaaagatatactcaattcttgcaagattactaggttcagatgagatggacattgttaaggctgtacttgaaggtagtcgctggatctgggtaggtgatggatttgcaactttgagtgaggttgttctcgatgggcctcttcaacttgttccctacattcgagtcatacctaccgacttagctgtttttaggggactatttgtggagcttggtgttcgagaatttttaactccatctgattatgctgatgttttatgtagaatagctgtaaggaaaggtacttcacctcttgatcctcaagaaatcagggcagctgtgctgattgcgcagcagttggctgaagcgcaatttcttgacaaagtaacaatctatttacctgatgtttctggtcgactcttcccttcaagtgacttggtctataatgatgcgccatggttgactgcatcagacaatcttaacagctcgtttagtgcagagtctacaatgctattgaatgcgaaaagaacaatgcaaaagtttgtccacggtaacatatctaatgaggtagcggagaagcttggtgttcgctctcttcgtagagtcttgctggcggaaagtgctgattcaatgaattttagtttatccggggctgctgaggcctttggacagcatgaggcgttgaccaccagacttaaacacatactagaaatgtatgctgatgggcctgggattctttttgagctggttcaaaatgcggaagatgcaggagcttctgaggtgacattccttttggataagactcattatgggacgtcttcactcctatctcctgaaatggcagattggcaaggccctgctctgtattgtttcaacaactcggtttttactcaacaagatatgtatgcaatctcacgcattggtcaagcaagcaaacttgaaaaaccttttgcaataggaagatttgggctgggatttaactgtgtttatcatttcacagacatccccgggtttgtttctggagaaaacattgttatgtttgatcctcatgccaatcatttgcctggtatttctccaactcacccagggttgcggattaaatttgctggaagatatatattggaccagtttcctgatcaatttgcaccattcttgcattttggttgtgacttggagcatacatttcctggtacactctttcgatttcctcttagaaacgccagtgttgctcctagaagccacataaagaaagaaacatatgctcctgaagatgtgttatccctcttcacttccttttctggtgtagtttcagaagctttaatttttctgcggaatgtgaaaacagtatcgatttttactaaggaaggggctggtcatgaaatgcagttactgcatcgtgtttgcaaagatcacaatgttggacaagatactgaaccaaagccatctagtcaagtgtttagtcttcttgacgaaaatatttttgctggaatgaataaagatcagttgctaaaaaaactaagcaacactgtagttaaagatctgccatataaatgccagaagattgtggtgaccgagcaagattcatctggctgtattttacatggatggataacaggagaatgtctgaatgccggggtaagtaaaaagaacttgaaccttccagaaatgtcccataagttaataccatgggctagtgttgccgtgcatataaattctgtcaagaatgaaaatgtggaggatctggctgctagcatttctaatatatttgggccatccactatttcaattcagaatagaagaaattttggggggcgtgcattctgctttctgcctctacctataactacaggcctccctgcgcatatcaatgcatattttgagttgtcatccaacaggagggatctttggtttggtaacgacatggcaggggatggaaaagtacgctcggattggaatctttacttgattgaggaagttgtcgtaccagcctatggtcatttgcttgaaaaaattgcatctgaacttggtccatgtgatttgttcttctctgtctggccagtaactctaggaacagaaccttgggcatccttggttcggaagctctacagttttattgcaaataacggtcttcgtgtcttatataccaaagcaagagggggccaatggatttcaactaagcaagcaatttaccctgatttcagctttcctaaggcggatgagctagttgatgtccttgcagacgctggtctccctgtaattaatatctcaaagacagttgcggaaagatttggagaggcttgttcatccttgcatttaatgacaccccaactattaaggactctgttgactcggcgaaaacgtgagtttagggatagaaatggcttggccttggcattagaatactgtcttcttgatttaaaagttccttttctggcggatcttctttacggtctacccctgctacctcttgctgatggttcatttacaacctttaacaagaatggtactgctgagagaatctttttcgctgaagagattgggtatgaacttttgaaggattcacttcctcaccaactcgtggaccgcgaagtgccggaaggagtttatagtaagctattggctgtagctcaaagcggagaatcatgcatatgtctcctctcttgcaatttgcttgagaagcttttttttaagctactgccagcagattggcatctctcagaaaagatactttggacacctggccaacgaggacatccgacagtagaatggataagggtactgtggagctatcttaagttatcttgtgatgacctctcagtattttctaagtggcccatattacccgttgaagatggctgtctcatgcaacttattttaaattcaaatgttattcgagatgatggctggagcgagaacatgtcttcattattactgaaatgtggatgccggttcttaaatcgtgagcttccagtagagcaccctcagttggaaacatttgttcagccaccaacagcaacaggcatattgaatgcacttcttgcgatttctggtgggcacgaaaacataaaagggattttccttaatgtttcagaaggagaattgcatgagcttcggaattttattcttcagtcaaagtggttctctggtggacatatgaatgaggtccactttgaaaccatcaaacacctccccatatttgagtcatacagaagtagaaaacttgttagtttgaactgtccagttaagtggctcaaacctgatggcatcagggaggatctgttggatgatgattttgtacgcttggactcagagagggagagaactatcttcaaaagatacttacaaataaaagagccctcaaaaatggaattctacaaagcttgtgtacttaatcgcatgtcggagttcctttcgcagcaagaagctctgttggccattttgcatgatctaaatgatctggtcgtcgctgatgtttcgcttcagtgtgcaatatctacaaccccttttgttcttgcagcgaatggattatggcaacaaccttccaggtttgtctatcttattaccattttcctattctgatacgttaaatatgttaaatcaaagactaagctacagctgcaacttgatattagctatttttgtttgcatttacacgcttaatacagcaacctgatattagctatctttgttggcatttacacactttatagagaacctgtatatctctatagttgtcttcatatttttgtcctattttcaggctttatgatcctcgtgttcctgcgctacaggagcttcttcacaaagaagtctactttccttctgagaaattctcagattctaagatcctggatgctttggttggtcttggacttagaacaactctggattgttctacctatctggatgctgctagaagtgtgtcaatgttacatgacttgggagatttagaagcatcgagatatggaagaagattattattccatatcaaaactctttctatcaaactatcatccaagacaggtgaagcgaaccatgatgagtcccaaaatataatgtccattacaagcgaagactcgtttgatggagaaacctatcctgaatatgaaacggagactagctatcttgggagcttgctcactcaacaatcagaggatgagttttggtgtcagctgaggtctatcccatggtgtcctatttgtcttgatccaccaatagaaggaattccatggcttgaatctagtaacttggtagcatctccagatagagtaaggcccaagtctcagatgtttttggtgtctgccacaatgcacttactggatggcgagtgccagtcatcgtatctacatcagaaacttgggtggatggactgtttaactattgatatcctgtgcagacaactaatcgagatatcaaaatcttataaagaacagaagtctcgttcctcagtaaatcctgaatttgagagcatgttacaaagccaaattcctctactttataccagactgcaagaactttctagggaaaatgactttcttgcccttaaatcagcactaagtggtgttccttgggtgtggcttggtgatgattttgtctctgctgatgttctttcttttgattctccggtgaagtttaccccttatctatatgttgtcccttcagaattatcagactttaaagaattgcttctagaattgggtgtgagacttagttttgatgcagcagattatatgaacactctgcagcatttgcagaatgatataaaaggatcacagttaacagatgagcagataaattttgtcctttgtgttcttgaagccgttgcagactgtttttccgaggtgtcatcagatagtgataacaattcagtgctagttcccgattctgcaggatttttggtcccgttagaggatcttgtttataatgatgcaccatgggtagacagcagttctctctctgggaaaaggtttgtacatcctagcatcaacagtgacatggctaatagattggggatacagtctcttcgttgtatctccttagtggataatgatattacccaggatcttccttgtatggatttcacaaagttgaaggagcttctatcactatatgccagcaaagatttcttgttgttcgatcttcttgagttagctgattgctgcaaggttaaaaagctgcatatcatctttgacaagagggagcaccctcgcaagaccttgctgcagcataatttaggtagtcaatgttttgagcttattactagcctttcaattgactctattatattctttaaatattttgttatttttggtttttacctaagctttctctttaaaattttggagaatggcggagatatctaaggtggattaaattttcactaccagaaaagatattttgagcttctactggatactggcttctttgttgcttagttttgaatatgtgctgagtgttttgatttgtagatttgtagggatgtataccttgatcctcttattaacgtactcttctttttcaggtgaatttcaaggaccagctatagttgccattttagaaggggttacattgaccagagaggagatttgtagtcttcagcttctttcacagtggagaattaagggtgaaactctcaactatgggttgggccttcttagctgttacttcatgtgtgatcttctgtctattgtttctggtggctacttttacatgttcgatccccaaggagcgaccctttctgcatccacgactcaggctcctgctggaaagatgttctccttgataggtatgaacttctggtattgctttcctacctgtcttccccatgctaaaactgtatgatattcagttgactcatatttattcagtaactggtcctgatgggaataaacaacctcgtaaactgattttttttggttcattggtcatatcagggagaatcatattttagctttatttacatttttcttaccgttatgtaactcaacaaatattactattcagttgacgtgtttcttctataagtttaccttctaatatttcctactgttcctttaggtacaaatttggttgagcgattcagtgatcaattcaatcccatgctaattggtcaagataaggcatggtcattgacagattccaccattatccggatgcctttatcaactgaaatcttgaaagatggatttgaggcggggttagatagagtgaagcaaatatctgaccaatttctggagaatgcctcgagaatccttattttcttgaagtcagtttcacaggtattataatctatatctacactactgtggacgtcattgaattcttttttatggcagtaaaactcgtttaaattcagaactgtaatacataatacaacttagaaactgaaaaaatctgggcttgaacacagtgtatcatactgttggtaaactgttaagtatagatttatttaactaattagattgttctgaggccgttttcattgattggatattttgctaggtattttgttttaatttgcagaagcactaaaatgtgtttggcatttttccatctgttggcacagaagcatatagattttgatattttggattattgtaagttgaagttcaaatttgatgaatgagtgaggtttgacttttgtccttgattgtatggaactctatacatatgtcatagtaaatcacctctgtatgttctaaaatgattcatgttttatcatgttgtgttttgttttaataacttgatgtctattctatgaatcaaacccaaaaacgtggaaaatattatttgtcaatttcaggtttcattttccacatgggagcaaggaaatgcacaaccacatcaagattacacgctgcatattgattcagcatcagctatcatgagaaatcccttcgcggagaaaaacttgaaaacgtctaaactttcgaggatttttggtagctcaaactctggtgttaaatcacgaataatagaggttaacctacatataggggaaaacaaacttctagatcgatggcttgtagttctcagcaagggctctggacaatcacaaaacatggctcgtggcaggtacaaagttacttactatttacttaacataaaagatcctggcagtaacctatatgctttgatgttcatatcacctcgaaagccatgtcagagaataaagcgataccaatagtttctttcagatttttaatctatcttttaaatttaagatgttaccaattctgatcaaaaccaggggcagaaaatacattcagttttgtgcaagtatgtcacttttcatacttgataactaaagaattggcatgtcactgttcatacgagtaaacagaaactaaattattttgttttattgatgaagataaaagaatttcatttactcaaacctagtagatgtgatgagtgtcctagaggtcctcatgtctctattttgttgttgaaatattactttgcaggaagtatctagcgtacaatttgacacctgttgctggagttgctgcacatgtatctcgaaatggacgtcctgttgatgttcatgcagccagccccataatgtctcctttacctttgtctggtagtgtgaatctacctgtcaccatccttggatgcttcctcattcggaataattgtggtcgttttcttttcaaaaataaaaatgagagagctatgtcagagccacagcttgatgctggagatatattgattgatgcatggaacaaagagttaatgtcatgtgtacgtgattcttacattgaaatagtggtggagatggaaaggctaagtcgagaacattcaagctcttcaactgagtcaagtacagcacgtcagctggccctttctcttaaagcctacggtcatcagttgtattccttctggccacgatctaatcaacatgacgatgctatagaagcagaagtgctcaaaccagagtgggaatgcttggttgagcaagttataaggccattttacgctcgtgtcgctgaccttcctctgtggcagctttactcaggaagtttggtcaaggctgaagagggtatgtttctgacacagcccggtagtgaggttgctgttaatttgcttcctcttacagtttgcagctttgtgaaggagcattaccctgtgttttccgtgccctgggaattgttggctgaagtccaggcagtagggattccagttcgagaagtcaaaccaaagatggttcgcgttcttcttaggaagtcatctgcatctatcgatcttcgatctgttgatacttttattgatgttcttgaatattgtctatcagatattcaatttattgaagcacttaaccccgaagaggctaacatggatgaaggaaacagtacttctacttcatcgtcgatgtctacgcaagctcaggctggctctagtgatgcatttgaaatgatgacaagcctgggaaaggctttgtttgattttggtagagttgttgttgaagatattggtcgtactggagattcgattggtcaaagaattagtaataatagatatagtaatgctgacccgaggtttctatctgcagttaatgaacttaaaggattaccatgcccgactgcaacaaatcatttagcacgcttgggtatttctgagctatggttgggcaacaaggagcaacaggcactgatgttgcctgtgtctgcacgatttatccatccaaaagtgtttgagagatcgagcttggctgatatatttttgaagtcttctgttcaagcatttttgaagttgaggagctggtctcttcctttactggctagtaatatgaaatatctttttcatgaccactgggttagttatatctcagaatcaaattctgtgccatggttttcatgggagagtacatcaagttctagtgatgatagtggtccctcgcctgaatggatacagctattttggaagaattttaatggatcagcagatgagctctccctcttttcggactggcctcttattcctgccttccttggcagaccaattttatgccgtgtaagggagagacacttaatcttttttccaccaccagctttgcagccagtttctagaagtggtactgatatgcatcagacagacagtgatatatctacaacatcagtaagtggcggtcccttatctgagttaacacagcgctatgtttcaggattcgatctagcacaaagcaagcatccttggctgattttactgctgaaccagtgcaatataccagtttgtgatactgcatatattgattgtgctgagagatgcaagtgtctgccttcaccaagcgtgtcacttggccaagctattgcctccaagcttgctgaaggcaaacgagctggctacattgctgatattgcttccttcccaacatttggccgtgatgagctgttcacccttttggctaatgatttctcttctagtggttcaagttatcaagcatatgaactagaagtactaagttcacttcctatatttaagactgtcactgggtcttatacgcatttgcaaaggcacggtttgtgtataatctctggagattccttccttaaaccatatgatgaatgttgcttttgctatttaccagattcagttgaatgtcactttctccaagcccttggggtcactgtgttacataatcatcagactttagtaaggtttgggttagctgagtttgaaagtagatctcaatctgaacgagaagacatactaatttatgtatatggaaactggctggatttagaggttgattctgatgtgattgaagctcttagagaggcgaaatttgtcagaaattctgatgaattttcctctgagctatctaaatcgaaggacttgtttgatccttctgatacattactagtgtctgtcttttttggtgaaagaaaacgatttcctggagaaagattttcatcagaaggctggcttcgcattctacggaaagctggccttcgaactgcagcagaagccgatgtcatacttgaatgtgccaaaagggtggaatttctgggtaacgagcgtaatagatcttccgaagaagatgattttgaaacggatcttgtacattctgagaaggatatttctgttgagttatcaacattagcaggatctgtaattgaagcaatacttttaaactttgctggtttttacagcactgcattctgcaacactcttggtcagattgcttgtgtacctgctgaatcagggttcccaagtcttggtgggagaaaaggtggcaaaagagtccttacacgttacagcgaagctgttcttttacgagactggccccttgcttggagctctgtccctattctttcaactcagagattcattccacctggattttcgtggacagcattacgcctaaaaagtcctccaattttctcgactgttcttaaacacttacaggtaagatcactcttcttctctctttgattatttgtgcgctcttgtcatggacatgtgaagaaagaggactgatcatataaacccaggtaattggacggaatggtggtgaagacactcttgctcactggcccaatgatccaaatgtgatgaccattgatgttacttcttgtgaagttttgaagtacctggaaattgtttgggactccctcactacttcaggtatgtatactacttaacactcaatttaaattactcaatagaaaagtgtaatcgacattctagcttttgcagctgtaaattccttatctggcagacgatctaaattttaatcacaaaatatctggaacgaacaaagaacctttgaagttttaaccaatatgtggtgtgaacaaatgcagtagtaatagtaaaaaattagttctccattgtttgtggtccagccttgcaagccgcaataatggattgctctggacaacaacaatgtatttcatcgtgaaataccagaattaggaaaaattgtatttatgttttctgatacatagaaacatttagatatttatgataatatgactgcagtatgagttttctattattattttgaaatctctgatggtatattttacccggctttgtaatttctatcgtccagatattttggagttgcaaaaggtagcctttttaccagctgcaaatgggacacgcttggtgggagcaagctccctttttgttcgcctaccaatcaacctatcaccttttgcatttgaacttcctagtctctatctaccgtttctgaatatccttaaagatttgggacttaacgatgtgctttcagttgctgctgcaaaggatatcctctccaaattacaaaaactatgtggttatcggcgtttgaacccgaatgagcttcgcgctgtgatggaaattcttcattttctttgcgatgaaataaatacgacaaagccacctgaaataaatactatcaaatcagatgtgattgtcccagacgatggctgcaggcttgttcatgcactatcttgtgtgtatgttgattcctttgggtcacgctatgtgagatacatagacactgcaaggttaagacttgttcatccgcttcttccggagaggatctgtctagatttgggtgtgagaaagctttctgatgttgtcattgaggtatgcatggcatcagtttcttctgatcatgtctttctttttgttatatttgttatgtgtgaaacaatctcaaaatcattgcttctttacctaggaacttgaaaacgctgaacatattgaaaccttagacaacatagggtcaatatcactcaaggctgtcagaaggaagttgcagagcgagacgtttcaagctgctttatggacggtgagccgtcaggccaccaccgtggatgacttatcttttgaggttatgcaacattctctacaatctgcggcagagaaaattggttttgtcagaaatatatatactcgatttcttctcctgccaaattccgtagacgttaccttcgtggctaaggaatccatgattcctgaatgggagaatgaatcgcatcatcgaacaatgtattttatcaatcgtcacagaacgtctatcctagtttctgaaccgccgggatacatttctttcctggatgtcatggcaacagtggtgagcgaggttttaggctttccaacttccctgcctataggatcattattttcatgtcctgaaggatctgaaactgaaattaccgcttacctgagactatgctcttattctcttactaacaccggcacagctgatagttctgttggccaagagataatgccacaagatgctgtacaagtacagcttcaccctctgagaccattctacaaaggggagatcgttgcttggaaaatcaaacaaggagacaagctaagatatggaagagtcccagaagatgttagaccttctgctggccaagccctttacagattaaaggttgaaatgacacctggagagactggtttattactttcatctcaggttttctccttccgaggcacttcaatcgaaaatgaaggtccctcgactttgccggaggtgctccccgcagtatctgataaaaaatctcaagaaatttcagaaagttccagaactaacaaaacaagttctagccaggtttgttacatttctcgtgaatcgttggatttaatcacgccccaatatttgtattatctataatctatgtgattctaagagacaaatgcatactgttcttccccaaaatgttttatcatcttgagatagttttgatcttgaatcgtgctctggggaagattgattggatttgttctttgtcacctgcagcctgtgaatgaaatgcagcttggtcgagtcacagcgaaagaattggttgaggcagtgcacgagatgctctctgcagcgggaatcaacatggaactggagaatcaatctctactacaaagaacattaacacttcaagaagaactcaaagactctaaagtcgcattcttacttgagcaggttcgatatacaattaaatcctccttacttaaaacacaaccatgatcataatgttgattagcaaaacatgtatgtctggttttcttgcaggagagagcagaggcttccatgaaggaagcagagacggcgaaatcacaatggctgtgtcagatatgtcagacgaaggaggtggaagttactattgtaccatgcggacatgtcttgtgtcggcattgttcaacatcagtctctagatgtcccttttgtcgtcttcaagtcaatagaaccatccgaatcttccgaccgtaactaacaccaaaagtcaaatattaattacccaattcatcaaaggttttgtcctctatacattacaacagtttctgctaattcatttgtaaatacgtttaggtgttttcacttttgtatatttaagtaaagaaattttttattttaagccgctatcaatctatcatcattttaagcattgagtagactgggtattcaccctatcaaatatcaatatctcaaatcaaatttgaaatgagccaaactaggcaaaatcttcagagaccatcacaatatcagctaacgagtacaaaccaaaaaagctttggcttatcaagttttttctgacacttttctttttctagatgacatcaattgtttcttgttgtttatctacttcttctttgaatttttcttcttaacaaccaacatttgagcttccactgtttcttctgcatcgttcattaggttattatcatcaacattcaattcattttggaaatgattcaaaaagttgtatgtctccgaaatataggtatcgctaaggattctttcttcacctagggacaagactctcaccctagacaaaccaggggagtctaaagcttggtggatttgaagctccagacaccatccatagctatttttggtttgtctacatcaatgcttgtaggaataatttttttttccggagaagctgatcaccgttgtgatagagagacttgccaatcatatgtaagcatatggtctcatcaatatcataaattaataaatttataaatttatcagaatatattatgtatatgtaagaaaagttagtgaaatatgattctagtattgtttgtttttcttaaataatattaagttttgatcaaatattcatttttaatatgtttactgtataaaaaaaagttgtgctttttttaaaaaaagagaatatgttcttttacttgtatttgtatctaaaaagatgttggttatgacaaataaaacttcttttcatataggaaagttaaaaaaaattacaaattaaccaaatctctctataaattaataattcaacaaattaatatctctataaattaataaaatttcacgttcccgacattattaatttatagaagttttactgtattcctttgtgaatttccttttcataatttaaaactaagttggcaaccttttcatatcataaataagtaaattatttcaaactatttttctggatttttaatctgttcattggagtcatatcaagtcttgcttcgtatgatttgttcttcctactcataagagctttgtagacatacttagatttactagactatgaattgtgcaaattttgtaatgattaattttaatcatcttattactttctcgattcaagatgaattacggacaaagatgaatgtctgaacctttagcgttcaatcttttatttcttatcttttcttagtgatgcatataatgctaaaagaaaaagatgttagcaaaggagagacttttggattatgtatgataatggaaaaaatgtcacatggattcatcacagtgaaaatgatgaagatgaaagtatgactcaaaaggattgagtagttaaaaatttgagaatgaccagggagaaaggaagaaaatcaaggaggaaaatattttagtaaatttagatgattacatttgagtttttttttttttgtcacaagtgtgttttattgatattatagagccaaaagtaacaggccaataattcacaaagactaaaataaacaagcccaaagaaaaaaaaaaaaaacagcccaaaagcccaaatgaataaaccctaaactgaaggaagagaacaaatgattgttgtgcgccgcatagaaaacacgtgtcagtgggaaacattttgaaggacacataggaactggaagagaagggagtcgccgtcagaagcttcaattccggccgaaacaccggaaaacttgtttaattggcatagctcactcgtcgctcaaaagattaatggcgaaatttcagttgtagcttggacgagaatttgactccacgaagtgcaaatcttcttcttcttctttttctttttcttcctcttcttcttcaatcaacatctttttaactcttagggttcatcaatctttgaactacaagcagaagataaaaaaaaaacaaatcaaatctaaatccggtcaaaaaaccggagaaaaaaccggctaaagacgccggagaaaagcccgacgaaacaagaaagagggtatcttgctctcgggagataagccagccaccaccgctaaaagtagccggtcgatgccggaagctgagccagccaacgcttctaaggaagccagcgatgccggagtagaagccgaccaaacactgctgataaagccagtcattgctggccaaaaaagctgaaactctctgaaagatgaggagagagaagagagagaaaaccctatcaacgtgaaaataattacatttgagtttatatactcaaaacttggaagtaaaggtaaattaaaatatgattgttagaaacaattacaccaataataaaacgacacgtgtacactacgtagacgttagataaccacagcaaaaggatatgtattctcgaggcgggagagagaaagagaagagagtgagagagatcgaagaacatttacacacatcaatggcgtctctgcaactctgcgacggttatcttctcttcaagccctctgtttctcctcgattcctctctcaacgcatttctcatcgcctaatccctaaagcctcatcttctcctcctccatctccatcaccatcatcgtcctcttcatccttatctttcagtcggcgggagcttctgtaccaatcggcagctgtatcactctcgctttcttccattgttggaccagcgagagctgatgaacagttatccgaatgggaaagagtgtttctcccaatcgatcccggtgttgttcttctcgacattgctttcgtccccgacgaacctagccgaggtaattactccttcttcttcttctttaattttccgttcttaagttcgaaattgttttacttactgattcttgcttgaaatgtcaattagggtttttacttggaacgagacagactttgttagagactaaagatggtggaagcacttggaatccacgttcgattccttcagctgaagaagaagatttcaattatagattcaattcgattagctttaaaggcaaagaaggatggattattggcaaacctgcgattttattgtacactgctgatgctggagagaattgggataggattcctctaagttctcagcttcctggagatatggtattatatcttgtttcttctggtgttttcagagatttctattgttgttgtttttgtttatgagaatgtgtttgttacaaatgttgttgtaggtgtttataaaagcgacagaagataagagtgcagagatggttactgatgaaggtgctatttatgttacttcaaacaggggatataactggaaagctgctattcaggaaactgtttcagctaccttgaacaggttcgttaccctctctttggtttatactagggaattggcattgtcttttccatccagattcaatagagatcaaagagtagaccttaattcagtatttcctatggtcttgcagaacagtatccagtggaatcagtggtgctagttactacacgggaactttcagtgctgttaatcgttcacctgatggaagatatgtcgctgtttcgagccgtggtaacttctttctgacatgggagcctgggcaggtgagactcaattaaggctatgaagaaatacatttatacttgtggtttgcttttgaactcttagtcctttttatgacatagctaggtgaagttttagcacttgcttaggctcagtcttattgctgattttgattttgattaaaaagtactttgtctaagtaaacggtattatgtgtcttacaagggactaccaatccctctctttgttcttgtgtgtggtttgcgtgctctttagactgtcattcaccatagtattggtatattgcagccttactggcaaccacacaatagagctgttgctagaagaattcagaacatgggatggagagctgatggtggtctttggcttcttgttcgtggtggaggactttatcttagcaaaggtactggggtaagtacagcagcaagactctcctcacttcttgcagttttattctctgaaaatttccttttcttctcgttttggtatttacttgcgagtttctgggttcttttgccacttagaggatgaaaccaaatctagccatgaactaagaaacacaattttcttttgttatctgctattccctggactaataacaaggaaaataaaataaaaaaactgtttccttgtgatttaaattctcttccaatgtttcaacttccaactgcatctgattttgatctcctctgttataattgctcagattacagaggagtttgaagaagttccagtacaaagccgtggctttggcattctagatgttggatatcgctcagaggtaaatgagtttccacgatgatcactcaaaactctgaatctgctccgatctttacaccatttttttttttttttgggtattgcaggaagaagcatgggcagcaggaggcagtggcatactactgagaacaagaaatggaggcaaatcatggaaccgtgacaaagctgctgataatatcgcagctaacctatacgcagtcaagtaagtctctaactcaaacatcaaaacacactccttcaataccatcattgggaaccatcattgttcccacccatctcatctcatctcaaatctcaaatactttagcataaacgaacaaactaatcagttctcaattcctgtctgttttttgttgcagatttgtggatgacaagaaaggatttgtgcttggcaacgatggagtcttgctccgatatgttggctgaagaatttaaaaataaaaaagaggttaaattgaaatggttatgtttcaatccttctctgtaaagcctttaactgcgttttaatactacattacactattgtatacattcccttcacaaaatatatataattttgtgtttcttctgaaaagctttgtttctcactgttagttggagttggatttgatctcatctatgtatgtttataacctattttcagccaagaaatttcattgtgtaggcaaccaagaaagatgacaagaaatcttcgccagagattttattactcactttattgtcaattcataagagaaacatatattgataaatccgtttgtggattagaccgctttttatttactatttaaaaattgtcaattactacatataaataaatttggtatgcggtgggttgttgtccgtggaacggtgactgaaccgaacaatgcggtgcggttcaaatagtaacgaatgtttttgcatatatatgtttttgttattatttgaactgcactgcactttatccgcagttgaacctaattgaacctaatgaaacttaaactggtttagtttgctaatattatttttattttatttttgaataacttttttttcttttcttttttgtcatctgatcatttttcttttttgctttcgttatggataagctgtaacgcggtttttgttttgaacattaataataattaattctattcttcgaaaaaagaaaaatatataatagtgtgtcgttttccggtggcgacgagagggagaaccggagaagagatctctcgttcgtttttttcccggtaaatccggcgagaaaaagttcacattgaatctacgagaaaatttccttccatttcactccacgagttttcacctctcttgttcaatctctcaacgtctctccctcgtttctcgttttcgctttttccccttttcctcttctattttaccggaatccgagaatttttgatcagatctagtttcagaaataggttagttccaacaatgttgacggaacgaggaaggcgaatttctggtttcaatgggagtttcgaatttagcaatagaaaattccgtggttatggattcgtagatcgatctcaaggtttccatgaaaggagtccttcaagatcatgttctgtttcgaaaatccttcgtatcacgccaccaacctcgtctccaccgtcttcggcttctacatgcgctggttatatcgaacaccgggtctccaagttcgatactctcgccggcattgccattaagtatggcgttgaggtatgtattataatatatgagtgtatatgctttggatgctggattagttttttttccttgtgttcttagaaagtgctatttcaggttgcagatatcacgaagctgaatgggcttgtaactgatcttcagatgtttgctcttgagtctctccgaataccattacctggaagacatcctccttccccatgcttatctaatggctctctaaatcatgggtacttttaagcctctttatcctctcttcttagatgacaaggctgtagtctgttactttgatttttatcttcagtgatggatttattcatatgttacttgagttgtgctactgtgcatttcccaagttcattcaaagaaacatagaccaggttatagaaagaagtttacataagatggaaaatgcttagtgagagttgtttatgctggaaaatgcttaagggagacatgatagaaaaccaagtgggtacaacaggtccttgtaaaagagcagttttgacgtttcaaattctggtttcctgcacagccaaaactcgaaagtttctatgcgcaatagtttgtgcctaatgggctatgaaccttaagtttcttggttagtgcatacaacctacgtcctagaatttttttcacattgatataagaatgaggacgtaggtaaggggacgagtaaagatgtcgagaattgagacagttaagtagagccttgaatgatcatgatggtagtatactgatttgcattaaagggcatccacatatcaaagtgatcctatccccatgactgacatatgaaatctttttgcagagaggattggtccgagcaagcttcatcctcagctagcaatggcaaccaccaggacgtatttgactccttccagtctttgaggttgaaccattcagaaaagaagatttctccagccatgaactccttgcaaggttattatggactgaaaccaaaaaacagaagagcttctgaaggttttgggatggcagtctacaagaacgaagcttctcaactccaagacaatgatcagtatctcactcccttccccgccaccagtactcccttatcccaccacagaaaatcaagaagcttggtagatgcagttatcgccgaggttaaccaatcacccaacccttcaaaagcaggaggaggagaagtgaactctactgataagccaatgagaagacgccaaaaatctgaagccgattttagttcacgagctccagaattgctgttgaaggaagagaacagaagcagcagtggcgcgttttctgcaatagctggaaaaaatttagcactgagatccaaagcatcaagcagagctaacttatcagcagaaaccagacatctcaattccataccaatcaatttgatggatgctcctgtgggagacagcttctcaagcgtgaggaaatctgttagcgcatctagtctacaagaaccaaactgtaacagcaacggttcatcgctatggccaacctcaaagtggaccctgaaacctgagttactcacacaagtagccatggctagttctatttttgacggattgcctaagccattaactggtcggagaaacaaaaaggctgtggactaaggttagttaggtacttaggttccgtcggtctcgttatcgactgtccacttttggtttttgtaatccaaaagcaagaagtcaatggcttttataatagattgaggagtaaatagaaagtaaaaagtgtattgctgcatttcattcattcaaaacaataaggcaaaataggttgtgacattgagagtcaaaattaggcattaaggttttgttgaatttaatttgtacgttagatgaataatcgaatatcagaatactgtattcaaagtttcaaagtatttattggttaagtagtttgcaaaataatcaaaaaatacaaaaaacaaaattttgttgtctaactaattttccactccaataaacaattaaaaaaagaataaaaaagagagtaactctttaataaatctgaaatccctaagctcaagacgagttttcatttctcgagcaatttcactcttccgagaacaaccctagattccgatgatgaggggtctcgtttccggcgccaagatgctatcatcaaccccatcgtcgatggcgacaagcatcgccactggtagaagaagctacagtctgattccgatggttattgagcactcatcgcgaggagagagagcttacgacatcttctctcgtttgctcaaggagcgtattatctgcatcaacggtcccattaatgacgacacatctcacgtcgtcgtcgctcagcttctttacctcgagtctgagaatccttcgaagccgatccatatgtatctcaattcccctggcggccatgtcaccgccggtacgcttccgctttccattttctatctttagcttcgtcaaaattcgtactagtgtgattcggaatcagatcgctatatgccactgctttgtcaattacttgatatagttgaaactttgatactgttcgttgatacttgttcttctgtggatttgtaacttgattcctgctactagttttaatgtccacagtctcaagagtgtctggtttgtgacgagttaacactttctgagtctcaaattgtttgttgtgagtctgtgacgcatctttaatctttgtctttgatacaggtcttgcaatttatgatactatgcagtacattcgttctcctattagcacaatttgtttgggtcaggctgcatcaatggcttctcttctgttggcagcgggtgccaaggggcaaaggcggtcacttccaaatgcaactgttatgattcatcagccttcaggaggatatagtggacaggctaaagatataacgattcatacaaaacagattgttcgtgtgtgggatgcgttaaatgaattgtatgtcaaacacacgggtcaacctcttgacgtggttgcgaataacatggatagggatcatttcatgactcctgaagaggctaaggcgtttggaataatcgatgaagtgattgatgaaagaccgttggagttggtgaaagatgcagttggaaatgaaagcaaagataagagttcaagttaggaagtaactggtaatcaaagtaataaattttcttcttttcctcttaccagttttgctttgatcctgttagattacttttttctatggatgaagttatgctctgagggcatgatctctcaaactgtttttattcattcataaatcaatcatgactatatttctgaaatcttttcctcgcatgtttagtgtttacagtctcatatctgattcagtaaaatgaatattggattaacgcttggctttgggtcttaattttatgtgcagtttgatgcattgcaaatctttgatttatgcatcattttatactaactagaaagtctaaaatgatgagattattgtctagtttcagaaaccccagttctagttggttagtttatgttagaagatggggtttgctgtttccttatgctcttgatcgatgttcttcggtttcatgtttttgcttacctcatcaagtcaaagccacatctattctgatttgcctctttttatatagaagaagttagaacacatcatattcttgtgttaacactggtctttgattatgctctttgaattagggacagaatcttaagatctttatgaaaattcttgtacggtgttgtcttgtcgtgttgagctgagccttcaattgctagtgtttgcttctgttactctgaattatatttggacaatctcactctaataaaagttttttaaatactagcagaattgttaatttatcctatggtttacatgtttatatgattttgttggttctataatgtgtaaaaatggaaaacatgatttttttttccttttttttaaaagtataaatggaaacgtgtaggaaagtgtaaacaagaaaagaggacataaatgacccaatgacttaataatatatttggttgagacttaggagtagtgagattaaactacaaaataaggtaaattggaaaataaggaaaaacctttttcgatttcgatctctccttggtgaaaaaggaaattgaaaggggaaaaaacgccgacaacagtaaaccaaacttctcacaaaaactccttggaaagttttcaccttctttcagccctaaccccatcgtctctctctcgcgaccgcctcatctctctctgtctggatcaatctcgctctctctttctctcggctacgtcgctgtttctcgtttcgtgatccgtagctgtctccgctactaccttaatcagcgagcttcttccggtggaataatcttcggataggaggaatcggagaattcttctaattgggtgtctgggttggattggaatacgtaattctgttgggtgttccaatttcgcgttcaaaattagggtttatagaggtctcgcctatggctcctgggcgtaaaagaggagcgagcaaggccaaagccaaagggcagttggttctcggtgatctggttctcgccaaagtcaaaggcttccctgcttggcctgccaaggtgcgttatcattatgattcctctattgggttttaatttttcttacacagattcttgttttttttgcttcttctctaattgaattctcatatagtccttaagtccatagtcatcatctttaacttgttgggtcttctgtttttatcgttacgaattctagaatacacattaacttcgtcgaattgagctctagtgtgttctgtttctttttgttgagatactaggcttcatgattaagttggtttgaaagtcagttaactcatctatctagttactcggtcagattccatggttgaattatgaaacacacatgttattcatctcgataaataatgagcttccgaatctctctaatacaattctctttagttagtctctcttgtgaagtaatttggttttgagtttcagatcagccggcctgaagattgggatcgtgcgccagacccaaagaagtactttgttcagttctttggaacagaggaaatgtaagctattctcttttattctttgattctggtaccttctcatccagaaaggtatatgaactttagtcagtatatcatgttgctaggaattaagtagtagacctcggttatcaggtgtttcaacatgttaccaagtgtttttctttttggctgacaatatctttggagttgattttgtcttttacaaactgatcattgacaaagttatcttcctttactgcagagcttttgttgcgccacctgatatccaagccttcactagtgaggcaaagagcaaactattagcaagatgtcaaggtaaaactgtcaagtactttgcacaagctgtagagcaaatctgcactgcatttgaagggttgcagaatcacaagtcaaatgctttgggcgatgaggattctctggatgctactgaacctggtttgacaaaggctgagatagtggatggaacagatcatattgtcattgagtctgagagaactgataactttaattttagggtggatccttgcttccccaaattagatgagaataatggtgaggagagaaaggctgagataaggaagctagattcatcttcatttctggaatcaaaggtcaaaaccacatcccctgttagcgagtcactggagcatagttcatttgaccctaaaataaagaaagaagattttgataaaggaactgacggtagtgcttgcaatgaacattttggtaatggccaaaagaagctggctaacggtaagagaattaagaaggaagcaggtggctctgatagaaaaggtgaagatacagttcatcgagacaaaagcaataactcacatgtgcctggtggtcgaactgccagtggtaactctgattccaaaaaatcgaaaggtctgttgacagagaaaaccagctccaaagtgtctgctgataagcatgaaaattcacctggcatcaaggttggggtttccggaaagaaaaggaggcttgaaagtgaacaaggtaagcttgcaccaagagtagatgaaagctcacgtgctgctaaaaagccgcgatgtgaaagtgcagacaataaagtaaagtgtgaaattgatgatggatctgattctactgggactgtatcagatattaagcgtgaaattgttttaggattaggtgctcgcggtggaaattttcaatatgataaagaagcagttgcatatacaaagcgccagagacagacaatggagcatgctacctctccttctttttctgggtctcgtgataaatctgggaaaggtcatctggaacagaaagaccgttcctctcctgttcgtaatgttaaggctccagctgcacagtcgctgaaaaaacggagggctgtttgtatctacgacgaagatgatgatgaagatccaaaaaccccattacatggaaaaccagccattgttccccaagcagcatctgttttgactgatggtcctaaaagggctaatgtgtgtcacagtacttctacaaaagctaagatatctgctggatctacagagagtactgaagtaagaaagttccctctgcgtaaacattgtgaggatgcatcacgtgtattaccaagcaatgcggagaattctactaatagcttacctgtggtaaaacccattaatgaattgccgccaaaggatgtcaaacagatcttgcaatctccgaagatgtcccctcagctggttttaactaacaagcacgttgcaggacagcataaagttgtaaaatcatcggtgaaagtttctggtgttgtgatggcaaagaagcctcaaagtgattcttgtaaggaggcggttgcgggatctgacaaaataagctcttctcagtctcagccagcaaatcagagacacaaatcagcttcagttggagagaggctaacagtggtttcaaaagctgcatcacgtttgaatgactctggttcaagagacatgtctgaggacttgtctgctgctatgtatgtcacattctatctgtcatctttttgtgtgtatgtcgcctactgcttataattattcttttcttgcaggcttgacctcaatagagaaaaggggagtgctacatttaccagtgcaaagaccccagattcggctgcatctatgaaggatc

SEQ ID NO: 727 - DNA, 76329 bp, Arabidopsis thaliana
taattgctgctgcgcaggcaaaaagaaaacttgcacatacacaaaattcaatttttgggaatttgaaccctagtttcttgagcatcagtgatacacaggggaggagccatagcccatttatggttcagaatgcttcagcttctgctgccatctcaatgccgttagttgttcaaggtcatcatcaacaaggttcttctccgtcaaatcatgggcatcagtccttatcaagaaatcagattgagactgatgataatgaagagagaagacttagttcagggcataagtcagttggaggttcacttagttgtagcactgaggctgctatttctcgggatgcttttgaaggcatgttagagaccttatcaagaaccagggaaagtattggacgtgcaactcgcctagcaattgattgtgccaagtatgggcttgctagtgaggtaagatggttggttggtttttcattatgttttttcttaaggcttcgacaaacttattgttaggctgcacatatcaaatcaatttagaattgcacttattctggctttacttcttggatgtttagcttgctacgtaaattgctttctcaaaattatttacagcatttggtgcgtaatattgttcagacaatagttgctttaattggaaatttgtttgtgtttttatctaggtggtggaacttctcatacgaaagttggaaagtgaatctcacttccatcgtaaagtggacttgttctttctcgtcgactctatcacccagcattcgcacagccaaaaaggtgagctttcctcttggatagatgcaatacctgttctcaaattttcacttccttccctgaaatgctaataataccgtatttattagcatttcagggaagtaaaaaattcacaagcattgttgtattgttttttactgtatacaaagagaacacctaatatatttattatcattaaagattaaataatttccagtgcttgtgaattttgtaggtattgctggtgcttcttacgttcctactgtgcaagctgctttgccacgtcttttaggtgccgctgctcctccagggactggtgctagtgataaccgtcgtaaatgtctgaaggtatttaaactatttgcttgtttctatgttatccttacagttttgtaggctggagtcagtgacctctttgtttttttaggtcctgaagttgtggcttgaaaggaaagttttccctgaatctcttctgcgtcgttatattgatgatattagagcttctggtgatgatgcaactggtgggttttccctgcgacgtccttctagatctgagcgtgctgtagatgatcctatcagggaaatggaagggatgcttgttgatgagtatggcaggtatgctaaacgattgtcttgcttagtagtgtactctccggattatatatgttgctgatgaaaaaataacaggcaaggtctgttgccattctgtagagggtttattaacttgtttgtcgttttttctgcagcaatgcaacgtttcagctgccagggtttttttcatctcataattttgaagatgatgaagaagatgacgatcttccaacatcacaaaaagaaaaaagcacatctgcgggggaacgtgtcagtgctttagacgacctggaaatacatgatacctcgagtgataaatgccatcgagttttggaggatgtcgatcatgaacttgaaatggaagatgtatcaggccagcggaaagatgtagcaccttcctctttctgtgagaataagacaaaggagcaatcactggatgttatggaacctgttgcagaaaaatcaaccgagttcaatcctcttccagaggattctcctccgctacctcaggaatcacctccccctctccctcctctaccaccttctcccccacctccatcccctcctctcccgccatcatctctgccaccaccgcctcccgcagcgctgttcccacctcttccaccacctccgtctcagcctcctccaccaccactttcacctccaccttcaccgccgcctccacctccaccgccttcacaatcattaacaactcaactctccatagctagccatcatcagataccatttcaaccaggatttcctcccccaacatatcctttatcgcatcaaacatacccaggatctatgcagcaagaccgctctagtattttcaccgtgagttctttgatttgttatgtttcattttactcatgattcctcactatacatatgcatcttttatcatttttgtttaaaccccctggacatcatgtgcagggtgatcaaattgtccaggggcctggaaattcttcacgtggaggtcttgttgagggcgctggaaaacccgaatattttgtgcagcagtcctccagtttttcaccagcaggagtgtgcagctccagggagccttcatcatttacttcctccagacaactagaatttgggaacagcgatgtacttttcaatcctgaagcttcttcacagaaccatcggtttcagccgagcacccctctgtcccaaagacctatggttaggttgccttcagcaccgtccagtcatttttcgtatccaagccatattcaatcacaatctcagcattcctacactcatccttaccctttcccacctcaacgtgatgatgcacggcgatacagaaatgaggaaccatggcggattccttcaagtggacatagtgcagaaaatcagaatggtgcctggatacatggaagaaattcacatccaggccttcctagagtcacagacagtatgtagatgcttaaatcctaatagaccctttacctgttaaggtttattaacttgcatgattgcttgtggagttgtaatcattgtgatacttctgttgactatgattgtctagcttgtatgttaatgccatggcttagttccttgaaattgatggtcttatttgcaattctacaggtttctttcggccacctccagaacgtccaccttcagggacaatgaactatcagccttctgctgctagtaacttacaagctgtccctgcaattccaggtgagactatattagtcaattcgtctgattgtagactctcaaagatacagtcagaaacctttgtgcttaccctaccattttaaattaccaatttaaggtcatactgctccccagatgctaccgtctcggccagatatacctaccgtgaattgttggaggccagcttgaagtgaaggtagaattttgttggcctgctcctgttagtatcaatggaaaagaagctgctagtgtctcattaacaaggttaatcctctaggtttggttttctaaatactaaagtcaagtcttttatcagtgttgtcatcaaacagttacagttatactactttctcttccatggaggcctttttcggatatatccacttccagaggcacaaaaactactgcaggcttttgccaggattctgtatattgtatttttttcctgacaaatgtatctgtggatcatattcttaacagtataggttctttttttattggttagtacttcagttcctgtaattatgccaatcacaatttgctcaaagcttttactggaatgatttgatcttcatagtcaaacatagttttttttttcagtttttgggctctgtaatctttgctggtctctgagaatgattaatgaatacactattaagagtgtccttgactagtggagcagtcgtaggtggcaagaatattcagtgcaagcctgagttttctcccttgttggttcctagactagagacctattgcttagtctgtatcctgttctttcaatgagtaacgtctctttaggtctacatatatgttagctgcaattgtaggtataactactttctccaatgcttatttctttgttctggagataagttatgtctcgctgcctcatatttttagcaggaacaagaagcatccatttctaaaaaattgtgatccagtctgtccattttacaagaatctccatactgatatcttgtgcattgctgatctgaagaaacatgtcgaagacttgtgaggtactggtttctatatgtttgtctgaaaatatatgttctaagctcaaaccatgtgctagtgacataacgaggttttgctttataattatggttagcacttgataaagtgttttctccatttgatctctcagaagaaccattttcttttcgtttcttctttaagtatatattcgaatgttagcagatagaaaataagaggaggaaaagtgagaaaggattcgaattaccttgatattagcttatgatgttcattgcttggcgtataatctgttcaaaataacactattcttaatttgttttgttaaacatgtgtttgcggatgcctcacacgcctgtcttgttcaattggcatgaacatacctgtttaagtggttgtggggcttcgtgaatatgtgttactttttaggctgtgctcgatagctttatttgtagtttttggttttgaagaagctgttgttatcatacatatatcttcaaagtggttttgcctttctgtcatagttgggtttgtggcgttagatacttcttgcttgctctttgacatatatctcttggttttggtaccacagtttgatgctttgatatatggcactttgtcttaaccactagatacggtcaagataaacgagtagcctctctttgtcattggttattttactcagcgtatatagtctcttggtctttttgcttgttctgttaagcacgttcaaaggtggggggaaccagttagacacttaagtctcatcacatgtttcatgatgaacagcatgaggtatgcttaagaacataacagtttgatgttgataaagaagtatcagtgattgagagggaatctgtatttgatgtttaattgtctttaagacacagtcgacttgttttgagggaattaatcaagtcgattgacatattttcgtaagagtactcaccaaagaaattacattatttgcatcagcagaagatcaagtatacgtgtgagggttttgtcagatcagtcttccataatacttacctacttgctctgcattaagtcgcctgttattttgttgtgttatcaaatgcctttggggatatgtttggatgtacttgtatttgtcttgacttcaattgcgagaaaatgtcttcttaaaggtgttgagtgacttacgtcttgcaacaggcctttggtacagagctgaaccatctggaactttggcaattgtcatgctagcaactgtatgcaaatataagagatggatttatacacaaggcggtcctgatcggattttgcaaaaggatgaggtaaaaacttcgcacttgttctgagcctactcgaaatcttccttgtactgtaaagtgaactaacaaagaccataaaaagagaaccttaaatgaacatggattagggagctttgtctcacttggaatggctacaagcaagttttgtggttgtttttcaggtgttgaagttatgagattggtttgggagccgagagttgcaagtcttcagtaaagcctgagatattcgcttaatggtccagtttcttaagttttggaggttagttttgtcatcactgctatggtataagcgtctcaaattaaactcttctgtgatagggaaaataagttaatccaaatcatttagcctctgaaaatatcaaattctatgaatgttgattatatattttagttataccagaaatgtcgttttaccaaattagttatagtattatggcttgtaattaacaaattcgtcaatatatgatcttatcaaaagatttaggactagatcttacataggcgttttttacaataaaaattgttgttgtaaaattaggcattatgatctagtaaaggtttcaaaattagttttggagagtatagtgtaatctttgaccatcagtctagaatataaagattccaagagctacttttggcattttgatacatatcgataaaatataaaaacttggccaaaacaatttacaatgatttctacgaaagtaatcacattcaagtatttaaccgtttatagccaattttgcagagtactacttgagaggaagataatcactgttgcctcggttgacataaagcttttgttactggttaacgacactaattaattgaacaaagaagaaaataacattgattaattagccctaattagactgaaactagatcttcatgattcaacatcacttctagttaataacacaatcctgattcctgactactattagaaacgtggtcaatagattatttgaaagcagggtcaagttttatgaggctccattttttgattaggaacatttaacaacacagtcaaagtttcctacatatgtgtgtacgcggacacatgaatgaatgatagcaatcgtgattagtattttatagttttcatacacatattcgccatgtcaaaagaagagaggaagatacgaccaaacaaaaatcaacaactcatcagaaaattacaccatcaagatttgagaaaataaataaagagaattgaaacgttgtcacatcgaaactctgtgttgccgaacaagaaatccttccaaaacgacttttttcttataagccacagagttcaaatccaaatcaccttgaaacgacccttcttcacctttaccgctaccactgcgtttgcggttgaccaccgcaaccgcagtagcagcttctttgagacgagggaaaatgtagcaccaagtggatgtacaaagtatcgcgcacaaacgtccccacgtcaacattatcatcagcgttagcattatgattgatatcccaattaccgggtcaagtttagagacccgcgaccgttttctaacccttgacgacttctcccttatttccttcggcttggaccccgacccgacgatattagtcgggtcaagttttccgtctgttgatacccgttcgtaaaacttgtcatcgtatcctaagaaactcaacggctccggatttatgtctctttgttcgttcgtgtctttctgataaaaaaaaacgttacaaaaagggaaaatatttgttattgtaaccaaaaaaagtagttcagtaagaaaaattcaataaatacctctttagtttcatgatcaacggtcttataaccacttgtcgcaacattttttcgatcggtcacatgacgtatcacccgaaacagattttgcttatcatcttcaaaagtcaacttttgtttctccgacttgtaaatcgacgtcggtgtgatctcctccttggaacggaattttgttggccgtgaaaaccaacgagttctcgtcttcttcttcgtcttctggatctcttgaccagcgtctactattggtttgtccgagtgaattttccgggaaaccccgaaacatcgaagaaaataagaagatgaagagttaattctctctcggacttttctctccggtttgcccattataagatgaaaagaagtatccaaaaatgtaacattaatttgtgtgaagacttgacattatatatatgactcggaacggttggaattatatcccattttttattaactgaaatacttgtgatagtgttcgcacgctttcggaaatacgataaaaagaataagatgaaaaaaatagtatctactacctccaagttataattacggtcgtgaaaattatcttgatcattgttgatatattttgaatcttttcacaagttgtttgtggtagcacatgaatctccctacccgaccaacaacaagtcggaaggtccaaagctcggggcctcgggcctcggggttcgggtggagacatgcccgacccaaacgatatgtggtaattctatttgtgtttacaagttggataacatgtatttgtgttaatagcctagtacaagttgatcgagattggatgaattaatatgtcgtcaccggtccatgaaaatgatgcgaacgtaattcgaagctagctacggtttaactttccaaaccatactcttttaatcgatctagaagtcaggaaaacaaatcggaagtttgtttctaactttttattgttaacaaaacttgaaacccttgtatcctctctttttgtccattattgattttaatcttgttatatgaaactttttttgtaagaaacaatttaactcaatttgttaagaaatttaaactacagaaaaatattagttaaatatcttcatttacagtatttaacaacaataacatatttaaacaacaatttgcagaaatggctcgtttgaactctaattaataccggttgtcaaaaaaaaaaaattgcaatctgtctctttcttctttactcttcagacatatttgatacgaaaatcttagtgaagaagattcaaccaaaaaaatagaggattttgctggtggccagccaaagtatttcttaagagttatggtcgtgtccacgtttctactttctaagtcaccaagttttctcttgctgtctatttgttttattattatgtttgaaaggttcaaactgaaatttctttgaaacatttgtagacaagttacttactaaaccatgttttcatagactcattgtttcgcggtctttttagtttttcgtatgggccctaaacccacttacatttcattccacaaagaataactttcgtactttaacctacaacaaaaaaaaactttggtttgaatcttttggccataagaaaagaagttgggttattttggtggatgactttcttttgagtgtaaatcaggaaaataacatgtaaatatatgtgtctctgattcacgatacaagagtcatgtaatgctaaagaactaaagcaagaaagttatacaatttgtatttcaaagatttcgttgtgattttcgaggacttataatatgaagaccgtagttttttttctttttgtggaaatcttggcattatggaaaagcacatcaacataaattgctcgaaacaatatagtgttgttttgtgatatactcacacagagtctgaaaaaatgatgttatcattcttttcttttcatttttgtgtgatatatatagtgtcttaactcttaacataatagcatgtgattttctaaaatttcaagttgtgtgatactagcgtcttaccatagacgatagaatagtgcatgcaaggattttatgccggctaaaccctaaacccaaagttcatcattatggatgcacaatattattgttggaatgtatgcaaatcactattactttttattcgtaaataaaaacgtttttgttagtataacaatcaaaattgatttttatcctaacaagtttgaaataaaatattggaaaatcaaaacccactagaccaacaacggttaaatatatcaatcgaccacgactgaattagtaatggattaatggttacattatccgaagggataacaaaattaaatgctacttactacaaacgataaatatatcattctgtttagcgattgttcttctgcttggatttagatggttgttttctttttgtaaccaacccaaccttttaacccgacccgattcgatatttgacccgcaattcataaactctcaccaaacgcggcaagtttgacccggccacgtcagcgtttctctcaaccgttttttccgccgtttcagtttaacaacccgacgcaaaacgctcatccataacggcaaactcttcaacggttccgccaaacacgccactatctccgccgtgatctccccgaaacacggtcgtgattccacgtcagatgaaacgcatctcgccgccatacgcaacaaccgtagactcattccccggaaaacacccgatcctcctcctcctccgccgcatatttctccgatcctcccttccttaatcaacggaaccgcccagtctactatcgacgccggcgaacgagagacgtcaatagcttttctacaactaacaatctccaacaaaacgacaccgtaactataaacatcagtcttcatactcagattctccggtaacgtgtaacacggatctaagtatccaatagttcccgccggagccggtcttatcttcttatcacctccaaaatcaacggcgagtccgaagtcagcaagcttcgcttcccaattcgaatcaaacaaaatattttccgatttgatatcgcggtggatgataccgtgttcatggaggaagtgaaccgcactcgcgatctgaagagcgatttcgatgcgtttaagccacgtgggaagaggatcagttgacacgtgtaataattggtataacgattcgtttggcatgtactcaacgaccatgagttttttctcggcatggccgagaaagcttaacacgtgtgggtgataaggtaacgatgacataacgtcgatctcgttttctagtttcttcgtttgttctgattttgatgatgatgatgaggatggtgatgagggagataatgatgatggtgttttaatggctacgactctttgacgtgtttcgtcaacgtcttggtgatgaagaagggctttataaacatagccatggcttcctttaccgatgagtttcgaaggagagaatcgatctatggcagtgacaagcttgtcgtaatcgaactccttcatcggtaagtttgcagagagattgaaagaagattattgtgtgtgactgtgtgttgtgtttgcgtgtaaaagaataaagttgtaaaaacgaaataattcgaaaattattgagaaaagcaaaaggaatataaagcttttttattttattttaacattgttttatagtatagagtaatgatgataaatgatgctttattcatattcctttcggacatttttcatgcttttgagatagttgggttcaaagtttaaggttaaaagctgagtcccctatgtttaattaacaaaaaaaaatcttatgttgttggcctaaccgccttaaccggtacgtttaggtaaccagagaaaaaagtgagtcgcagtgattaacaaagtaaagtgaattcttaccaaacaaaaaaaaacaaggtaaagtgaatgaaacagtaaacacttatttgaagtcatgaattcatatatgttgctaaagcttaggactatacttgatgatcaccaagaagactgtatggagtcacggagactggataacaaacataaccagaagtctgaaaacgtcttttgactatagtctcaaagacttagagatgcagcaataaccttaagcttcagcctgcagagagactaattgccttacggcttacgctcaacttcatggagtattgagaatctccctagacgcgcaattacacgttcttctcggggctgcaagcctgcaatagatttttcaggtcttgctgttgtgtagcaactaaaacaaactgcatatatactgttaatacgcatacagcaaacaagacaagagacaaagaatgaaatctatgttacgtgggttattgacttattttatagcaaataccgtttaccaatggaattcaggatggccacaagcgttccactcacaagaaaatgtcaggacgtagttttaaatacacctgctctcgtaggtcgatcatcaccctgaaaaaagtgttttggtagactagtactctccagaacaagaaggccagaacttgtcttgtttactgaagccaaagcttcgccttgacttggttggaaatttttttgtgacaaagtggctcttactacctttcaagtagatttttttggtgaaaatatttactggaatagccggatctgaagcacaatagaattgttgccccgagcactgtaagatagtatattggaatgttaaaaacagaattagattaaatgagaaatcaaagtctgaatttggtaggttggtggaagtccccttggcccaatagttgatcaaggattcattaatgtttctacaccaagaggtatggggttagagtctcagctactgagatttattagcagatttactgattaatggagacaagtgtgcaagagatttccaactatgtacaattatagtcgcttgccaggattctacgcaaagaatattgaagatctccatcaaaagcgtgaagaaagagaagaaggtgtcgtctaggttgattataaaataattccatgcttgggttcaaaacctaggtaaaattaaatgattgaaaaaacttatagtgccagctatgaaggtagcctacgatatacttagtcacagccgttaaaaatatatttcataatttccaagttttgataaatgttaattatgataatgtgatgagagtttaggaattggaagaagttatatttactctcataagaataatgattaggattacataggtttatatagtatagaaatttccttaactagatgaatacatatatgtaaaatatcttgtatcataagttcataactatacaatatttgatatatattgtgaatcttctatatccttctacaaattatacattaccaaaaggaacttgaggtttccaagagtttgttacaaagttatttgttattgcccaattaccaattacaggaattaaatatgacttggaagttggaaccctaagcgtcaattaccaagagtttatatataatcctcaaaaagctaacaaaaggagaagaagagtcttgcatctgaagaagaagttgattgaaatatggcacctaagcagccggaaaaaatcgagaatcctccgatggcgtcagcaccttcatccgaaaaagagtctggttctactgaaaatgaatatggttcttctggtgaagagactaactcttcggatgatgaacatgaagaggctagagacaatgtcataagcactcccttatcttttggtcaagagctcgtctctttctttaaggttgagaatctgacttatttgggtattgatgaagcaaagtggattgcatactgggatatggtcaaagatggaccaaagaagcgtgaggttgaaaaacaattgaagaagatgcttgctatgcaaatggagctttttatgatgaggactggatttacaaaagaggtagctactgtgttatttaaacaagacaacgcatcttcttcgggtaagtaggtggaagagctggtggtatgttgctagaatgtgtttgaattttgcagctttttattggtgttttggctttctagactttttttttgtttacaatccattttagctttcctatcatatagttccttttattggatgtttgattgagtataagacccctacctttatgtgaactgatataattttaagtttttgatatcttgggtaagtagctagaaaattgaatggcatttttaaaacacacgattcaatatagtagtttttgttctaaacacattgggaaataacattcaatctgtagatatactctgacaaatggaaatggaagtggaaaccaaaggattgtattaacacaaaattacgacaagaaaattgcagtcttccaaaataatcgaagcaaaggcatatcctagcattaacttgttatgtaagtaagctcttggatgcgcagttctaagttgctctaccatataattgtgctttttcctgaggactgcacatttaagagccaaaacttatcacatagttttgaagtttacataactagcctagaaatgaagatatcattctgcgttggttatcttcttacataatttgatcacgtgtaatcggattttcaagcgaattaggtcacttgtatgcaattaagcaacgaagacaaagttgtagatacacgcggtttcatagtaagataattctgtctttaaaattgccaaccaatgagattggatggaaactaagcttagaaagtatcagaaaacgaatttagaatgaaagagaaaactttgtgatagacgatgacaatggcagagatcatagcgatctcacatgcaaaatgaaagagctgtttagttttcttgaaattaaataccacttttaaactgttcataactctgaaaatggcagaggtcatagagacacatgcaaaagttattgcgacgtgactttatttaacttattttgaaaacgtatattatttggtatggacgttcaccgataggtgtaaacgttcaagggaatgcatggacgtatacttgtacaaaattgcgaaaatatatacttatgaacatatacatataatttgttttgttatatatatgtctagtaaattatgtactttctttctactatcatttgattttcaaactagagtattatttttttcgagcaaactaaagtaaagactataattcgtcaaaaaagtgttaagagtttgacaaaaaatagtgttagattctttaggatttcaaattaaaaaagttcgtttccaaattgaattccaaaagtgctaaccaaaactgatagaaactaaaattaaaattccaagtaattaatttattatcaaattacaagccccaccaactaatttcctaacaacaacccataatcggtccacatataagtatatataacccattcaacttcctccacatttccacgtacacataacccatagactgtacacatcatctaataacaaagtggacacaaaaaacatactttaaaaattcaaatcaactaaaagtaagcacacaatcttcttagaccattaacttaatcaattaacaaatcttcaaaacattaaaaacactaattaatataaccctcatcaaaagacttggcatagtattgatctatctcggagacactcctattgatcaagttcaccatcaaaccatgtttcatgtacattgtgagtgccaacttcggctccaccttgtgaccattcaccaccttcaccttgtaccgataaactattgcggccgccgtagatttcatctgataataggcaaaatctttgccaagacaaaggcgtggaccaccgttaaaggctgtgaatttgtaggccgactcactcatgaaccgtccgtctcttagccacctctctggcctaaactcaagacagtcttttccccaaatagcttccatacgacccattgcgtaaatcgcgtatataactttgtctcccttcttcaacatagttccatcaggaaatacgtcgtcttcttgaacctaaataaacataacaaactaataaatttcagtaactcgatagtatcataaaaaattaatatgaatgagttggtggtcagatatttcatagggaaacaccaaaacagacattcttattggttaccaagaagtcaaaatggttgttattatttctttctttttttgaagaaatgattttttaagatacttgtatattaattaggtgtcttcccaagaacttctacattaacttattctggttactgattaggtcacctgtattagaaaccaacccgaaataggattttaattaaaatttatcgttgaaaggctgttttttttccagtttatacgatcctatgttaccaaggctactatatctttataaaaaaaatactataaccagaaagttgtttctatatttaattgttagaaatttaatcaaattgggtttcttggaaagcaattaaaaaaaaaaataggttaaaaacagggcacatttagctaaaacttactactgtacctctttgtgatccacgggaactgaaggatacaatctaagagcttcagacaaagcagcttgtagataatccatcttcttgatctcttctggtccaaacacaggttcataatcactcttctctgcatttccatggtcatctctctgcctcagaatcttacacatctccaccatgatcttctcttcgacctctgggttcttctctagcaaccagaaaaaccagctcaaagccacagaagaagtatctctcccagcaagtatgaagttcacacagatatcacgaagaaacttgtctgaaaaactctctcccttctcatctctcagacccataaacacagttaagagatccgatctttttgtagtttcgccctcaagagacagttctttcttcctcgtcctgataacttcatcagcgaaatcatccacaccctttattgattccttaagcttcttctctgttcctatatcaagatacctcatgaacttccacacgcaagtaggcatgacgaatctcacaaccgcagcttcagtcgcatcctcaaaggctttcgcaaaaggaatcactggttgatctggaccgagacatcctggatcgactccaaaagcaatcatacatacgttatcaaacgttagcctcaacaagacgtcttgtagatcgataggagatgagctcttaaccgatgtctcaagaacaggtaagagcctcttgtgcacgagctcaaacaaagattgagtggttaattgtctgaatttggctgaatgaaactcaatgctcgctgttttcctctgcctctgccaagtttcatcatccgcgttgaatattccatctcctaggaggtctcggagattgtctcgaaagtaagaacctttagggaagacagaaaaccggttcttaaggagatgctcaacgtttcttgggtcacaagtgatagtgctgttgaggctgctaaaccagggacctctgaattggaaagttccgttctggagacatagaacatcggatagccactcgtatatgtttcctctgaggccaaaagctagagaaggaagcatcccaagaaacggccacacgggaagaccttggtatttcttctgacgcaaggcatgtattgcgacaaagacgaaaattgcaataaggagctcaagaatctgaacatctctcaagagaaacagcctccgtgaaaccagagggtcactggaggaagaagaagagaagaaaacgtcattgaaagtgagattgtaagaagaattgaaattcattgtgacaaagagaagagagagcgatgaatctcagaaatgaagaattgagagagattaataagaatggaagtcgttagttagctagtgggtgaagaatgttgcatgagtttcttgttggggacaaaaactttggctatcaggagaaattggtttgatttggtgagcagacaaaaactgtgaactttatattcaagtggctcttggttctcgtgtatatatattattatgttacttttctttcactataagtagggttcttttgggggttttgcttctggttttgggaatttcaaaggtcgaatcttttttggggttagattgtgtttttgaccaaaattgtgaaatagtttaggaaaggaaatgagaggttgttggcgatgggtaacctaagttaataatacaatttctctccattctatatttagtttttttgcttccgtccacatttgctttatatttttatgagggaatttatgaatcgtatattcccaataaaccaaataaattgtaggtatctaatacctatagtatataaaatgataattcgttgttgggtgtctgtcatcttatcgattttgaaattttcataatgggataataagggtagatggctaaattttgacgtaggtaatatgaattggaagatttatttgcaagataatcaaaaggtataattgatgaatatatctgtgaatttttttaagcatttgtaatttgcaatatactaatttgtggcaagaccgttggctttttcgcttcttttttcgtgaaatgagctcatgttgttgattactttttcatttgtgcagtaattgtttgtttagtaaaatttggtattttgtgttattcgttgtatctctatgttcggtaagaaaaaactaaaaaatgtcataaaatttaaaatattatgaggattgtcctaagtttggaatggtaagctcttttttagagattttgaaaactggcctaggtttggattgctagtggcaacaactataagtatttgagatcttttaagttgaggaaaccacacaaatatttgagctttgtggtttggaatctaagtttcttttaaggtctctacttgtagagttttcgattgagttttctttccgttttctgtttgtgttgtaatttttggtggtttatgtagtttttggtctttcatattttttgtactatctttctgtcaaaatttgcaaaaattgtataaatacttagtattgatacaaaaaaaacttagaatatatattagaatagaaaattggtacataaataatagcatgaataacataatttacgtacaaaggacgtggcattggccgctcaacagttctaaagttaactaactataattcacattcatatacgtaagaaagttagcaaaacgcctaaacggaagagaaaagacaaaatatatagaggccctagaagctctattttaggcccattaataagaaatgggcccaaccatggtgctggagcctgcccatggaggtgtgctaccgagtaagtaaagtactagatgcagtcttcttcatcaatggaggtttttgattcgccccaagctctcgcgattcctgatgttcttcagtaatttcttgcaatccttataaacaaagagcgtggagaatcgtttcagaggaaagaaaactaaaaatggcgactcttttcaacaaatttcagcaggttaatgaatctcttgcttctgtgtttgatctcttactgggtgtgaagaaagtttgaattttttgttcggatttagtcttttcgatttgcaccaatagaattaagattagaagaattgaaattaggctgaaggggaatcgtaaagtttcgttttttattgataaatttctaatgaagttgctcatttgataaactttgcatttgcaggctgttggagttcttgccaagagtaccacatttgctaagaacccaaggcaactgcagtttgaagcagacgttaacaaactctttatgtatacaaggttggttttttttgtctcagaagaatcaaagtctgatttctaatatggatttgtgaaccatcacacacgatagtctttagtttagctctagtttttttccttctaagttattaattcttgtatatacatccactatttgtgctcatgaaaacttgttgtgtttagctataaccggttgggacgagaagctgaggagactgatgcagaggagatcattgagatggctggtaaagccactttatctgagcagcagaagcaagttcaagagaacattcactaccaagttgaaaaattctgctctttgatggatggaatccttcttcctgatgttaggaggaacgagtcggggtcacaatcaacaagccctcgtcctcctcgtagaagtggtcttactttcgccattggtagtaataatgcttttccacatgcagatcagccccgtaagtgttttactttacttgaatcgatttgtgaacttattactcagtatttttctttcagcttaattagtattctcactgattcttcttcagcacagttgttcccgagacaaagcctttgaaactcaatgacgtctcacagagattaatggatcaaatgggttacaccctcgagaccaaaccgtctgtaatacctcacaaagacgctggtcaaggttgttttatcaaaggcgaggcagatgttggaaccgtcttagccttttaccctggagttatttactctcctgctttctacaagtacatacccgggtacccgaaggttgattcacagaactcatatctcatcaccaggtatgatgggactgtaataaatgctcaaccttggggtcttgggggagaatcaagggaagcatggaacgggtcctacacacctgcggtcaaagcaaacaccaaaaccgcagaaaacgggtcagacaggttatggaaagcgttgagcaagcctctcgaaggttcgggtaaaggaaaagaggttcttgagaggagaaatccgttggcttttggtcacttagctaaccacccagcgaaagagatgactccaaacgttatgatatgtccttatgacttccctttgatggcgaaagatctgcggccttacattccgaatatatcttttggggattctggagaaataaagatgaaaagatttggaagtttctggtttaagacagggagtaaaaacgggttagaagctccggttctgaagacactggtcttggtggcaacgaggtcgttgtgtaatgaggaacttttgctgaattacaggctgagcaactctaagagacgaccagattggtatactccggttaacgaggaggaagataggagaagatggagctaaatttctcttttatgttttaatgaaacttgaaaggctctgtttcaaaacatgctcctcggttttctttagactattagcgggacgtcgtttcgctgattgtgtcactatttttgtttttcgattatttttggaagacattttattctaatattttatgttgttctgttgttacatactatggacgaagagcaacacacgactctgtgatgaaaccagtgctgcaactgtaatagggaaattacgtaatgccaatgcaattatagagttctcaatggatggttggaatggaacaatggtgatgatctgtgttgttgaatgtgataaatgacttaatgatggatttggttttgtagtcaaaattattgaattgaagacgttcaaaagttatcggaaaatatgactaccgaataattaccacaaaaggaatagcgaattcaataaagtagacataaaatgcacaacttcaacataaacgattatatgaaaactataattgtataatcttataactctattatctataatcattgtgagtatatcaaatgttgtttaaactcactcttgaactatttgataacttaaacatgtaataattatctacgcaaaaaaaagacatagtaattgaaaaaaaagagagtaaatgtttacatgtttatgatcttcgtagagaatcttagctagtttcttttaaaacacgttagtcatataataatgcaaacaaaaaaatttataaattttttgtttgtaaacatttcatattgatcacactgtaacataaatgcctcgtgacttcttaatgtatataggtataataggagagtacatgtagatgtagatatacacttctatgacgtatataaacagaaactgaatctttttattacgcaatcaaagccgtaacattctgttttgttatatgacaggtataatttactttgcacatacatcacaattcacacattatattatataaaaatatttatgtagatcggtcgttgctaatttcaagggggaggaacatgaaagattgagagagagagaagtaaaacagtgtttggtcaaatctctcttaagaaataatcttatgaaatgaaccgtcactttctttgctctgctctgctttttatttggatccttctattccaattcattgaccaatcacttcattatctctaattctctaacattttttttatattatccttttgatttatatatcaaattatttcaatcatgatacaaaaacgatattggagacatagcacaagttgcgtctgtctgtacgtattttctatttatctagtatagtctaacaaaaagagaaattgcccataaaaagggaaactcaatttctaacaaacctttctatttttataaagagaatttgctactattattactgatataaaaagaaataaaatttcttgctttctatcatatttgatattttttgatgtcttcgtcttaaggaaatggttacaaagacaagtataatcatataattcaaatagaaaacgatattaaagacagatcacaaattgcgtgtgtagatatttcaccaagtgttaacaaaaagagaaattcatataaaaaaaaatatttataaaactgcaactattaatttattcaaactaattaaaaagaaagagaaaaatcttcctataaaaagaaatgaatctttctttgtaatcagaaagaaataaaattctttttacttttccagaatttgatttttctcatgtgtcttatcttatgaatatggttaccacccagtgagactacagagtgttcttatctgtctctgaatcccattctctctctcacacaacattatataagcttacacagtcacttcacaatttccacaaattcgatatattaaactataataaactaaaaagaaatgggttctcatagtgttgagttctctgttcttgtcctatttcttgtgtcctttcttcttggctcaacatcagcagaaaagctgtgcagtgacaacgacggcgacaacggttgtttccggtctagggttttggcagcgcaacgagctgatcgagtgaaagagcttccgggacagccgccagtgaaattccggcaatacgccggttatgtgacggttaatgaaacacatggaagagcattgttctattggttctttgaagccactcagaatccaagcaaaaaacctgtcctcctttggctcaatggaggtaagttaaactaactcacatccactcatttttcttctattacgtctcatagttaaaagattaaaacccaccaataaaataaggtgtatcatgctttgtgtgcatttcatctacttgatattgatttcgtaatagatatttgatccttgcgcaatctttatattcgaattttgaaactttcatgagttgggttagaaaaacaattccatttaacaacattacacgtaaaataacaaaaaattaacgtacgtatactatataaataatataatacagctgaaataatttttaacgtggattaaaataaaccataaataaataggtatgtatgtatcagtcatttgtatgcatggagacaaaaaaaggtaacttggggagaatattaggtgaagcttcctaatagtaagacgtatctcatttggcaccatgtcaaaatcaatgaaacgtatgtggttagtagttatcatcatcaccatcatgatgagttttggttgtgattggttaaactttaaagtaattttggaagcttgtaatgattccacatgcttgttagttgttacatgatcctatatatgctagcttttattctcttgtagactcatttgctatatatttaaatttacaatccacatatctcaacgttccatcatgctttgcttttagatggttttttcttttagatgtttatggtttcttacacattgttaatagaaaaatactttatttttaagtcattttattcataaagagctaaacaacgtaaaaatccaaattttgatgaaaatagtcataaaacaataaaatctttgatagattattgtaagtctttttgttcagcataacacgcttggaaaatattttggtgaaagattaaagataattagtttggtggaagattaaccatatgcttatattttattacatattaattgaattcatatgcatgtgatggatattaaaattattacctccacatatttaggctttaataggctcccgtgggctcattgcgccctttactttaatatgaaggcacagtaattattgacacaaaagttatgcatctatctattatcatcatatcaagaaaagtcaattccatgaaacttaaacggtccttcggtccataattcattatgattccaaacattacacatggtccatgcacgtatatgcacgccctaaaagttttctcaagtttgtttttattcgtgtgtttcttgataaaggcaagtttatcattataagcaacaaaacccttaaattaaatggaccctatgcaataatagtgaataaaaagtaacataatgtagagtcaaattaaaggagtaggcctatatcacctaagtttaaatttggtggtacttccaaataatgtacatagtaaaatgtatttagttatagtatattgagatttcaatggtgaaaaatgtgaatataggaccgggatgttcatcaatcggattcggagctgcagaagaactgggaccattcttcccacaaaactcgagtcagcctaaactcaagctaaatccatacagctggaacaaaggtatgggtatacataactttctaaatattcaaatattatctctctttctatcaataatgtaactgaattaatgtttttgaaatgtgatttacatagcggcgaatttgttattcttggaatcgccggttggagttggattctcctatactaacacaagccgtgatataaaacaactcggcgacactgtcacaggttcggtttgttatatataacattagttttattaatgaaatattagttttgtttgtaagttaataattaaagtttgtgtatgatgaacagcgagagactcgtacaacttccttgtcaactggttcaagagatttccccagtacaagtcacacgacttctacattgccggagaaagctacgccggtaaattattattattataagttagaaatacacgacgtcgtttctacatgtgattattacaaaaccaaaaaacaaaacattgaatatgtatgatttgcgtggaattattaggccattacgtcccacaactttcggagctcatctacaaagaaaacaagattgcgtccaagaaagatttcattaatctcaagggtttaatggtcagagattttcttaaatcaatccaataattattagtttcacttgcactatatctagtgttttgatgaagactttgaattgtatatatatacagataggaaacgcgttattggatgacgaaacggatcaaaaggggatgatagaatatgcatgggatcacgcggtgatatcagatgcattgtacgagaaagtgaacaaaaactgcgatttcaaacaaaaacttgtgaccaaggaatgcaacgacgctttagatgagtattttgatgtatacaagatccttgacatgtacagtctgtacgctccaaagtgtgtccccacctccacgaactcctctacttctcattcagtcgccggaaaccgccccctacccgcattccgaagcattctacgaccccgtctcatctctcacaatgtaagtaattcgtctttttaatcacttagaaaaaattctttcgtaaccaatttgactaaccggttataattgattatatacaggaaggatggaggaggatggccgccgggtacgatccatgtgcatcagagtatacagaaaaatatatgaacagaaaagatgttcaggaggcacttcacgctaatgtcaccaacatctcttacccttggactcattgcaggtattattacgacgttcaatcttattttcggttaggttttccagattttgtttttcatgaaatataaaaagcacatatagtttggtttggtcttttttagcaatatatgttaacgttttaggattctaaggtatatattgaggaagcagttttttttttccggttgtttggttatggtttgttcgaatataggcaaaggaaattgaatcagtttatgaattgtcacatgcacctacatattaatactcttactatcatagtttaaccaaaagcgtgtgtggtaaatgattgatagataggaacttaaaccatatgcatggtttactatgtgcagtgacactgtctcattctggtctgacgctcccgcttctatgcttccaaccttaagaacacttgtttcagcgggattacgcgtatgggttttcaggtataacacctaatccttggcatttttatgtaagaattaactgaaaacgagcgataaccgttttaaattgtttggtaaacttaatagtggggatacagacgggcgaatccccgtgaccgcaaccagatactcactaaagaagctaggtcttaagatagtccaagactggacaccttggtacaccaaactacaggttaatttggttccaagttacaaactttaacttttcttccaagtaagtgtgtgattgactctaaagatatatatatatatatatatatttttctttcacttgccgttaggtcggagggtggacggtggagtatgacggtttaatgtttgtgacggtaagaggagcgggacaccaggttccgacatttaaacctagagaagctcttcagctcattcatcattttctaggcaataagaaacttcctacttttcccttttgatattttctctacccacagattttatgatctttatataattcttaaaacaataataaacagatttgagcaaaataggccattatattagaattgtacaaatgttttatcgcgttttacatgttttctcgtgttacagtgacctctaaaactctcatctcttggataattctttaacaatatatagtcatccaatgatccaaacaacacaaattttagctaggcttacttctatataagttggaagaaaattttagatgtcaataatatgataattatgaaagagatgatgatgaaatttagaaaatattgtaaattcagtgttacacatatttcatattcaacgtcaaatacattcgccaaataaatgtacatggctcttatatgattctctcttctctttgagttttcttcattgttatgggtatgacaacaaatatcattatatttatttcgttttaagacaagattatgaaagaaaaaaaaaattgttaatcaatagaattcagatgtatctttttttgatataacttttttaataagtcaatagtaaactaaatttgaatagaatcacgataaaatacaacaacattgaaacgaatctctgccaggtacacatatagcattgttaaacggtggtttgttcactccacatgagtcatagcaatcttctttcttatgacacggtcctttgaattcacaatctgaggaagcatccataattcctgttgaattcatcacaatttaaaaatatttacttgttaagttaccatcatagatatttttgttatgtataaaatgcctatgattattacatatttatatgcatatatttttgtcgacaacatatattatactgaattttgattcggatagtttcgaagtgataacacatatacaaacatctaggctccaacctatatgcatatatgattgaaaaagcgtatatttattagacaagaaaccaatacttacgagtggattgaacattaacaaggaaggaaacaataatacaaagagcaacaatgtgaagtttcatcgatgtcatctttcgatctatataatattgatataagatccttttttctacttcactgaataaactaagaattttgattgttttatactgaattttgaaataacatgcatatagccattaaattaaaaacatgcatatagatcaaaatcaaaatctatatattaaaacatgcatatagccattaaattaaaaatatacatatatatcaaaatcaaaatctatatattaaaaacatgcatataagccattaaattttgaaataacatgcatctagccattaaattttgaaataatatgcatatagccattaataataactcaaaatcaaaatctatatattagttattttttactttcaaaattaactcaatttttttcctaatcaataagaaattgtttataagatattaaacttttatttgaaagcagaaaaacaaatcctcttataatcaatgaagtaaggggtcatgaagtaattgttatttatattgtcaattaaaaaagtattaacctctaatctgatttatttaactatgagacctttatattagttaaggtttatcatttcaaaacttatattattaatttaactaaagtagcaaaccctctaaatttcaaaacatttttatttttataaaacatttttaaaatcaatttctaactaattctattattttctgatatatctatagatacgataggcaatgaatcttctatgatttaagcacagataatagtgttttgctaaaaaaacgattaaaataacactacaacaattacggttgcaatttgaaacaaagccgacaaaagattcatacattttgtttatatatagcacaccataatataacaatcgttacttgttcaactataatgtcactagtcttttagttcaaaatacatatgataattacatatctatataaaggtattatgtaaaaatttatatcagctgataaaaaaaaacttacgagcggattgaacattaatacaaagagaaactatgatgaggagagctacaaagtgaagctttgacgatgtcatctttcatatacttttttttagtcaccacaggaacacactaattgttcaatttatagctaaatctgaaacaatctcaaaataaagttaccttttaaatattttcaaagatttttactgattaaattacttgacatttttgtataaaattcatatatgcgatttgaacatagataccgttcaaagatttacattaatgttcagatattgcttgccaattttattgatcaaggaaagacgaagtcaacaattaaaacatgtatacgttaatatccgatttactaaccaaatgttgtgccagagcccagaagtggtatcatataaagatagtcaacatttggttggttggtatcatataaaaggaatgtcaaataccttgcaatatgatgtttaatatttaagtatttaactattttatttgaccttccatttttttttgggtgtgtaacggatgattttctaccacttacaattgggctaggccctttacaaaagaagataagtcttttaagccaaaaagtcagcaaatagcaatagtgtttgaagagtcggaaacgaaacgaaacaatatcgaaaaaataagatatatcgaggatatcgaagtgaattccgtagagctctttcaattgaagttccgaataaagtgctttgagtagttttctgagtcagaagaaaaagagagatgacggaagccgagactccgagcatggttcatcgcttgaaggagtaacaacattagttgaccttccttttaagtaacaatattaatactaaacacacaaatttttataaaagtcttaactattttatttaatttgaccttctttcaaaaataaagttatttagaaactaagaattagctaggtaaagagaaaaacaaacttttgtaaacaggaaaattagctcagacgaggctaataaactggtttatgatctgcgataataggttaaggtttcgtggtggttggtttcgaattgccttttcaggatgatttcatgttgagtttttgaccagatacctcattttcaaaaaaaggatgtatctcttcattcatttgtttgagtaatttttgttttttattattatttaaagattgatttttatcatagatcttagcaatctcgtgtttctttaaagctctgttcgtttctccatttgacagatccattcaacatgtccatctagatgattcattcgactcttgttcgtttcatttttagtatgttcatttaactggaccatccgaatgagatgttgttcatttgcttatctctatctccatccaaatgatttgtaataatacaaatacctaaaataccaatgctttcatctaattatatttttattattacttgtaaacatattaattttaatttttaatctaaaatatatttaaaagtaaataaattttaaataatagttttttacatttaaaaatttattttacggttttggcgggaaaacgtgattttacagttttgacggaaaaactcgattttacgtttttggcggaaaacaggattttacgtttttggcggggaaaaatgattttacggtttcggtgggaaaacgtgatttttgcggttttggtggaaaaacgtgattttgcggttttggcgggaaaacacgattttgcgggtttgacgggaaaacatttttttgcggttttggcgggaaacgaaattttacagttttggcgggaaaacgttttttaacgttttagcgggaaaatggaattttacggttttatcggaaaattttgattttgcagttttagcggaaaatttaattttttattttttaaaaaaataattggaaaataagatttaagtctatttgtttttatctaaaaaatacatttaaataatcaattaaaataattagggtatttttgtcatttgttaattttgactgaatcatgtccatccaaatgatccaattaagttcagccaaatgagtttcaaaatttagcataaattttcaaactcatccaaataattcatttggatgtatcatctgaatgaaccgttttttgtactaaacgaacatcaaaactcatctccatccaaatgatccatctgactgatgaacgagcctaaattcattgtcaaatttgaaaatacattacaataattatgattgcagtgcggcggatccacgtagagcaataggggcagatgccacgggaaattttttcaattttgatgcaaatgttaaacaatttcgtttatattccttaatatttgcagttttgaccctctaattttagaacaattttagtattgcctcacccctctcccccgccctataaattgaatgttggatttcggatttaatgtccagcactagaaatctgtatacacggattgagcattcacaaaaagagaaactatgatgaggagagaaaaaaaaataagcttcgacaatgtcagttttgattaaactttttacgttataaaattgattaaagttttttttttctagttacaacacgaatacactaagaagctataattgttcaatttatagatgattttgtacaaaaatctcataatataataacattacctttataaaaaaactatgaaaggatacatgttaatccatctttttgtacaaaaataaattcaaaaaattcaagaagaattctggccagtttcttaaaatatggataaagacaacaaaataaagctatcacttacttcaacataacatcaacttcataacataacatgcaaaattttcaacataacatcatcacaatactttattgaccatctacttaccgcgcgcctaacaattttttaaatattggaagtagtggtcagttttatgtatgcaagtactgctaataatcacttactatatacaaggggtactattgttacttttattttcttcgtcaactgacttttattaaaaaaagactatgaaaggatacatgttgagattatgaacgcctgcagaaaaacaaaatagccaaaagagcgaagcaacgcctaagagaagggaatcacatgaaagatattagacaaaatacttaagaaaaaaagctcaatatggtaagcatagagactccaactttgcttctccaaataacatgtaacgtcggatagcttttccgcgacggttgtgcgtgtaattatcattttttagttaccgagtagacttcgccggagtttatcgcaatcgacgagataagcgaagccaaaagcgagattcattagcgtagcctcgtgaagctcctcattaaacgtcgcagtcgcgtccgtcgagaaaaaaaccctaaaacccttaataaacgcttcacgcgccgttgtctcacagcacaagttcgtcatcactccgatcacgatcacctcctttactccgatcttttccaggttttcctggaggcgggttttgttaaacgcactgtacgtgttcttctccaccatctcgtctggtccggttacttggccttgtatctcctggatgatttcagaatcggtggttccgtcaaggattacatcgccgttacaccactcgccgagcatgccgtggtcggtcggggatttgtggttgtgacgcgtaaagaatacggggactgaggcgcgtcggcagatgtcgatggtggtgagaacgttgttgaggatgggtttggccatggaggagaagtgattctgcatgtcgataacgagaagagctgcgattttagagtttggatctcgctttcgtgtctcgtactttctcgttgatgaggaagccatttttggtggtgtgaagatgaagttcttgatcggtggagatatatatactgggaacggaaacgtatgcttttcttggcgtatgttggttataccgacataattcaataaacatatatttgttctttgttgtatttcattttattatataaattttagtttttcaggttgataattcacatgaagcaattttgtcttttccatattactatatttttagtatcactaattttttgaaacaatgttatcttcaccatattattatatctctagtgtcaggaattttacatgaggaaatagtgtagtacttaccgttgtgggataaaggcattcgcttaaagccaccaaaaattggagaacttaaaaagctagaattttttaataaggcttattataggtttcattagtttgaaatatatgtgtttgagttatttgtctattgaagcccatttccttattattgttatcattgttttctatttgtatgaaaatttctgcacattaataacatttatgagtttggtgaatgattttacaggaagaaagaaaaaaaatatatactttagaatttctctatttttggtttgtattgagacactatcatgtacgcttgaaacaatattgttattatttaattttcattgtaatgcatgagcacggttacatgagtgtgaaatatgtcaatattctcgattagagatttgggcacatgttaaaaaaaaatatataaaacaaaattatgcaataaatttacaaacctaaaaataaaaatatataattaattgttatgaataatagatattatatagatgtttattaaagatctataagatattctaaaactttttaaattatttgattttcaaactgaaccctagtatatatttttcatatatatatcgtctttttattcatgaataatatataaaaccaatttctaaatctaattgatttacttatcaagcacgaaaccctagccaaccaagttaacagaaaacttggtcctcgtccgtctccgatctcatcgtttttctttttcttccacgtcgaggtaagttacctcacatctataaacattcgattcatcgtactttaatagtcgtgtttaaatatctcatcatatgacttgtctggatcatacttatttaacgtttgaatatcattatgcgttattgattcatcagagtttcatataatattttgtttcattgctaaaagcatctaagtcatgctgtgttacttaattctataataaagaaacaatattactttacacgtttgattcatatagtcttattatattttggggtcatatatagatcgagtgacacacaaacgtctagaataataaactgttatttaattcatcatttataattatatatacatttgcataattgggtttctgttatatacccatacttcaatataaaaaactcgtttgatgcatataattaattaatatactttgttattgatgggaacttatcgagttcaagttatggatctaatatttatactactttataattaaatttgttaaattttctgttttgaaaacattaaatttatacttcgacaaatgttttaataattatttaatttaccttttttatttaatataatcgattgaattttatcactattttgaattttcgattagagttatttggtttaattagattgattaatatattgttcaatatgacgatatgtttattagtcaatacattattagttttttaataagtcaaatatatccagcttttaccaccgcatgactattagatttataagtgacaaaatatatcttctctgcatcatcgtttgattatttaatctatcttctctgcattattgtttgattatttaattgtcatgtaaccaaatcatacactgtcacgtaaattattaaattgttttattgtcacgtaacccgaatcatatactttattatgacttagtttcattaatggtttgattcatatatttgttataataaatttaggctggttagttatttatactaaaataacgatttctaaaatacggtcttatgattgttgttttaatttatgctttttgtagttaaatgtatgttgatgttattttaagtaccgataattacttttgtttaagcatatgtattatccctatgtattatattgatttattgcattagaatattctaacattttttacatttattggttcccaaattgaatcctaatatgtatctcctatatacatcttcttcttacttataataatacccaagaacaattcttaaaactaattgttccacaacattaattacttttttcttaagtgtataagaaagaataataatttactaatcataattaaaaaatcacccactaccaaaaaattaattaaaaatactaatattattttttgataaagaaatattaaaagttaaaaaaaaatatattataagtttaagtataattataaaggaacaataatactattatctaaagtcggttgtcacgacatgagtcaattatttcaatacaatcaatttttgttgccatatgaaattatttaatataatttttgtcttttgttttcgttttttcttcttattagaattatgttatagtttaaattaaagttggtgattaaattacagtattaagctaagaaaaaaaaaatctaattcaattttttttttttttttttaattcaattttgttttactcatttcctaaagattatctttatttacaagaagtctttgaaaatcacatggattccagttgtcccagaattaataattctgcctgtgtctcctcaagttacacgcacatgctcatttttttgcttcaagttgcaaaatgcaaaatatctatttaactatatgttattcttctctttactttttctttttctttttttgtcgtcaagattgcattaagaaacccaaaggacattacagagatacaaggagggccgttaaagatcaatacttttttaaatctttttgtttgtactggttcaaacttattttaagggtttgggaatcgaaattagtcagcatttttttgttatcgtttagataactttgtttttctaagaaaaaaaaaagaaagataaaaatggatagatataaaaaataatgtatacaaataaatatgatcaatttgggattggcacaattaagtcaatggttttgtgaaaacagacatatcataatttatgtacttatatttttattgtttgacgttttcatctttcacagctttccaaatttttattgtatttcttttttcttttccgattcaattattacagaaacgttgacaacgtaatctcattattaattttcatcattttctgtgtaaatgtccgatcaaaccgtaaagagacgagttggtgagaccgagaagcaagcgaatgtggtagagtcccggtgaagagatgacgcgaccttcaactccaatcgcagatcacgttgggtcttatcgaagtaaagataaattttgtctctagtttgttagatttgatttctgggtagatctaagcttgattcaaacgaatttgagagaggtaatcatattttctagtttggtagattcgagcttgatttgaacgattccgagtgttgtgtactctttaaattggtagattcaagtttgatttcaacaattctgggtgttgcaacgaatttgatagaaaatttggtaatttaaaggcaggtgaagttttcgattctctagccctttgatggagatgggctgtaaacgtcggagatggagaatgaagggctaatctcctcaattgatttgatcatttttttgagtgatatccttgggtttcctataaattatcttcttagggtttagtattgttccatcaaaaaaaaattaattgattatttgagttcatcataaccaacgttttgatgccgtgagttgtcggagaagaagagatggagaagatggcttctgattgagtgaaattgcaagggtaatttcggcagcctaactcacataagtacctttatccataagcccattgtaaatgtgtctaatttctagtttttggattagaaagtgccaattctcaaaaagcccccaaataaatacataattttttttttttgcaccactaaatatataaatttaataaattgaaattgcgtagatttttataaaataaaagacatgagcaaaaaataaaaagctaattaaagaaaacttgttaacaaccgacaaactaattgccactggtaaatttaaaatcatacgtagtatctgttaggaactggtttaagtccaaaatctattgaaccaaaccaagcccaaagtaaatcaagacgagccaagtccaaagcaaattaagtctatatttgtttatctgtgaggccagcagaagataaaagacgcacatgaaaataaagaaggataaaaacgtaaagtcattagagaaaatgtcctagcaaaacattctataaatacgaaaatagaaagtatgaaaagatatgcacgaattccgctgacataggaaatgacacaaaaagacacaaatacaagattctacctcgtcgtctttaggaatctacctgtccccttcatatcactccgcttcgtctcgtatacttactcttgttcggtcataggctcattgatcaagtgacggatttttcatattccctaaagatccatatcgtatttgtgtgatttgtacgtcaacacggccgcagttaaaagttggctagaacttccatgactcggacctacgtctctaatgtcgcgatgtaatcggtctttttatctaaaatgtatatatacatgttcacattagcggtagcttgaacaaacaacaatttatcccttctcaagtagcatgtcatgtatcgttcttcctactttttattggaaaataaattttgtatgagacgtacgttatgcaatatgcatggacgtactagtgtcatgaatactcgtaaccagtctagacagtaaaaaatgtaggtgcagttatcaattttttctacgaaaattttacaacggtattattgttacttacttaattacacttaaagcacctccattagtcatattaatgggtgtctttattatttttataatataaattaaagatatttgtgaagagagaaaagaatagtgtctccaaaaatacacaaagacatctcttaaagacattttctacctacatgtcaccttcttattggttttaatacttttacagtttatcaattaaaattttaatctaacgactaaagacattccacttttatcaccagatgctcttacacacacaataaacacaaataacaaaaggtgtagtcatcttttattaactactgagtagacctcgccggagtctatcgcaatcgacgagataagcaaagccatacgcgagattcattagagtagcctcgtgaagctcttcattaaccgtcgcagtcgcgtccgtcgagaaaaaaaccctaaacccctttacaaacgcttcacgcgccgtcgtctcacagcataggttcgtcatcactccgataacgatcacctccttcactccgatcttgtccagcttctcctgaaggtgcgtgttgttaaacgcactgtacgtgctcttctccacgatttcgtctggtccggtgacctggcgattgatttccgggatgatttcggaatcagtggttccgtcgaggattagatcgccgttccaccactctccgagcatgccgtggtcggttggggatttgtggttgtggcgcgtgaagaatacggggattgaagcgcgtcggcagatgtcgatggtggtgagagcgttttggaggattggttcagccatagagtagaagtgattctgcatatcgatgacgagaagagctgcgattttaggatttggctctcgctttcgtgtctcgtacgttctcgatgatgaagaagccatttctggcggtgaagatgaatctcttgatcggtggagatatatttgggaacgaaaggatttagtcactcacttattgggccaatataaaatgggcctagcccacgtatgatgtaatcttgacctatgttggttatacaggtataattcaatgtgtatatttgttgtatagtataatgttctttgttacatttgcaggtgaacacgagtacctgctctaaagagggatatgatgtacatatatatgatctatgaatcttatgtttctttatcttctagcttgtgttgaacagcttccacaagttggagtaacattgctccaatgaagtaccatgtaactcctgctaacaatatctgctgccatggactgttaactatggataaagccagcgagccgccgatatggtcgttgagctcagaggcggctctgtaacttgcttggtactgaaccaagaatactgctactatggctgtcccaattggaaatttctttatcctgaactgtcttctattttctcttctactagttggtttctcttctgaaggaaatgtcttacgagtcacttgcggattcgagctagctttggaaccgttgttgtttccagatgagggaagagcagcgtttgatggactccagtaatcttctccaagcaagtaagctgatcctttctctttggttcttccgctttggtctgcttgtttcattgctgccacaacatcttgaagctttctgatatctggatcaacagctttctttcttttggtaaaagttagactcatgtttgattctggactcaatggtttcgtgtacggtgatgatctccagtatagccaattggaaatggacctaatcgcctctactgcacttatttgtacttctctctgtgaaacatcccaacaaaactacttaatatcttacatgtaagtgtataacttgactatagataactcacctgggaggtctcttttgtggttctgctcatagctttagcgtatctttcttggaacttcttgacatcaacaaatacattggagacacgctcaccaaccgtgtttccaaccccgatcctcacgttgcctcgtggttgctttgacataaggaactccaatggagcaaggtcagatctctccaccattctgcacatctcataaagtatcatacttttatgtatttctctagttgtcttgtctctattgacttcacatatagagagggaaatgaaacaaaaccattactacatctactagttaagtgcttacgaaatgcagtctacagggcaagcttcgatggcttctttgattttggattcaggatcagcccattgagcaacaaccctcgctctcccgtaagcagtttcaatagcaaatgttttctctgcacacaaagcacacttcaaacacccaacacacttaacctcgtccacaaacgcagctcgttgctctgtttctggtccacaccaaaccgagtatatcggtttccctgtatagcctctgagttcttctagttttgcttgctcctacaacaagaaagtttcattcatatttacttagtgtgaccttgacagagactacaagatcaaagaagcaatataagaattataaccttgtcataggcttggcgcgagatcggatcagagagaagctggtaagcctcgttaagaatgatggccatatcatgaccgggatctcctgcgatatctggatgacatcgtttctgcaacgcacgataggctgatttgatctgagacttatcagaacttcgatcaatacccaagaggtcataaagatcaaagtcagtgatagacgatgatgatgaagttgctctacacttgaacttgagtggtgatctaacggtgatgagcttctgagatgttgaacatggccatgtagcagttgatggaggaagagtcgtcggagaaaaaatagccggtgtcatattttccccttctctgttttggaaggtggatgagtttagagagggacaagttgttgaaaatatctctatatgaagctatttttccatctctcttggaaagatattttatttgggacgaataaaagttccaaattgagttatagctaaaatgaataatattttataaaaaataaaatttttgaaagcagacaataaagttgattggtggcaattaaaagagttgtactattatgatattatccttctatacgaatgaaagtttaaggctgaggatcatagcgtaaaaaatatcataatgaattatcgaaatgttgttttaataagaaaaaccaaaaaataaagtcttacatatttaggttacctaatttttggcttttggtttggactttaaaagatccagtctacacttgttgtatctttcttacaatcttttctttcattttcaggtaaaccaaaaaaattataaagaatcttcccaccctaatcagaaaaataaattataatatcaattttcaagaaatcaaacttgtaaaatttttctacttaggagagtataattttgagaaatttgagtttttaatctacaaaaaaattataattaagtaactaaccatcccacaaaaagatactgatattatttgtattttctgtaataatgacaatgctaccctttgcctgagatacaggctctttttcttcttcttcttctctctttccaaaaaacactttctcatcagctgttaacattccaacagctttttgggtcccaaaaattactatctcctttttgtaaagcttcggattctgaaaacgttcaatggagatgtattggcgacggaatcaatacatttaatttttggaattgacgtctagggtttgtgattaaattgaattgggggttttgatttacaaaggtaaaattttggatttttttggagttacatcaatttctagttaagtgtggcgagttcgtgtctccttgtgccctcgattgtggaacccaaatggtgtacccggtgttctctactaccacttctttcctctaccaagagactatcttgtgctgtgctactcgttatgttggtagtgatgacaaacatatattattctatttttctatggttaaagaatattaaattttagattgaaatctttgggttcccaatatattatccacttagggtttagtatccttccaacaaaaacatttaattgattataatgctatattaacgtaacataaactactatctcatcaccactaccaacactattactttatatttaaaacattttgctctatactaaaattaaaattgatttacaaatcagttatgaaaatagtatagaacaatattttatttctatacatcttaaatagtacaatatattttttacttacaaacactatttctatttttaaaattcaaatccgattttaaaaattcaaactattctgtatgtagaaaaaaacatatatttttctctactaaatttcagaattgaaatctattttttggaaaagatatatagcaaacatatataaatggataaaaactaaaataaaggttagtaaatcatctcacctatgagtcaacattaaaattgtcttttccctacccttacatgttactttcttaatttctatatatatgatgctatattcttaattacattatcaaaagtagctagttttgcaattcaccctataattttgtgtgcacaagaaaaaaaaaaaaaaagagtataattttgtttggactcaaatcaatgggccttaatatggatccattaaattaagcccaaaagctttcgttaattcttcaacgaagatcgctgaaaatttcctttcccatttcgctgaatagggttcagtacaaaattcggaatcgtaggtttaagaattttagatcattgaaacagccatgtctaggcaggtcacgagacttctcggatctcttcgccattccggcggcggctgcagcggcagctcaaaggtctgctctctcacttcattggtacagtctcgctccttcgggacaactcctccgcctcctgcggcggtctttgtcgacaaaaatacacgtgtcatctgccaaggtattaccggaaagaacgggaccttccacactgaacaagccattgaatacggcaccaaaatggtattgtattcgagaattcacatagattcaaatgtacttcttggtgtttttgagcaattcagattctatgtatggagttcttaagtacgatcataagagccgattctttactatttcatctctcaagttcacttggaattggttcgtttatgttgatgaaatggtgtttgttttgtgtttgctttaaagcttgtgatgatcttattttaggtttgtggttgtttggttaataggtagcaggagtgacaccaaagaagggtggaacagaacatttggggctacctgttttcaacactgttgctgaagctaaggctgagactaaagccaatgcctctgtgatctacgtacctgcgcctttcgctgctgctgctatcatggaaggtttagctgctgagttagatcttattgtttgtatcactgaaggaattcctcaacatgacatggtaatagtcgttgttaccagtttcctttttttttttttttgtgatatcttctttatatgataggtttgcacagtaatataaggtggctctactgatttctctggcttttgtaatgtaggttcgtgtaaaggctgctcttaacagtcaatcaaaaactaggctgattggccctaattgtcctggtattatcaaacctggtgaatgcaagattgggatcatgccaggatacatacacaagccggggaagatagggattgtttctcgatctggaacattgacatatgaagctgtaaggttctttgtgttgccttcatgtttgtctctgtctttctcaacttattgactccatagcctttagcatgagtagttgtcttacttaagaacctctactccgtcgattgttagattaagctttcactgatgtcagttccttactggaagacctgcttattaagtacttcttctaatggttgcattttggttaatctttcatgcaggttttccaaactactgcagtaggtttggggcaatctacttgtgtaggaattggtggggatccgtttaatgggacaaattttgttgactgcttggagaagttctttgttgacccccaaacagaaggtctcggtttcggacaccataattgattccatacatcttatatcttttcctatttgtctaaattcattgtttcctgttagtcacttacttttaatatgtagttgatatcccaagactactactagttctttagtatgtagaaaaaggtgattcatttgcagtaatagacacagctttatcgatattacagtctcgctctgttttgtagattagtgaaagaatccagcattgttttgttactaagaaattattgatttattttcaggtatcgttctcattggagaaatcggtgggactgcagaagaagatgccgctgctttgataaaggtaactgcaatgcttctttctaaagaatcaagagttaccatttttagatgatcaagcgtaaaaacatatcctgttttcaattaaacaggaaaatggtacagacaagcctgtagttgctttcatagccggacttactgcaccaccagggcgtcgtatgggtcatgcgggaggtaaataaactttactcagctctttcattcattcacagtttcccactcgaacccattattaaatcttgtaatgttttttttgggatcgatgaagccattgtttccggtggtaagggcacggctcaagacaagataaagagcctaagagacgcaggagttaaggtggttgagtcaccagctaagattggtgcggcgatgtttgagcttttccaagaaagaggtcttttgaagtgaaactgaagtaatatcataatacaatgagttgtttcaggaatcaacctctctaataacaacagtttgccaaaatagaagagtgaaacggaattcctaaaattccttaccatggagataattgcagagaaaaaaaaatagtcacttttttttttgtctatgccattctatttttcaatttattgagccgttctattttttttttgtctttgttttggttaagttacaaaaaatgagaacgaatcaattgcacaaatttcttcttttaagaatcaaaatcaactaatttagctatgttgattccaacttttgtctgctatgctatgagtattgttgtaaaacaaaccttttctttaattttaactaacaattaaccccaaaaaatgacagctaatcaaaatgattttaattagtgtcgtgaatatgaatgaagagattcataatataataatattgggaaaaaacaattgacaatgagaatgcatttaagtaaaatgacaaaaacaaaagcaaagaggtctataattgggtcctaggtaatcaatggtaattcatgaggacgttgtcattaattaattactactacgtgtactaatcaatggttatcactggttcagataaagacgcttacgtcagatgttccatcaaattacaatttatgcaatttgcattacgttttactctatttgtataataagttttcgtaagcctctcaaaagataaatcgaaacatttatcattaaattaggcaaatcaatagaaaaagaaattagctcattttatatttagtatttacatagatctgttatatacgtatgtgtaatgtaggacaacataggggcagcagatgagaaagtgtgacagtggaaatgacggaaatagccttggacccaactcttcctctttgatcattagtttcctaatttagaaaccataacatgtttcttgtgagtcttctgacagaacagacgactgaccattactctctctgcttccttaaaaatcctgtgacccaaaaattcaaaggaaacgactttaggacgttagaatttaaatggaattaatgatatatttaattgtatacagtatattgtttagaccattaagttcaagtttcaacacgatttttcactttgcaaggcatttaccatttgtcacatataggtaaaatttatctacgtacggatcatcttgttataataaatgactttttcaccataggcaaaactcctaaattctatttttctatttaaatttgttaaaacatgatcactggaatgattccactgtgtatattcatatcattaataatttttgttctcaatcttatcatgtaggcgtagcctgtaggcaggtgtagcgctgctaattactgaatatatatatatcttattatataaagtatggttttcaaagttgctaactcataggatcgtgccacgtgtcaagtcaaacgatcagatgtttacatgtgtcattcaaaatttaacttttttattctctaaaaaaatagaaaatcttaaaaagtaaacaaatttacatatactaatttatatgtctatatatttataaacaattaacatttattcaaaaaaagaaaattaacaaatatgtgtttaactcatgtaattataagtgaaaatagaatattttgagaaaaatagcttagcttataagatttaacttttcaattattttcatttattaattttaactcatttaatattaatttgcatgatgtaaaattagcttacgagattacggcatatataaaaaatatattttcaacaatgtttggtttctaaatatttttgtggatttctgattttctattaattattaagcctaggcgtttgggtattcggatcgggtatttcgggttcgggttttcgggtttagaagtttatgacccgttcgggtaatttaagatttcgggtcgggttcagtttgggttcgggttcgggttcgagtttatttatatattgaaatatcaaattttgtgtgcaaatctattaaattatttgaaattttcaaaaatttccaaaacaacacgagtagttttgattgaatatttctaaaaatacacaaaaataactaatatatccaaaaaaatcctaatattttctatatataagtataaatgtaactaatatatatttatatttgagatatgtttggatacctattcaggttctggttcgagttttttagattttgaagtttagacccgttcaagtatttaaaaatttcaggtactcccgcctaaataggcgggccttatctagtatatatatatatttatggcaattagaaactatgaatcaaaggatctagatgccaatttccttttcagaatttcagtgttcgagtttcagcatcaaatatatagtaaattataataagaaaaagatgtaaatgtcatcctattatttaaatttatatattgggaagtaaacttattacccacaacacttttattggccttgctttgtgtagtgatgttgttgtatgaagagacacttgttcttttcttatcgtgttttttgaaaccattttattaatgaaattcaaatatacaatattagtgtaagtgtgtaactaatatggattgcgctttacaatcttgtttactgaattatgactcgaattgacaagaaaaagaagctatactttattacatactataatctaaataaattacacgtacattgatgttactatagaaataaaataaattttggggcttgtatgtttatgcatatatttgataggcagaggagttaggtaaaaaaaaataaaaagtcactttcaagtattgttacactttgtcctttcccatttggctactctctctttctctcttttgcctttttccttttgtggtaactttgttttccttataacattatttcattaagtttccattttcgttttttctccgaattacgtcatgcatggcagatcaaagaaactaatgttcgatattttataattttttactaaaaggatcttcttcgctaaagaaattaccaaacactgccattacaagtcttgtctaataaaatttcgtatttaagttattatttgaatgttttgtagcttaaattgtcttttgtgtttggtagtttgaaaattgagtataagacatctttgttaacttactcaaaatttaaacgaattattttttatatttaaaataaccttaaaagaaaaaatgcaaagtgaattaaaatatattttaagaaaattattactacttttttaaaattctctgtgaaataaaaataaagagaacataaatatatagagaggttaaacgtgcaaattaatgcgcactaagtgtataatgctgaaagtaaattatgaccactatacgtataataacatttaattgaaaccctaagaaacattgatattattaaataggtaaagccattttcactgcctaatttacagaagacaaaaaaaccttatacaagaagcagaagaaagagaaaatgaaattagaaaatggtgagctgaaacaacacgccacacacagaattatacagaaactagaaagtgtaattaagcatattcttacccattaatctctcacctttattgtgtcatccaacctcaatctccgtttccagatccccaagaacacagctcaacaaaaaagtactttaaaaagactctctttctccctctatctctctatatatatttctcactagctctttcacacacacacacactttttctctctctatctcctctctaattcacacatcaagattcaagaatcaacaacatccttgaaatgaatattgtaattaactaattctagggttttcagattcttgttttttttggttagttaattagggtttcttttaagttgatctagctttcatatacacttgaatcaggaggaagagggagccactcataagaggaagaagagagagatgggtagagggaagatagagataaagaagatagagaatcagacggcgaggcaagtgaccttctccaagagaagaactggtcttataaagaagactcgtgagctctctattctctgtgacgctcacatcggtctcatcgtcttctcagccaccggaaagctttccgagttctgctccgaacagaacaggttaacttcttcttctttcttgaattagggtttcagagatctatacatacatgtgtatgtatccatctaattaatgaggaaatgagctagatatatgactcgtgcttgagaacagacagttttcatcattagtttctgaagtagcaggtgtcatgagtcgttttttggattttcatttggcccagaagttaagaatctttgatccaatatttttgttcttgcagtatttaatttgtattttcatgtatcttatcatatttaatacgtatgggtcaaattctatatttaatttgtatttgacatttcttgatccagctttttcgtaataagaccctaattttttttacttatttttgtcacaaaaaagaccctaatttatgtagtatattaatgtgtcatatttacaacataaacatacataccgatatatatgtataagtctcatgttaatgattcaatttagtacaattataagttttagttctaagtcatgaaccagataaataagaaaattattcacatatagccataataggagaagaagggtgtgctaatagtttaagcgttgattacacaaaaaatgggtaaaacaccttttaaatttgttttctcctaaccaatgtttaggccaaaatatggattctacccttcagaacattattagttattttgatttttgtgttcctccagtgattattgaagtcttgacgtgtagcattaaagatactaaactgatcacattttcatattgaataggatgcctcaactcattgaccgatacttgcataccaacggattgcgacttcctgatcatcatgacgaccaggtatatatatgcacgcatactttttcctttgtgttaccaattgacaacgaaggaaatcacacattttcttaagaaacatatgatatattcatttgtatttttgtgtataggagcaattgcaccatgagatggaactactaagaagagagacatgtaaccttgagcttcgtctgcgtccattccatggacatgacttagcctccattcctcctaatgagcttgacggactcgagagacagctagaacattctgtcctcaaagtccgtgagcgtaaggtaatgcaaatatatgtccatatctatacatattcttttaaaactatattggttacacttttgtttgatctctgctattaatatattgaagaatgagttaatgcagcaacagttggagaatctaagcagaaaggtcactctctaatcactctttttaaactctaatttcatctaataatctgattataccgcgtgtttaattatcattaccgtgttatgcatatgatcagaggaggatgctagaagaagataacaacaacatgtaccgttgggtgagtttggttactagcgaatgtcaatacgttttcacatttacgttggtataacatttttctacatataccgatgtttctcgcagcttcatgagcatcgtgcagcgatggagtttcaacaagctgggatagataccaaaccaggggagtatcaacagtttatagagcagcttcagtgctataaaccaggggagtatcagcagtttctagagcagcagcaacaacaaccaaacagcgttcttcagcttgctacacttccttctgagattgatcctacttacaatctccagcttgctcagcctaatcttcaaaacgatccaacggcccagaatgattaatacaattctcaatagatatctactctttctttatggagacagattcatgaacttttattacctatattttgataagccagtgtcttcttttgtgtggctatggaaaccttgtttaaagcacaatgcacttgagttcttggttatataattaatcatcattattacatattttccaactaaagatcatctgtttatgtaatgaaacacccttgttctccaagttatgtttgtgaaaaaaaaaagctgttgctttgatgttttgaagtgaagattggccattacctggagacagagtgcaagagataagcaaaactattcttagactattagccgcaagaaatacaaaaaatccggcaaatgtcttatagactattagccgcaaaaaaataaaaaataaaaaatcccggaaatgtcttatagattacaagccgcaaaactattcttagattattagctgccaaaaaaaaacatgaggatctttgtaatgtctggtggattcagacagagtggatcataatcccgaaaaaagctcttataaaaaactaagccatgattgaaaacattccaataacttttacagaggactgcaagaacgatcaagaagcaagaaagacgtttcagaagaacaaacgtcttcttcttgttcttcttcttcctcctcttcttttttttgttttcattacgacgagaaaatttgagttcgtgatcgcttgaacaaccatcatcatcatctagagccccaaaaaagaagaagctgcgggccggttattttggttaattagtctaaatccatggcaggaggggcatttatagacgagagtggccatggaggagactacgaaggtcgtgtaaccgcgtttgtcatgataacctgcattgtagctgcaatgggtggtctcctctttggttacgacattggtatctcaggtttgtttcttgccagccaagtaaaccaaaattcttctctctgcttctttctttgttttcatggcggacatattatatgttttcaggaggagtgatatcaatggaggactttctaacgaaattcttccctgacgtgcttcgtcaaatgcaaaacaaaagagggcgtgaaacagaatattgtaaatatgacaatgagcttcttactctcttcacttcctctctttacctcgctgctttgttcgcttctttccttgcctccaccattacaaggctttttggccggaaggtctcaatggttatcgggtctctcgcttttctctctggagctcttctcaacggtttagctatcaacctcgagatgttgatcatcgggcggttatttctcggtgtaggtgtcggattcgctaaccaatctgttcctctttacctctctgagatggctcctgctaagatcagaggagctctcaacattggttttcaattagcaatcacgatcgggatcttagccgcgaacattgtcaattacgtgaccccaaagctccagaacgggatcggatggagattatctctcggtttagctggagttccggccgttatgatgcttgtcggatgctttttcttgccagatacgccaaactcaatccttgaacgtggaaacaaagaaaaggctaaggagatgctgcagaagatcagaggaaccatggaggttgagcatgagtttaatgaactttgcaacgcgtgtgaagccgcgaagaaagttaagcatccatggacgaacataatgcaagctcgttatcgaccgcagctcacgttttgtaccttcatcccattcttccagcagctaaccgggatcaatgtcattatgttctatgcacctgttctgtttaagaccatcggttttggaaatgacgcctctctcatatccgcagttatcaccggtcttgtcaatgtcctttccaccattgtctccatctactccgttgacaaattcggacgaagagctttgtttcttcaaggtggttttcagatgatcgtgacccaggtgcgtacaaaccctaaaacaatgaaaatactctgtttttcaaaacagagtatcttgctctgctttctaaaaccgaggtaggtaacaatgatttgttttgctttggcttcagatcgcggtcgggtcgatgatcggatggaaatttggattcaacggggaaggaaatttgtcaggggttgatgcggatataatcttggcactgatatgtctctatgtggcgggtttcgcgtggtcatggggaccgttgggatggttagtgccgagtgagatatgtccattggaaattagatcagcaggacaatcgttaaacgtttcggtgaacatgttctttacattcttcattggacaattcttcttgacgatgctttgccatatgaagtttggtttgttctatttcttcgcgggtatggtcttgatcatgaccattttcatttacttcttgttgccggagacaaaaggtgttccgattgaggagatggggaaagtgtggaaagagcatagatattgggggaaatatagtaataatgatgatggtgatgatgttgatgatgatgcttatttttagttgatgattatttgggatttaaggatatgttaggattaaaaacttattattgagaaaatgcttatactgaccaatgtgagaaaataaaaatgaggatataataaacaagtgtacataatttgaggatttatgaccgtacttaaaattactcgaaacttcttgaactaaaaataatataaattttttgtttagactaaaatgatcattttttacgataaagatacatgtcgagtaattattaagagtatccaaattatccgtttgaattgttaaaatatttaaaattattataattttccggctactaaaaattctctaacacttcacaagattattaaaaaaaactctctctctctatttgtacttaaaataacccaaatttgacccattctcatttggatagcgatttttaaattattgaatttatctaccatatcatatcttatcagttgtttccaaaacttagaagtgaaattaaattggttatttatttttgtttgtaacataactaaatcaaccatcaagtcaatctcgaacaaacaattgttatcatccattatccaatattaattacttttttgttttgttttgttacaagtgaatactattcacatgatttataaattagtattattattcactccacaacattttgtatcagattaggtttcaagtttatagttacacaaaaaatggattccgaaatcttttagattaaaaaaaaaaaggatcaaaagttcaaggtacacaatctttttataaaactgccgacatgatgccatatcgctcatgattgcatttatttttttgcattagctcacaagaatgttaaaaattaacgataagaaaatccatttaattagggggtacgagtacgaaaataattaaaacaaatattagcgtttggtggtgcataactcagcataagtcataaaataaattgttgtcacgatatgtgaagaaaatctcgttgcgatgagacgaacgacataaagaaaatcttgcgtatctgacaagtggactaatccacttattttcaatgtcagtctcaaaatgggagttattaaaattaatgttcgttctttttattttatacacacatttattttatatatatatttatattatatacagtaaaacctctataaattaataacattaaaaccataatatttttaatttatagtactattaatttaaatgtctttgggtattttagttggcaaaactcaactaattacaggtaactttcttttgtgatgtcgacaaaagaattctgaataatttttaagggtttcgatttttgccatttcacgtaaaacacgtgatactgggctactggcatttacggcagagtaactggtggcaaatattattaccaatatactataaacaaataaataaaaagaacaaacactagtattaaattttgattgttttataactcaattaagttttgatgtcaaagtctacttaccaatcaattacctcactgatttgtctccttttcaatcttttcgattgttttatggaaacagctttctaaaaaagattaattttcacgtaatcacaaaacaaatgttcacattagcccaaatctaataaccacattaggttggtcccaaaaatttaaaaacaaaaaaaaacttttttagacagagagaccaacttcaatacatttagtttcatgtattttaaataagattagtatcttcgtgttaatttccaaattcaagcttatagtaagttagtaataatgtatataatgacgtggcaaaggataaatgtctctttaaatgcacgtagcagccggaggagtgacccacctacctagtgttaaattctcctgccggagtttggtccccacgcgaccttcttcttcaccggagtaataacgcgcgtgagctccaccgcgtcgggacaaaactaatgtcctctcaaaaaagcaaaaaaaaaaagagaaaaaaaaccagagatggtgagctgtgtgaaaaggaccccaccacacccatgtgcttctccttcctgtctccaccagctccctccttctcaatcattagcttcttctcttctcttctctcacagagagagtaatcacaagccaagtgagaaaaagaaaacactaaacccagatcgaaaaccatgtctattaacaacaacaacaacaacaacaacaataacaacgatggtcttatgatctcatcaaacggagctttaatcgaacaacaaccatcagtcgttgtgaagaaaccaccggcgaaagatcgacatagcaaagtcgatggaagagggagaagaatccgtatgccgattatatgtgctgctcgtgtttttcagctaacgagagagcttggtcataagtcagatggccaaacaattgaatggttacttcgtcaagcagagccttctattatagctgcaacaggaactggtacaactccagcgagtttctcaactgcttctgtctctatccgtggagccaccaattctacttctttagatcataaacccacttctttacttggtggtacgtcaccgtttatacttgggaaacgtgttagagctgatgaggatagtaataatagtcataatcatagttctgttggtaaagatgagacctttacgacaacaccagctgggttttgggctgttccggcgaggccggattttggacaagtttggagttttgctggagctccacaagagatgtttttacaacaacaacatcatcatcagcaaccattgtttgttcatcagcaacagcaacaacaagctgcaatgggtgaagcttctgctgctagagttgggaattatcttccgggtcatcttaatttgcttgcttctttatccggtggatctcccgggtcggatcgaagagaggaagatccacgttaatggtttaagcccttttaggtttgagggcaaaatttggtatatatatttattatcttctcttctctattgttgtcattgtttctctatgtgtgtgttttagtgttgttagagattgatttggtttcagaatctctgcaagtgatttgagagttttcgttagctttaagtaagttaaagacggttgtttttgattagggttaaattagggtttaagaatctgttgtttttttggagggagatcgatttcttatcggatccaagattacttttaggaaaaaagggaaaatttcagaaaccacggtggtttcttttcctctttttttttttgtgtctgttttttttttccggtgaaacagagccgtcgattaaaatttcagatatatatttaaatgttttaatatggtttgttgttgttgttgctaattgtgtaatgtgttacaacaattgtggtgaagcatttgcgtaagctgttaaccacgtttatttctaataaatgtttcgaattcatattgttccttccttctctgcatttattgatacacaaaaagctttatgtgatagtgattgtttcgttgaaatcgaaccggatgatggatttttgaacagaatcataataatctcttatttttttagtggatatatgtatgaattgtggattttgagatgctatttatttttggcgtttcgcgtcttgatttaatgcaagaactgaacagaggatttagtaagaaaaagagacaaaccagttgtgtctgaattcttcaattttgttgcctttttgtttcatatgaatctttgtactgtgcttttggaagtttggtttgtcacgttagtcagagaaatattaaatttaagtactgttaaaactatatggcgacatgatatctttaaattaattgtctatatttttgttctagaaactgttacaatttgaaagattaaaggtgttagaattgtctcttctcttgtttgagattagctatctaaaaaaatgtgggtgatacactcgaacatgagttcaaatggttgttttaattttggcaaaaaccattttcactgttgtaataatttggactatcaaaaaagtaaattttattttaacccctgatatagtataatttcttatgcaaagtatatttaaggtacaaatagcatagattcaatgatttcgtttgtggttttcacagctatatatctgctgagtaatgtatttaaccaataatttatttatcacgataatacctgatgaataaatgtcaaagtgattagataggcttctttagactatttaggtcacactaaccaatcaaaagaatcaaacaaattttctcattaaaataagaatccattaatggaaagatcttaacaaaaagttggtgttttttctttcttaattaggtcttagtaattaacacttagctatataatgtaatgcaaataattataggtgggggatctttgtaatcaactcgtatcaataaaacatccgtaccttttattgtcgaatcatctaaatgaccccaacaccaataattgatatggtcccaattattttctaccgaaaaataatttctataggctggcaaataattcatatacgagtctttatttttcatatacatatttcgcattttggaccgacacatgtaaataaataaatagcctctcattcacctcactctactagctctgtgccgtgttaaattaaatgtactgtcaaatactttatggttcagaaaaaattgatgactaaacattatcatagagtatcaaaatttgattttcaaaactgactataaaaacaattttatagcaaaaataaaataaattttagttgtttcttttaaacgttaaagcatgttcattttttcctagttgcagattctacagtgatcaatttgggatctatattaattctatataagacccaaaacatgtaagaatattaattttatgtgttatttgtttagttacaaatgtaaaaatacgcaactaattaactatttcatttggttacatttttttataagtatgacaaaatataagcaaattaagtattgtttgaattataagcaaatatttttttgtttcaaattttttcaaaatataggtaaactattaaaaattgttttttgattcaattttgttttaatttttatttgaatcaaagcatacactattttcttctttaatcatttaaggcctcgaaaatgttagaaacagcttaaatgggccaatatgggccttatgacttcatctctaacgctgaagtctgaactccgcttaacgggccatcacacacttcgtctctaaccttttgaagaaagagtttgagcgcatcgcaaactcgaaggcgcgactgtgagagagaagaatggcgtcgtcatcatcgagaggagagatggagaagatgggaatcgatcagctaaaagctttgaaggagcaagcagatctggaagtgaatcttcttcaagatagtctcaacaacatccgtacagctaccgttcgtctcgatgccgccgccgcagctctcaacgatctctctcttcgacctcaaggttttgtttatttcacctctccttcttcaatttcagcgatggatgattataaaacaatttgaaaattgtaggtaagaagatgcttgtaccactgactgcttctctatacgtgcctgggacacttgatgaagctgataaggttttagttgatattggcactggttacttcattgaggtaatagaaaacttcaataagtaattggattattatgactttgttcttgtgtagctcaagtgttttgctgcatttttatgtagaaaacaatggatgatggaaaagattattgtcagaggaagatcaacttgctcaaatccaactttgatcaactttttgaggtaatatgtattcgcaattaggatcatttcactatcttagcaacttttaaaggcctgatttggtttttagatagattctgagtgaaagggaatatgtattcgaatgccagtgagtatgccttagaactgtacttttaggtattgaaggcctacacttttccttcatacggcttattgaatatgccttagaactgtccttttactgaaggataacacatttctcataacatttacgaaaattgtgaatgagcaaagtggataagattttttgaattgaatggagtctgattctgttactaggggtgaatctttgtggacttctttcactgacttgatccattgtataaaaatgtttgaggccttaaagttttatggaatgcaagtacgtagtcagaaagccctttggttgatcctttcctgcattgtcaaacactccctagtccctagagccatacatgatacactaagtagaggtctgagtattgttttcgtataaagcaaaattcaatgctatgatctcacgtttcctttccatttgcttcaatagttattgaaatcaagtgcatcattgccaaattgtttcaatactcttttattttgaaaaccctattgttactgctgtttatctcacctgagattttagttataaacttcaaaaatgttcattcaatgcaggtcgcagcgaaaaagaaaagcgtggcagatgaagctggaatggtcttgcaggccaaagttaaacagttaacagctgcaaccacgtcgtgaaaattattccttctctagtgctttttgctattgagactattttgagattgcaaatgattttgtctgatcagttatgttttgactcttttgatctcaatcggcttgtgtttagtgtgctagaagaatttgtgctgtaattttaagtaatcagtagtgactatgagaaagaaaagacgtgttaactagttatttctcataaaacgtgagaaaagagacaaaagcgatgatgttattggaggcaaaaacgatgatgttattgttgggggtagaaagagacaactgaatcaatgaactttaaatacaacttgttttgttgttttaagaaaagggatctttccgcagcgtattgctctttgagttttatcatctgtgatcagcaccaattgcttcatggatcgacttgaagccatccctttctaagcatttcaccagttcctcctattgcaacaacaagacatgaatattagtatcaatctgacctcaaaatacagcatatgtatgtttttgtgttctttatggggaaggagatacctttatttgtgggatgagggcaggtcctccataggcaaatcccgtgtacagctgaacaagagtagctccagctcttattttcttgtaagcatcctcaccactaaaaacacaaaagattcaccttaaatcattttcttgtgtttcttttgttcttacaactaaagcatcagaggtatgttcgacgtttacctactaaccccgccacagcctatcaatggaatctttccctaaggaagagaacatgaaaatatccaaaaacccatcagaaaaggttttagttcattggtcgattagtggatcatcttttttttaggataagaacttactcgtgtcaaagtgtacatatctctcaacatgttggtggagagagcaaagagcggtttcccgctcaaaccacctgtttctgttgccacggggttgttgcttacagcatcaggccttgagactgttgtatttgatatgatctataggaccaacaaagacagtatcatcatcatcatcgaaagcttttatgatttgcaacataccatacgtacaatcgaaaaaagagactattctaacactttaatcgcttttactacactacgttaaacagactggaggcttcattgattgacactgatgtaacataagttagttcataagaggataacttaccagcccatccaagtgcagagcaagagccacctacacaaaccaatacaatgttgtaagaaccaattacttgaaaactatagaatgtgttttagcttttttagtactacgtaccgctgcaatatcttcaagctctcctctggacagatcaggagcaatcttcacaagaagaggaggaggaccttcatcaccccattgcatctcatcccgagcagcttgaaccttctttacaaggtccttcaactgtttccttccttgaagcatgcgcagtcctgcagtattgggtgatgaaacattgatcacctgaagagaaaaatgaaaattaggaacaaagaattctacggtggattagatcaaattcatgttcgatatatcatggtaagaagtttgtaccaagtaatcagcatactgggataagttatgaactccttggacatagtcagcagcagcatcctcactcgtcttgttctttccaaggttgaccccaagaataccaggtccagattttccccctggttttacatcatcacttggagatgacgaagtagctgatgtttcagccaacattcttttaccatgttgagcacccaaccgctttgcaacgacaacaatcccttcgctattaaatccacacctattgataatagctctgggaggaccaaaatataagtcttttagtttaaactatcttgcttcttcaatcattgaaggtcttttatagattagagattctcacccttcttggcttagtctgaagatacgtggtttcggattgccttcttgtggaacaggagttacagagcctacctcaacaaagccaaatcccatccctagcagtccctcagtagcctcagcgtttttgtcaaatccagcagcaagcccaattgggtttgagaatttccttccccaaacttcaagtcccaagattgctggatcaggcctcttttctctaggtacccacccgcgagctgcagctgaaacagccagcttatgcgcaaactcagcatccagaagagcaaagaaaggattcacaacctttgttgcgttgaatagccacccactgtccaacacacaaaataggtaagaggtaaaaaacaaagtgacttcctcaaagtaactacaaggtagccttagcaatgtcaactaacaaagagaacaaaaagactaagtttcagggcacttattaagtaaagtaccagaaggttgcttcatctgcagtactaacataagctcctccagctatggccagaccaatggtagctcctgtcaatatccttccctataaattttcaaagtcaaacactttgctcttgtaaaatgaaatagcatcaatgatctaactctactacaccaattaatgtgccatattcagatcaaaacaagagttgcaactccttatcttaaggaataagattccaatatgattcgaataaaccaaaaatgagattaatttatcaataaattcatcaaagctactcactctcttggaaaaatgagggactttcggtgcagaagaagctccaggaaccgaagaacagttacgggtagctccaagaggattagacgaaacccttctgaacaaaaactctctcgcccatttcgccgacgacgtcgcagcccttccggccattaggtaagatgattaaatcgacagtggaatcaaacagagttcgaaaatggttgctttgaaatctataagaagagggttttagccttctagctcacggcttgaatcttgatagagagaaaaatatacgctttttgtttgttgttcggttacaaaggatcgtcagagtatttgctaaaacccttgcttccttcaggttgatctttccggttcgatttaccggtttaatgtagttaaccggggtaaaatcttatatgttaaccggtttgaaaagagattgataaggaaggccctttctctgaaaaagcgagaccaagagtgcgaagtagctctctgtctttcgaagcagaagtgagactttgacgacaacagtgggaggaactatgagttcttgtgttgtgacgacaagctgtttctatacaatttcagattctagtatacgtttgaaatcccccaagctcctcaatctggttcgtttctttgtgtgacatggaaattgctgtggttctgtttcacatgaatctatctcttttaagcactaaagctttcaaatttcgtttccttatagagtaaccagcagagaagacgctctcttaggtctcgaggtggtttaaaggttgaagcttactacggtctaaagacacctccttatccacttgtaagtgcaaataagactttggtatttgtatttggattctaagtgtagtaactatgtcttgcttctgtaatccaattctgttctcgactaagcacggaactgtagaaagtttgttaatttgggtgaattgtcttgtgagtataggaaagattgtgtcttgatctgtgtatcttctatcttgcaaagtagatgtgtcttgatctttagggccttggtgatatgtcaaagaagatggtatagttgagattctaattagagttaaaaacaaatgtgaataggatgctttggagccgtatatgagtagaagaacactagaagtgcattggggaaaacaccatcgaggttatgtagataatctgaataaacagttagggaaagatgatagactctatggatacaccatggaagagcttatcaaggctacatacaacaacgggaatcctttacccgagttcaacaacgctgcacaggtactttatattctaagtaacttgtacattatcacccgaggcacacactaatgttggaaggattgatgatgattatgttgttgtttaggtctataaccatgatttcttctgggagtcgatgcaacctggtggtggagacacgcctcaaaagggtgttcttgagcagattgataaggattttggttctttcacaaattttagagaaaagttcactaatgcagctcttactcagtttggttctggatgggtctggcttgtctgtgagaaacttgactagcttttcacttggtattaaactgtagaatgactttgaaaatggaaaattttgattctctttttgtttttttctggaaaatttcagtaaagagggaagagagaaggcttgaggtggtcaaaacctcaaacgccattaacccactcgtgtgggacgatattgtatgttagagttttattagttagttttcttgttgaacttaatgttacctcttgatcacatctcttttgttgttacagccaatcatctgcgtggatgtgtgggaggtacaccatctcctctcttctgtcattcttccaagaaacactttgaaacattttctaatatctttcgttttcttatcttactttgcagcactcttattatctggactacaaggtaaaaacctagcttaaattccgaccattctgtgttctttttgttcgttcaaaaggctaaatcagtgtttgtttctttctttctccggttgctagaacgacagggctaagtatataaacacatttctgaaccacttggtgtcgtggaacgctgccatgagtcggatggcccgtgcagaagcgtttgtgaatcttggtgaacccaacatcccaatcgcttaagctaaacacaactccttggaaacttgggcagtctcatttttgcaaacagaggtctcaagtcccaagtcccaaccaacaaaacaagagttgctttctgaatgtgacccatctttttgttctgtgtaatttagcgacagttttctcttcttttgccttttgagagactctctagctttaagatcatcagtgagccctgtatggtgacagtaatgttagtgacgcaattaacccttattaagttataataaaacgaaggctggctcacgtgacccgcacgtgactgagagtatccgtttcctcttctttcttttcttcttcttcttcttcttcttcgtctcctgacaatagggattgacaccatcgttcacttcaacgtaaaggtataaactttcttcctccttaacgtcaaagtttcacgcgatcgtctctgtggaactccctcagcatcgggtaattccctgattttcccaactcgctctcgcggaaactctcgatttcgattgggctcttgaggttctgttcatttcctcgtctatgaattttctacaattgattaggagtcgtgcccataactgcgtgagtaaaaagggaaaattttcttaaagataagcaatttcaagctttgtgttcgtgaaatttatccttgtatgaaacttgcaatgcgattgttgtgttggttggtgggttttctgtaaaatctcaatgttcatgtaggacctgggttttggcagattcagtgccataaagactgtagtgttagtcctcatattacatttgtatggttgctaaatggtcaaactgatactagtataactcagagattacaagatttatttggatcaagatcatatgtttccttgatgccaaaactaattcattgttaagattcataaaatcgagtatatagcgagttaacgtttacttgaatttcctcgttctttatcctttgtaggaggttatgcagttcttggatcccctgagatttgttgtcaaaaaccagcttccattactgatacactatgcctccgtctcattctcaggtctgttgtagttcttgaaacaaattatcataagctttgatcaaacaggaaagaaaacctcttataatctttcttgattgataaaaatgacagagatcttcagtgacaccagcatcagacagttatctcaaatgctactatcactaatcttcttccacatatccgaatacattctagccatcaccattcacggagcatcaaacgtaactcttagttcgcttttaatcaccaagcattacgctttagcaatgcttctgtcgcttctcgaatacctaacggagattatcctcttcccggggctgaaacaacactggtgggtcagcaactttggactcataatgatcatcgttggggaaatcatcaggaaggcagcgataataacagcgggaagatcgttcactcacctcataaagatcaactacgaagagcatcacgggcttgtgactcatggtgtgtatagactaatgaggcatccaagttactgcggttttctcatctggtcggtcgggacacaagttatgctctgtaaccccgtttcagcagttgcgttcgcggttgtcgtgtggcggttttttgctcagagaataccgtacgaggagtattttctgaatcagttttttggggtacagtatctagagtatgcagagagtgttgcctctggtgttccatttgtgaactgacacttgaattatttttgaacatatgagtttgatgtacttgacttgaggtcttaaagtcacaaaaacatacaagaccctctggctgaaagagaaggtcttgacgtggatatgaaatttaccacagcgttaattgtttatgtgacacctgtcaccggtgatgcatagctccggcgaagagtttcggagaacaagtttggtctttttaggggtttgagcagtggagtcggtaaccatgttatgcggaggctctcgcgcctccgtgcatttgtgggaccatcgtcatcctcctaggctcggtgctaaggttttgcggaaatcttcgttcatgctcagaccttgttcggctatatcgcagcagcggataaagtcgtcgtttaggtctcactgtaaaactccaagaaaaatcccagctcctctcgattgtttcaggtttttgaatctcgctgttgttttgattgtttttgtatccgaatctgattgttttatgtgaaatttcctgatgagctttaagatagagatttctgttagatgttcttcactatgttctactcaaattttcaaaattggagtctttactaaaatatttggctgtaattcttctttcaaagccagggagatgatcatcctgagctttcagctgaagggctttccccagttgcaggtatctgtttgtcattcaagtttcaactgccttccatcagtggccaacctttatatgacctttctggattatgaatttgttttgaatttgcaggaggcattgttgctctagggaagtttgatgccctgcatatcggtcatcgagagcttgcaattcaagctgcaagaattggtactccgtatctactgtcgtttgttggattggctgaagtacttggttggaagcctaggtaatttctccgtctaccttcccaattaacttaacatccccttgatctaagttacttataatcattagatcatgactctactgataaagttttttttttttaatctgtatgtgcttctcacttctattgaacagagcaccaatagtagccaaatgcgacagaaaacgagtgctttcctcttgggcatcgtattgtggtaacatagcaccggtagagtttgagattgaatttgccagcgttcgacaccttaacccacaacagtttgtcgagaagttgtcaagagagcttagagtctgcggagttgtggcaggtgaattccaaaagaacatctcaaaggttcccttctttctccgaaaattctcattctaagttcttttcctttaggcgaaaattacaggtttggataccgggcttctggtgacgcctctgaacttgtgaggttatgcaaagactttggtatcagcgcttacatcattaactccgtgatggataagaaccaagtctctgtaaacacagaggaggaggactcaaagtcgaaagaaagaggtcaagtctcatccacacgagtccgtcatgctctagctgcaggagatgtgaggtatgtaacagagctcctcggcagaccacacagggtcatctctcggacaagaacacaagatttaacgagcaaaagagggaggatctcgcttcagacatcttcgctactaaatttaccaccagggaatggagtttacaaagcatgctcgcttatagttggtgataagcatccaatttcgtgtaaggttattgtcgatacatcgaatctctatatagaaacagaggaagaacgtttccacaactcagatgagtctcaagagtttcaactcttagggattgagttcggttaattcacacattgataatcaaaagaataacatttccatttcaagataacgattaacaaagatgttaactttgactccattttggcaattacgttagcggtaatggatatttatgaaagttttggtttattattgaaaatagtgttaatatgactgaaaatgaaagccacacggtgatgagaaggtggaagaagacaagcaacaaaagtgggaagagtaattaaatgtctgtctctatctcaaagtcgttgactttcgttgttgagtgtctcttactgaccaaaccgccattagaagtgttctcaatgataagacgcatttctttgtaccaaatgtcaaatttcctgaattgcccatccaccgaacatggactcatttcagaaatgaggatctttgggtcattttctcaatatctggtgttgctttccttgtaccacacgatccttatagctcatcatctaatggccatttaatccgccagagaagaagaagaagaagaaaatagattagggtttttcattccagaatagccctaatccaaattcgaaatctttcttctgattttgatctttccgatcatgtcatcggtctgtgttaacgaagcattaaccgatgacgagctgagatgggtattgtcgagactagacagtgataaagataaggaagtgtttggtttggtctgcaagaggtggctaaatctgcagagtaccgaccggaagaagctagcggcacgtgctggtccacatatgctccgccgtctcgcttctaggttcactcaaatcgtcgaattggatttgtctcagtcaatttctaggtccttttatccaggagttactgattctgacctcgctgttatctctgagggattcaagtttctcagagttcttaatcttcacaactgtaaaggtatctacttttttgggttaaacaacagaaagagttccctttttgttttttttccaatctctctgggttccatttctgatttgatgaaacttgaatttgaaggattgttttctaagagagttcaggtgttaaattttgttctctggtgttttaagttttttgcttacttcaatgttgtttggattagtccctttgtgggtgatttttgctgtaatccatcagctttaaggggttttagtttgagagcgtcttaagaaacctgtcacaataagatttctatgattgagttcttctttggctcattctattggtatgaatgttatgtctgaattctctagggtcttagttttcacaaatagacctttcttgttggattttactgacatatgttgtggtgggtggaacaatcctaagctcagaattttgcttacctcttcatcttctgggaacaggtattacagatactggattggcctcaattggaaggtgtctttctttactgcagtttttggatgtatcatattgtagaaagctctcagataaaggattatcagctgttgcagaaggctgccatgatctaagggcattgcatttagcgggttgtcgtttcatcaccgatgaatcgttgaaatcactctctgagagatgccgtgatctcgaagctctggggctacaaggctgcaccaatatcactgattcaggtcttgctgatcttgtgaagggatgcagaaagataaaatctttagacattaataaatgtagcaatgttggagatgctggagtttcgagcgtggcgaaagcttgtgcatcttccctcaagacactcaaattgctggactgttacaaagtcgggaacgaatctatatcgtcgctggcgcagttttgcaagaatctggaaactctgataatcggtggatgcagagatatctctgacgaatctatcatgttactggcagattcctgtaaagacagtctcaagaacttgaggatggattggtgcttgaatatatctgactcttcccttagctgcattctcaagcagtgcaagaacttggaggctctagatattggttgctgtgaagaggtcacagacactgctttccgggatttagggagcgacgatgttttgggattgaaggttttaaaggttagcaactgcacgaagatcacagtaacagggataggcaagcttttggacaaatgcagttccctggagtatatagatgtaaggtctcttccacatgtgacagaagtgagatgcagtgaagctggtttggagttcccaaaatgttgtaaagttaacttttcaggtagtttaaccgagccagatgttctgctttgatcgttgctgttgggatctcgttacttgtctgttgggaaattctggtaaccctaaaccttctgtgatctctctatctgtctcgtgtatgggcacactcatagcttatagttcatcagtgagtcttctctcaagctcttgtatatttttgtgcattaaatatttggttgtagcggctgcttgattattcttcagttgctttgcaaagtgtgtgtagttgttgttgaacctgcttctccttaagagtaaaaaaaggtcagcacttgatatttgtaaactctgattctcaatgtactgatttcttaatacttgattcatcccattacacttcttttgacatagtttggtgcataaaagaactatgaattaaggttaacagatgagatcaactaaatatattcatctctttctcgtgtctacaatggaaaccaaagtgggtaaagcaaaaaaaaagaatttgtgagtttgtacaaacattctctgactgaaacaggggaaagtagaaatgaaatatttcttgttccacctgcactaattagctccgtcagagaaaaccactgcggtttattgctcatcattgtttagcgctttctcgagacagttgaaagctttctggtagctcacgaatcccatgaaccagaagtcgaagttatcgattgtgactatttcaaggtacttttgagatggcttctttgtgttctgactctggttcactccattgatcttgcacaatgggattgagactttgtagtgaaccctactgagaactccttgaggagaagcaaccttgatcgatctttcactgcaaaatgcaatcttctttgatgagatgaagaggaggcctgcgatgggacctgctgttgtggatagatagcattggtacgccttgaagagtttctcttgatcgcagaccttgaagagtcgcttataaatcttctctaagcctcccatttgaaggatcttagctcccaaggatagctttctcttgactgtttcagttagctttggtcctagtttgtcctgatctctagctccgtttgtgaagctatcggttttcttctttcgcagcatcgattttcctttgcctgtcaaatatgaaacctttgaagaagttgggatttggtggttgttgatggaagctgggtcaggcaagtaactcatcgtatcagtcttggctgcaggaaatgcaataacttgttggtgaactctgctcagtgtcatcttggaggattgagtagtgatcttgattcttgattttgtgaaagagaaagagagagagagattgtgagtgatggttgatgatgaaaccgtgtaagtgggaaggtatttaaagggaaaaacaaagagacaagaggcagttgaaacgaagctctgaattgagaccctttgtggtaaaggatgagtcatgtatgggtcatcaagccacctagataaagctactttcttttgtgggcatatgtactctgtttggcttaggtttacaactactaaatcctgttatgacacagttttgtctaaagtaaatttcagtaactgatgaaatgttttaggtttttgcttttgattttccaaataacaaaacaacttaggagtgcaaattaaaaggcctagttgcaatatatcttcttccattcctttaattcgaaattaagaagctatttacgaattgatgattcatcggtcaacaatggccttaatttcttaaaggttaaatcacatgctaaagttataatattagagatcccaaaaaaggaagtaaaaatgatcacacggaatgacgacatgacgttagactccgacaaactttattacctacaagttggcaaaatcttatgtgtatattttgttatgagtatgttttatttttggtcgatttgttaatgtaatagtgatgtatctacgtggaaatgacaatgcatggacgagcgtgcatggcagggccaacccatgtacatgcacgaatgtctggaatcctccagtgatgaccaaatatttcttttaggctaaggaaacaagtttctaacgtcatatttcagcacctttttattttcagttgatatacttttagtgtcaaattccatcacagatgtcggaatcaacatattaacgattacaggataaagtatttaattacagctttgaatgtgatccgtcatgccctactgatttattgactcttcttttgccctttctttgtagggcaaccttttttttgttttcactttttctttcacaaatcaaccatttttctcacaaagtcgttttttttgcttaatttttttttgtgtcgacatacatattcaatattgctcttataatatagtcaaaatatcttatccggccgacgacaaaggacatggaccccgatcaagatgaacagtatagtctagaaagcttgaatagtgtatgccggttataaatattatggttatgtatgtattaaattgatagttcctttaacaactttaatgcacaaaaagaacgataagttaaattgtttttagttatttctagttgttaagagcgatcataccatattttcttagaatagttagattctttctttgaattcaatgtctttataaacaactaccggccgatcgaaataattcgagtctcaacaactaactaatcattcctttatgcctttcataaatacatgtacctagcgattcataatcatctatacctaaatacaatgcccgctaaattttatcttgtaaacatatatacaccatgtgcatatcacatgggtgacgaattgatgaaacaacatctatactatatggtgggatccatttcaaatggatcttcttttttactttttatatataaaaaatcaaatataagctatatttcttatcttagcatgaactaaaagaaataaagacatcagaaagtcacaatgccaacgcggaaagctccaaagccacgacgttcccttctgcatgactcaatttgctctcatatattcaaaaagcgttacgtaatatattttgatttcattttttcttgtttcatgttccagttaattaggaaacatatcttatctcctatacatgtaaaagatatatgtgaaaaaaactaaaatcaggctaacaaaaaagaaggaaaagaaaagcttcatgttttgccaacttgtatgtaaaaaagctcgtcggatctaactctatcgtcatctctgtgatcatcttttttttcttactttgcttttgttttggtatctctaatatacaaaaagattttatgtttaagcgatcactttctggtgtgtgtagcaggctgaaaaaatggattattttagtgtgacaccaagtaaatatttgttttggacatgatgattatgcttgagaacaaacttgaaacaatggtaaaatctaaactaccgacaatgataaagaaagtaccaacaacatgttgagctaaaacatttcatcagttattgaacttagtttggaaataatatcacaaacaaggacttggtagttgtaaaacctttctttatatatctctcctttaactagaagatttttttatctcgcaaaagcaaaacaaagcatatgcttgatcttcttctatttgcttttaaccccaaagaaagtggctttttctctgtcttgatgacccatccatgactcatcctttaccacaaagatctcttatcaacgattcaatgctttgttttcaactgccacttgtttctttgtatttccctttaaataccttcccaccaacacggtttcatcatcaaccctcactcacaatttctctctctctctctcgttctcacaagatcaagaatatcaagaaacaagatcacttctcaatcctcgaagatgacattgagcagagttcatcaacaagttattgcatttcctgctgtcaatactgctccggtgggttacttgcctgatccagcttccatcaacaagcttcaaatcccaacttcttcaaaggtttcgatgcttcaaaagaagaaaaccgatagcttcacaaacggagcaagagatcaggacaagttaggacccaagctaaccgaaacagtaaagagaaagctatccttgggagctaagatccttcaaatgggaggcttagagaagatctataagcgactcttcaaggtctgcgataaagagaaactcttcaaggcgtaccaatgttacctatcgacaacagaaggttccattgcgggcctgctcttcatctcatcaaagaagattgccttctgtagcgaaagatcgatcaaggtgacttctcctcaaggagatctcactagggttcactacaaagtctcaatccccttgtgcaagatcaatggagtgaaccagagtcagaacacgaagaaaccatctcagaggtacctagaagtagtcacagtcgataactatgacttctggttcatgggattcgtgagctaccagaaagctttcaactgtctcgagaaagcgctaaacgaggatgagcaataaacggaggagctactaattagtgcatggtggaaaaagaaatatatcatttctattttcacctgtttcaatcagggaatgttaggagagaacctagtagagactgacaatattgtttgtacaaactcaattcttattttcattgtattttgctttttggtttctattgtagaaacgagaaagaaattaatatacttagccgatttcatcagttttccttaataaatagttttcttttgcaccaaattacatgtcaaaagaagtgtcatggtactacttatacgaaaagtaacaacgaaccacatatatgttgtctgttttgttaatatcagagatagtaacacagagacatgactctgaaataattaaaaattaccaagtcaagatttgtgttatttttagtttgaatttacaagtttcaatattgaatctggctcttatatttaatcactatttcttggcttacaagttacaatgaggcacagtagccctattcagtaacttagtctatacaacaaaattgagcggcataattagtagataatttatcgtccttcagtaatatttttttttttgtagatgattcgccatcactgttgattaacaatataattggattcttatactaatatattaagattgtttttgttcatctttgatttatttttgttcctccttctggagatttattgatggtttcttctctcaggggaagattgagataatgggtctcaaattttctaagatcaagattatgaaatggtcttatgtactcattacttatattttattcccatggtacatgttttttttctctgtattattcttcttttgttatattgtggtgtaaaaaaggacagtgaattgggaaaacagatgagatcaactaaatatattcaaatctcttgctcatgttaacgatgaagaacaaaagagatataagaaaagaaaaaaaatgagtttgtacaatattgtcaatggtttctagggcatttcctaacataatctgattgaagtaggttaaagtgaaatgaaatatttcctcttttacccacactaattagctcctcaatggaagcaatatatcttggcttatcattgcttgaagctaagagaaagcgcttgctcgaggcagttgaaagctttttggtagctcaagaatcccatgaaccagaagtcaaagccgtcgaccgtgactacttcaaggtacttctgagatggcttcgttgtgttttgactctggttcactccattgatcttgcacaaggggattgagactttgtagtgaaccctattgagctctccttgaggagaagccaccttgatcgatctttcgctgcagaatgcaattttctttgatgatatgaagagtaggccagcgatgggacctgcggttgtggataggtagcattggtacgccttgaagagtttctcttcatcgctgaccttaaagagtcgtttatagatcttctctaagcctcccatttgaaggatcctagctcccaaggatagttttctcttgactgtttcggttagctttggtcctaacttgtcctgatctctaactccgtttgtgaagctatcgtttttcttctttcgtagcatcgattttcctttgcctgttagaaaagaaaactttgaagaagttgggatttgaagcttgttgatggaagctggatcaggcaagtaacccgccggagaagtcttgacggcaggaaatgtaatgagttgttggtgaactctgctcaatgtcatcttggagaattgagtagtgatcttgattcttgattttgtgaaagagtaagagagagagattgtgagtgatggttgatgattaaccgtgtaagtgggaaggtatttaaagggaaagacaaagagacaagaggcagttgaaacaaaatacttaatcgttgagacttaagaacctttgtggtaaagtgatgagtcatgtatgggtcatcaagtcacatagataaagctactttctttggaggcatatactctgtttgccttctttttttaagggaaacaaaaccatttagacatgcatatagataaaggagaacataactaaagttttttgtaactaccaaatccgtgttatgacacaattttgtctaaagtaacttcagtaactaccgaaatgttccaaataataaaacaaatttaggagtaattaagaacgtctctatatatggatcttcttcaaatatcttgatattccttttcaatgtttctctttaaaatttgaaacttggaagatgccatttacaaaaattaatgatccattgatcgacataaaaactcaaatcacatttaaaagttgatttgagagatgcctaaataaaagatgatcacacggaatgacgttacactcctagcttttttacctagaagttggcaaaacatgccaagcttttaatatttagggtgattttagttttccacatatatatataggagataagatatgtttcctaattaaaagaaacatgcatgagacaagagaaataaaaaaatcaaaatattacgtaacacttgttgtgaatatgtgagagcaaattgagtcatgcagaaggggacgtcgtggctttgaagctttccgcgttggcattgtgtaaactttatgatgcctttattcttttattttcatgctaacttttaacaaagatcggttatacttgatttatataatatatacaaagcaataaagaagcaaaacaaatagttaaatagaaacacaaaaagaagatc

SEQ ID NO: 728 - DNA, 13186 bp, Arabidopsis thaliana
catttgaaatggatcccataaaatattagatgtagtaggatcaattcgtcacccatgtgatatgcacatacctatatagttaatggagatatattttagaacatgtatatactataaaactgagtggacattgtatttaaatgtagaagattgtaacttataaataggtatatgtatttatgaaaagcacagaggcgaacgattagatagttgtcaagacgtgaatgattcggtagttgttatagttgttagaatcaaagaaaggatatgtatgcattgtttgttcccaatgtggttaatcttcattgagagttgatcgaaaaaaaattatataataaattgtatatgtaattattctatcagtagttgaaatattttaataaaattaatatactatttgtgaaaaatataattatatactatctgaatttatcgttcaatgtttaatttgcattaccttaagcatcaatcatccattaaacgataataaccctgagaattgtcagttataataatgaaccatattgtttctagcatatcgcaaccatagagctatacagtcttcgtcacttttggggtccatgtccttagtcggataagatattttgactatattattatacgagcaaaatttaaattcatgagtcaaaaaatactttgttggcaaaatggttttgattggacaaacaaaagttacgcgaataaaagaagagtccatattggttggacaagaacggatcatattcaaatatgtaattaaatagtttatctaatcgttgatatatgatgggatttgacataaacaaagacgtaaaataaagggtcgaaattgtgatgtgggagacattttgccttagccttaaagaaagatttggtgattggaggatttctagggcttttctggcatgcaaatgggtttggccttgccatgcaccactgttctgactcctgtgcattgtcattccacgtattactataataccaaaataatattaaagacattcaaataaatataaatgaaaatattacttatcattataacaatattgtataatattttatcagaaatatagtgtaattgatgaattgtatttagtcaagtggttaactgttcacctttatagcttcctaatagtttgactctattaaatcacattattttgcaagtaaaaagaatttggttatggatcagattttgttaatctaatgatgctaaaaaaaaataggtagaatagtgctattacttttttctgaaaatgggcaatatattgattatgttcacatagactgaaaataacaatattaaatactattaaatatgccatattaagaaaaatattgaataatactttaaaaaattaatttgttaccaaaaaagaaaagaagaaaatttagctttttccccttggatttgtttttcattctcttcttagttttacattgatttatttctcacatttctgaaactctttgcttatatcttgaaattcccaaaaatatttataagaaagaaagtaaaaaaagaaaacttcattaacaaaatgaatgggagagttagaactaattttgagaggtttctcgaatgttcatctccacgtgtcccgattcaattttatactcaggtaacttatgtttaattgtttattttatcttatttttacataaaaattgttttaacgaacattctcgaatctaattttaaaaaatttctcgaacgttcatctccacgtgtctctgatcattattatattaatttaaagatatatttatttgtttttcccatcattttgtacaaaatgttgtttgaacaaacattctcaaatccaacaaaaataatctaattctttcacttacagaaatttgaagcaactaaaatttacaaaaataaaccatttttaagaagcaaagaacaattacattataaaaaaggtagaataaatcaaacccaccaacatatttcttcaactgcttttcttgggttaaattactctctggttaaaaccacgtttactgtattagatctcgtttcaattctctagatggattttcattttaagatcgatcttccttgtgctctggtaattttgattttccattctttgataataaacgaaaacgcattcgattggtcaaaagtctgaaagataatgccacagtggtaaaaagactaataaagtacgtttaattagtcgttgacattattaccaagatttgtatgctttctgcttttttattattacaagatcttagccaacattgactagtttgtatttaaaaccccatatctaatacttttcagcaacaatttttttttaaaatctgtcttttatattttaaatcataaaaagtaagtaaataaaagttagaaacatggggtaatttagattaaattatctttagcaagaaaaatttagattgagtaacaatatagagggtcagtttcaaatcattcagtaaggtggaatttgcaatgatgggttgattaagattaaattatcagttcaaagttaaacaaatggaaacaattggggtaccttttaagaaatttaaaacttatgtcttttaccgaatatatatatataactttattccaacccggtttaaggatccgaatagcgtagtcgggttataaatgtaaaccccaatttcaaaatctgttttgcaggcaaggggatcgtcttcttcttcaccaatagctttgggagctattgaagaagaagaagtgagaaagcctcgcatcgtcctcaatgatatttggtctgcctgtaaaaactggagcactgttggtatcgaagtccctctttcgctggaaaacttcgactccgatgttaaacagtactataatccttcactctccgccattcagatctttaccatcaaacccttctctgatgattcaaggttcaattttctgttttctctcaccaccattttgtgtcttattgcttcatgggtgacaatatttgatgtgaaagtttgtgcctttataacaaaggcctgatggcttaagagctagaaagtttatgccttttttttatttcctcaaggctcttatgtgtttgtttacattgctaacgttttcttcttgtttattattagaaatttggttattgtagtgtacttctttcaagtaatttgattatgaatgtaggagctctgccattgggatagatggtacagagacaggatctgctataactgactctgacagcaacggcaagcttcagtgtttggatgctggtgacttgggctacctttattttcaatataatgaggtagaaaggccatttgataggtttcctctcactttcaaggtatcttataattatctctatttcgttttttatgttggattgattctccaaattcattggttagtagagagtggtttttgtttacttgtctatgtattttgtagatggctgacctagctgaggagcacactggactgtctagtctgacgagttcagatctttctccaaatagctggatttcgatagcttggtatgtcgagttttctattatcttattcagttttagcttcttctttgattagttaattgctcaccgtgtgcccgtgagagatatttctatattagtccgtcatttcacatcaactttctttcatatgattcacacattcttcccatgatgtatgtatacatgatgttagttattgtcttcaaatgaattaacttaaacgtaaatcgtaactgagctaatgttgaataggaatatggaattattataggtatcccatttatccaattccaccagtgataggcgtggacgggatatctgccgctttcctaacgtaccatttattgaagccaaactttccaggtactttggtcatttgagaattaacattaccttttcaacccaagcgtatacggaagctatataatgtgcctgctaaattatcaagcatgtgcttttgagtattcaagtgttttgtatagtaatacttcgacatatttacacatataattccggtactgtgttcttgttaatttgtatgttacgttggcgaaatttatcgatattggttgatttctagtagtactttattcatgggagaatttaaggattatgattgtatttacttatttagggttctttatttaataagttattgaagagcagtaggtattcctagttggcgtagtaatgagttttcctttctgggagggatcgaactggtagaaaaaaataccgtgcaaaggtagttactagttggagatgttcttttcaagtctttactctatcacagtgtcgcttggatatagagaaaagttatgcatctgttttggtattaatttcttgtggattgtaagagatggagaagttgcatctttggcgcaacggtcttaccaatcctagccactattttctctgcataaaagtcttatctttagtttccaagtacttcttcctgtttgtacagacacttacttccttttagcctgagcttgattctattatcttagagcagactcagttctttagtaagtacaactagtcaaacttctctggtgatcgtattggtgttaaaatcataatctttttggttttataagcaagtgtttgattgatgacatttttcgtgtttcttagatctaaactagtttttttcttgtgatttctcagaaacaattggtaaggatgataaggggaatgaacaaggagagtcaagtacaccagaagttctacttcctccatttggagcaatgacttacaaggcctttggtaacctgtggatgatgcctgggacatcagattatcagaacagagagatgaatgaagaatctgctgactcgtggctgagaaaacgcggcttctcccacagcgatttcaacttctttatgtcccgtaagttttacggcggaccctattaatgccatcttgcaggtgaaatgctaagcctaacaatggagtcttatcatcataaaaaaacatttatgctgtaaaacattcccatctctctctctctctctctctctctctctctctctctctctctctctctctctctctccctctctctgactttggattctgctgttctttacttttgaggattatttttcttaaaatttgtcaagaggatggtttacttgctaatattgggggtcaacaaaatttaagactctattttataagattttcatctatttatctccaaacatttggtaagatgggtaaacggagggaatgaagtctggataatgcaattcctaacatgaccttcaataaaaatggtataatcggaaatgtttagccaaattcgacatctagtcgagttaattatttgtgacattactttgccaattgaagaacttgtttttgtcaaactgggtagttaaaagtcaaaaaacgagttagttcgtctcatatttatgaataaacccgaatcttacttaaaaaggggaaaaaaaaagaagaagaataaaaaattctaatatcaaaacaatatgtctagaaagagagacaatgcgtgtgagagaattgaaaagtgtcatttcttcttcttcttgctatcttcggctctaatgagctgaacaggagctgctggtaccctaaaccaccattctcttatccgcctctctagccggtcactactcgctttcctccacccaacttccctcgtgaaccactctacaaacgcaaccgttattaagtacttaacaggaacaaccgccaatataactgccacaaccacaagcgatatagccgttgtatctgtcgcctgaaaacatatcaaagagacaagagagttactattaactgcagacacctatttatcctagccatcatcatgttctgatatatcattatacctgaggaagaattgcaagggtaattgctcttattttgaggagaccaacgttaacagcttggattagcgactcgaactggctaattgcatcttgtagtacgagaagctgctccaccgcgtttttacttggtggagctttcacacgaacggtttttggttctttccctttgttgaattgcttacgccacatcattactatagctactaggagtaatattgacggtaatatgaaaccgatccacccactgcataaataacaagattgttggtgtcatcacatgtctttacgtaacaaatcaaaacatagctttctgtgatggaactctcatcattctttgtcatcatgtctttcaaggcaaaatcttacctgataatcatatagctgaccaagatcatgaacaccgttgatttataaggatcttgccaataggctaagcgatttatatgcaagcctagtttgatgaaaggtaacaatagctcctgcaatgagactatcggttaatagtaactatagagcaaagaaatggagaaaagatgaagaaggaactcatgataccttcataactgcaacgttagtgtcaattccttctactttcacttgttccacagtcgcctgagcagcttcagctctgtctgtgtctaggattgactgtttcagagctatctccaatggactcgtctccccaacacaaaaatctcctacgattgtcaattcttcacccatatttgtccctgtttctagattcaagccaaaatgctcaagcaatttgagtgagactggagataagtttgagggccatttcatatactgaacagaaccgatatcagaagcaacattagtggttatgcgagagacacggctggacagagcttctaagaccatatctccgccggggagactttctgccaggttaaatataagcaatgttttgtattgggaagagaagacttgaaaagcttcccttattgcacggtaccggaatatcccaaggattgctcttgcaagtatttctgatcgttgaatccctttaaagttgtatcttcgtatgaaccattgtacacgaaggatctccaggcaaattcccaaccagtagtctcgacgagcattgcctttaaactctgtaaattcaaaaaatactggctctggtctgtacaaacaaaacaagatagagcaaaagatataaatccattagaaaacagattttgtgaagaatcataaaagagacagacataagattgtagtccaatagcatacgtacactgtaattgatttatacataatggctttatcaaatatacgagcacccaatggccctgtcaactcaggtttgatgacctgttttgtgtcttcagtgagatcatatcgcatgggcttttcaccaccacccattgaatcaaaatatagagcacagttggtaagtgtcagtttacctacaaaaggaaatgtttgataaatattgagatggaaacaaaaccaaccaacgtaaaccacaattttcatgtttctccttttgcttaaggtattatataatgccaatgcagaaggttgactatatgcagagatctctccagaagttcaccaggccatgctgagatgcccacgtgtttaagaaccggtaaaacaggatttgcaccatccatatcaagcactatttctcccttggcaagctgaagattggcagctgaaggtcctagagtgctttttgcagccttgaaaattctacaaatatacgaagggcaaggaaaaaataagagaaaaaaccagatgttttgaggaaatagacatccgcaagaaatattgggcagaacatctctcagtggatttatttcattctaaattgaagccatgacatcgaaaaagattattcctgctttgagtaccattaactgagccacagaataattttttttttatcatcttcaacgttagcatttaatacataaattagcaagcaatacttttttgacgtattatgttgccagctaagggatcattaggtgtggttgaggtaagaataagtaaaacggatactagagatgtagacttaagtatttagagtaccaaaaaagaaatgtatcacctacgatttataacactaagacaattacgtgtaaacaaatgcagaaaagcaaattgaaggactgaaaaaagtagaggtaagttcatacttgtcaagtgtgcggaggtatttgtcatatacgatataatgaagcctgtggcctgacgagctagttagtgcatcaaaaagattatgtacagttattgcatctgcaatggcaggacaaaccggagcaattcttgcaaaagcctcctgtccgacagactttttttcatcaacctattaagtatatatttcaggggaaggtctgttaagtccgtccaattataactaatgcagaagtaaaggaagtcgaagatggtaataacctgcattgccatattagtgggacttgaatagaatagcgaccatccatcctcatcctctgagtcctgcttggagggagatgctgcatcctgaacttggcaaatttgagacaaataagatacaaagcataaatccatatatttccatttttaacactatgaacatggcaaattagaaagatttctcactttgttttcctgctcacttgtgacactgggagtctcccaagcaagcatcatgtcaaacattagctgacggaactcttgatcactcaagtaatcaggttttttcatcacttgatgaagtgcctgaaaagagcagaactctaaaaagttccttgcatatgtcaatagttgcttaacactctcaggcaactctacatcaaaatgatgctgcagatcttctgtttgaatgttcaggatcctacaattaccaaaaactaaatccatcaaaaaaaaaattcctaaattgctccagaacagtaaggaataatcacatcgcgtaaattccaaacaataaagattatgcaatcgcaagtagagacctaggatctgaatcatatatgaatctcgaaactgttcaataatatgaggattagagagagtgtactttgaacagcgggagacgacggaattggcgagaagagagagctgcggaataggtttcggggaagcgataggcgacggagaagcatctccatcacgaccagaggatgatttctttctctggaataacgatttcaaagaactctgatgcgtcttcatgaaattctccagcattccaactttcgcaccgccgccaccaccgtcttcttccatcggaaatcaccacaattaatcagattagatcagaatttggtaatcgtaaacctcgattgcttctccgattcagattcctttctttcccgatttgctttcttcctgtgcaagctttcacagactcctagtacgcaaactatcaactataatatctgttcagagagatctctcttatctgcacgctttcgcagttttcttcattattgagtgagaaaattaattgtttcgattttaattaacgaatagccattattaattaatgtctcgaatcaaaaccgaattaaaccgctcaattgttttatgaaaccgaaccaaaacccaactctgtaacattaaccgtttggtttaccaaattatcacagcataaagttagtttaaatggtgcaagcaaataaccaaaaatctcagctttttagtattaaaaaagaaagaacaatgttgatctacacgaccactgatcatggtcttctactcttcttttacattcttaaaagtgctgtctagagaaaagaatcaaaagaggagagactagcttctgatgctgactccattgttgttgatattctaaagcttggaattgccactgcgaggcgggtctttggcccagagaggagggatgattctatggtcttgcacaggaggctgctcttcctttttctcggtttctttttcgtcccctgtaactgatttagagaatgcatccggattggcattgatacagctttgcaatgctacaaatggattcacgcagtctgatccctgcaacaacaacaacacatccaatatccttgaatgaaacttctcttcgctaaatggcacaaaaaccatttaacgaaaacaacaactatcgccaatgtttatgattttttgagttgaggttacactatcctaaacaatctaatatgttcagtttgatccctgtaacaacattacaacaacaacaacacatccaatatctttgtgaaggttttcttctaaagggacacaaaacgtaaacgaaagagaaacaactgtcatcaatgtgtcaatcttagagcatttcagtggagtttacatcattctaaacaacctaatatgtttagttacggtttaccttttcttcagcagtgcttttgagaaagcaaaggaatgcctcggagaactgagacccgcaagagccattacgcaaatctgctatacaaggacaatcgagagctctctgtgctttggcttcaagagactgatggatttagtatttgtcagataactcggtaattcaaaaagaaaagctagcagatgactaaataacaacaaagttgaaggaataacctcattctcattatcatcttcaccatatgctgcagcttctgtgatattgaagagagtacaacaatgtcaaatatcccataatacataagtgtttcttagctttctttacaaaactagattagaagattatcttcctatagaaactacatagacaaagatttaagaatcttctttttaagcaagaacaagattttgaatagatactatatagagaaacgcaaattccatttcaccatttcatcattttttatcaatgatcattaatagaacaaaacaatcccaatttcccaaaacttttctatgcaacgaatagtgtaactctctcaatcgggatacagaaaacaccaacaaaaaaaaaaaaaaaacgaacctgcaagaagagaatccatcgatggcgacgaagtatcttcagaatcccgaggtgaattcgcagaaggaggaggagtgttcgttgtcgtcgtcgtcggaattgagttctcgtcactttgagcttgacccatctcgagaaatttctttcaaaaccctctggaagaatttgattagccgccgacgagaaagcagatccatccctcaaaagaaatgcgtcgacgcaatctgaatttcccaaaattgaaatcaaaagaaggcccagatggtcagacaagggccaggctttaaattttgttcagggtttattgggcttgaatttgaatttttccatattctagtctctctcttcttttcagaaaccagatgatcgcatctgtacgatgagacatttttcttatttgaatgaatgtaaaaatatattcaaccagaaaagactcgtgtacaatgaatatatcagtttgtttgaaagttatagaaatcaggtattaaaggtagagaatagaatttaaagagagtgttgcagtcttgttcatggagttgatcgggtagaaaaccacaaacttaggccatcatcataggctcatagcgatgatctcccaagtttttaataccgttgatgtggtttcgatcattcttttcgctaagtttaatgagccgagtctttggtgaaatttcaccatgtcttcttgtgtttctctcgcgccatatttggtatagagtcgcttggaagacgtatctgaacaagaaaaggttgagcttcaggatggttgtgttgttaagcagtgcaatcaattggccccagtatgtggaatagttgacgttaagtagtcgttgggctgaatccttccaaattacagcagcatatttacattgaaactatatacataataatctcttgattcttcagtgtttgtcacatagaataaagtccactcgctgtcccgagttccattgtttgatacggttttcgattgccaatctgttatgaattaagatattttatttattgtcaattagttttgaattgaaaactctaattttatattggtaccaaaatcttcgaagacaatattcctctaagatttaattatgatgagttaaagatcatcctagttattgtcaactaattttgtgattcctcaaagtttttccgttaatctttcaactattatgaatcgtcattggttacattttcttttttttttttttttttgtgcaaacattggttacattttctagatatttctttcttcaaatgaaccacaaagaaagaaaagttcaatttttcgtaacgataaaacaaacagcaaaaaagaagtaaaaagatttgaatcttaggttgtcaaagtgaaggtagggtcaaactttttaatataaaaccctgaaacacgaaaatggctttgcgaacccacattatcgacatatattaacaagtaacgactcccattatcatcaattctggctgtcaatatcgaaaccctttttttctaattcaaattttgaagacctttcgtaacttaattatagattaaggattagtgcatactatttcattaacttttgttggagatttttttagaaaactaatgaaaagattctaaataatataacgttctttttcctttttctaataatataatggttattgattttaaaatacaagataatgtttaaaattaagatagttagaacttttaattgaaacatttggtacttattttttagactttttaaagtactaacaataaattatttttgttgtaatttttcggacatgatttgtccttcctcatgtcgggttacgattttgtatgttggattccaactcatgcttagtcaaagaacgttcaagatattcactgctcctaacttgttttctagatattttgtgcgtaaagcatttgcttcatgaactttagtcctcgcatgttcactagtattaaaaaaacactgaagcttcttcggtcgatacttagtcaaaaactccatcaggttcaacaaatccagtttcaatatttgatgatagtataagcgatcgagttatgccatagatgtcttctttttctgtattggagatcgatactacctaccattggcaagttagtttggtatgtattcgtttagtgtctacccatttattctacaacacgacaacgagaaaagactgccttgacaatgttcttaatgtcaaattaaaattggactatgtgactagacgaataatcaagtttggacgataaagaggttgttagtttcgtaaatttggattatgcccatgcaaatgatactagtttaattttggtataattaccaaaaatatttgatgaaacaaaaaaattatattttaaaattattataaccatagaaacatattgcattccaaatcggaaaaaggttatagttctacatatatcatatatatcatc

SEQ ID NO: 729 - DNA, 42563 bp, Arabidopsis thaliana
aagcttgtaatcttggagtttgtaatagtaaataactcaaattcgatatgacttgtgtctaattcatgtgagttatatatacaatatgcttggttatgtcctacatggaccattcttacgtcaagccgcaattgacgcacttaaaatacacttgagagaaagaaaaacttaaacaaatcgaaatcaaagccttaccaacagcaaataaagttttcaaacaacaaacttgcccaagaaaaaaaaaagttttttaaacaaactctcatgaccaacattaagtttttgtttttcaacttagctactgttctctagatttggatcgacattatcatatctattgtcgccataacgaattgaacttgactataaaagtatcttactcctgtgagagaaaaaaaatacgtttatcaatcaaatatacaataccaaatgattagagctcatagtttagtttacactaagtaccgtagtacgtagacattttatgacggatacaaatatcatatatttagaaaagtaaattatgttttatacttgaaagtaaatatttattgagaaagtgagtaaagtaaatgtaaccttgatactaaattataaagaaatgttatggagtaaattttgaaattagagttacaaaatactaaaagttaaattaaaaattcttaaatgatcaagatcactttgaaatgcatcattttaagtcaacacaagctaaaaagtactaataatgacgtatgatgcgataaattatcaacagtgtagtgtcaagttgttaatgaattatttagagttgaattatcatttataacatattattggtgcatgacaaagttgtctttggtgaccacataattgatgggattgggagctgtgttattgtcgattacaaaaataaactttgttgtttttatagcaatgcaattagaacaaaattgctataatactaaagagtttgtttacttttgaggaaaaaggtcaagaaattgagaatgatggttttaaatccttgagttgcatatttttcgacgacccatatctaatgttttaatttccatcttgatttgtcttataacaatatcaaagttgattaaacaacaagtttccaaaattagcatcactataaaaaaagagtattcaaatgactttgattgcagcacaaaattttcaacgacccatctccaatttttttaaaaaaatccatcttaatttttcatataatatatgaaagtagatttatctcaaatcaacaggttggcaaaatgaacatcgctaatattcaacaatcaaatagtatactcctatctcaaccccatcctcaaatgctaaaaaggtttggtgttcgctggttcaatacatttatcatgctaattcaaaaatgatcaagagtgtatttaatagaaatcgatagttcaaccaacataacaaactatttaaattataattatcgtctattaattttcttttaagacttaaaataatctttatcaatttttatcaatatcatccacaagtgtaagactatattcaataacatatttcaaaagtcgattgaaaaaacattacaaactttaatatgagacaactttatttaaaaattatcatatgatgaattgtttattgatgatcacttttattatgagacaaatagtggcctatatcacgaattcacatgaatttattaatgatgctctctcttgagagcttgaaacaaaaagaagaatcagaagaatggttataaacgttagtaaaaaaatgtaaaacaaagtttttcaaactgatttgcgctccaacgttcgaaaacaaaattgggatcctcgtgaattcatccaacggtcacaattctccatgtgaatctcttcaagaccttttgtgtaaaaaaattcaaatcaaaattattctctttttcaccactgcttataagtaaaggttgataaatttttcaagatccaaccaaaagagagacttattccaccaattcctattttttttttttgattaaagcgaaaagaaaataactttttgcagctcttttctttttttgtgatatcattataataccttcctgtctaagtgaaggtacaataataaaacagtttctgttcactctactttatcccaattcgagccaaagttaactcttgtcagatccttttgtctgaacaaaataaaaatcttatttttaaccatttttccgtttaaactgatcaaatcccaaaatgcaaaacctgaaatgggttttgatgaatctcttgtttgtttctgctcttgttcgtaattttgttctttcatcatcacaacaagtaatctgttcaagccaagacagagcaacacttctgggtttcaagtcaagcatcatcgaggacacaacaggagttcttgattcatgggttggtaaagattgttgcaatggagattgggaaggtgttcaatgcaatccagccaccggaaaagtcaccggcttggtgttacaatccgccgtgaacgagcctactctctacatgaaaggcacattatcaccttctttgggtaatctccgatctcttgagcttttgctgattactggaaacaaattcatcactggttcaatccccaacagcttctctaatctgaccagtcttcgtcagctcatactcgatgataattctctccaaggcaatgttctttcttctttaggccatcttccattgttggagattctctctttagctgggaatcgcttctcaggtcttgtcccggcgagttttggaagcttgagacgtcttactacgatgaatttggctcgaaactctttctctggtccaatcccagtgactttcaagaacctcctcaaacttgagaatcttgatctcagctccaatttgttatctggaccaatcccagatttcataggccagtttcagaatttaaccaatctttatctctccagcaacagattctccggggtgttaccagtttctgtttacagcttaaggaagcttcaaaccatgtcgttggagcgtaatggtctaaccggaccactctcagatcgattcagctatttgaagtcactcactagccttcagctaagcggcaacaagttcatcggtcacattccagcatccattacaggactgcagaatctttggtctctcaacctctcaagaaacctgttctctgatcctctgcctgttgttggagccagagggttcccttctctactgtccattgatctttcctacaacaaccttaatcttggagcaattccaagctggatcagagacaagcaactctcagatatcaacttagctggttgcaaactgagaggaacctttccaaagctaacaagaccaaccaccttgacgtcgctagatttgtctgacaactttctcacaggtgatgtttcagctttccttacaagtttgaccaatgttcagaaagtgaagctctcaaagaaccagctcaggttcgatctctccaagctgaagttgccagaaggagtcgcgtctattgatctgagttcaaatctagtgaccgggtccctttcaagcctgataaacaacaagacaagcagtttcttggaagagatccatctcaccaacaaccaaatctcagggaggattccagatttcggagaaagcttgaacctgaaagttctcaacataggaagcaacaaaatcagtggacaaatcccaagttcaatatcaaaccttgttgaacttgtgagactagacatctcaaggaatcacataacaggaggcatacctcaagctataggacagctagcacagctcaaatggcttgatctctcgatcaatgcacttacaggaaggatcccggatagcttattgaacatcaagacgatcaaacatgcgagtttcagagccaacagattgtgtggacagattccacaaggaagaccattcaacatctttcctgcagctgcttatctgcataacctttgcttgtgtggtaagccattaccagcttgtaggaagacaatgaagtgaaaaccaaacacaagttctcaagtggccagtccaacgctgacttttatcttaatcccctattacttttacgtcatttcttcaaaaaaaatagatgatatcttctatttgtcttttttactcttttcttacaattctattgtttcaatctgattctgttttcatctaaataaattattatcatttttaatcaaccagcaaaacacaaaggatagaaagaggacagcccataaattatgaagaaaataaaacataattcctcattagcataattgttctccagtgacatgttatattcagccttaagttgagcagctttaaccagataaactttcttcttctaaatgatcaaagaacacaaacaagagtgacaaacgcagtaaacaaatcacaatgaaacttatttcttgctcgtggaatcgattcgattataatgggttttaagagactctcgttgagaagaaaaaggagcaaattaagagggaaagaaactaaacttgttttcttcttatagtagttataacataaatgggccaaacctacgtactaatgtcaactcgtatgggcttttaagcccatattcgtatcagtctgtttttgtatactaccttaaatccatttcaataagattaaagaccccccaagaacaactgaacaagcataactaacatatttagtagtcgtcacccaaaatctttacttttttacttgagctactttgttgtggtcaattgtcatcatctgtttccttaacttcattgtcctcagcatcatcagaatcatcagcttgttcctccacggtatcctcatcctcatcctgaaaaaatcatcatcttaacactcaaagatgtaatagaaaggataaataaaggacaagccattgactatgaaactcctacttcctcatcagcagctttatcgagataatctttcttctcctaaatgaccaaagaagacagagtaagaagaagagacagtaaacaaatcacaccatgaaacttaactaatgaagaaacaactcacatcctcagtcatagacttccacatttcccaaccgatctttgaaccctacaaatcatatatatatatacatagcaaagtttagtaaaatctcataaacactaaacatagtagtagtcaaagcatagcaataagctcagtttaaaaagtcttacttctttcaccaatgcaccattataatctgttctaaaagatttacggaaatgattcctgcaaagtgaaagggcaacatccatcaacatcatccctaaagaagagtaagtgttaaacaatgaacaacaacattacatgaagacagcaaaatcggtaagagatgttgttgacttcttcctgaaaacaaacacacacacacaataacatgagggattcaaaatcaccatatagaaacaatacaatcaagtcataggtaaggcttaaaaaaggagctttttttttttacttgtttgtaggtttcttcttagcctgagtttgtgtcccaaaacctcgagctgctgtacaaccaaatccatagagattatgaaaacacaaaaacagggaaaagaggggaaaaaacgaaagagataatgattagattacccagagtcctatggaacatagcataacaaatgtgcatccttacaagctctacaggtattttcttgttacagtctacgtcttcactgaattttcaacaacaaaaaaaaaacaaaaacttgtgagaagccctagaaatcccaatcgctaaatctttgtaacaaaaccctaattcgaacaaaattagaaacacaaatccgatttcaaaaaagttttcaacgaagaagaagaaatcaccagcgagcgaaaatactgctatcctcagacgatgcgccggacatatcttactctcttctcggtctcgtaagatccacgaaaagagaaatgtttcctcactcgaggaatcgatttgatgacaagcaagggtttagagacttcccctctctctgctggggagaagaaaaagaaagtaaaaatggagactttggaaaaaaggagtaaattttttacctttttcttaccattctgttattttattttattgtcctttgttaaaataacatttgtttttttataggacaaaaatgcctctttgatttgatttactgttgggcaaaatatttgttggattcgcttccatctactattcgactcgatttgatttagaaaaaatcgtatatctgtaaatttatgaaacaaatcaaatactaaaaatagatattcgttttttcttacttaaatcttctcaactagatgtttgatagtcaccatatgacattcttttttctatgaatgtaaagatttgtaagactttgaaaattttagataatataacaacttgtaaaataagattagtggatatggatgtgaaaccagtagcgtaagccgccttcataatcatgtaatctcaacaatgtcattgtgcttggtcaaccatgaacactcttatcgataaatccaatgagtttagagggtcgtgttggagcctcaccatgacgtctcatgtttccttctcaccatatactatcatctttagcgtgacgtaatgtagtcgtagaggtgttgctgctattttccacttggactctcttcctcggctttgctgcatttgaattcgtccaaggactagccatatcttcactttatatgacttgtttatattctgcctttagttgagcagctttatccaaataaactttcttctcctaaatggtcagagaacacgaaccatagtaagaagacagtaaacaaatcaccataaaactaatgaagaaacaagaaattaaataaagcaactcagagcaagaccattggtaagtccttataaaggaatccttacatttgtataataataaattttgaaaattttaaagtttagagtttttgtagagtctttacattttttactgtccagtggtagaatccttaagtgaattttttttttaaaaaaaaccagtcattttggatgaagaacttgccattttggatgaactagtattttgatgaaattaaataggttttagctttgtattggagtttgtgtactttacttgttcggtttcttcattctatttacttgaggtgtgtgtgattatttctacttttgggtttgttgacatatgtcataactcagtggcttctcttttggatgttatgtgttcgcatgcttcagagaagccttttggtacgtcaaaatcaaatgctacatggtcatgtaacaaggagtaagtatattatagaaggatctcatacagcaaacccattaacatcattacattaatatctaaagcgtacaacaatcactaatttactatgtacacacgcttctgtcataagagtttggaatgtgacagatacataaccacaaaccaaatgaataaggaaagagtctttacagatccgagtcttgccagctagccaagcagagttcatgtaattcattgagtatccattcctcaccattgtgaccaccaaggaccaatactctagttcctccaacaacgcatgtgctatgtccccaagctaacttgggtggtttccctgggacattcaggatcctccatgacggtttctcttttgaaggatctattaggaatagttgcgaaggagagtgaagccctgcaatagaccctctaagatgatgaccctaccacacggcattctcacaaccacattaaagacttgcacaaacctgaatgttgaaaagatgagaaaggtaacatcttgagataccaaaggcctaagaaaaagaagcacttgcctcaacaagtctcaccttcaacagattccatctcgtgtttggtttcccaatcacctagaagaccaagtaacaccattttccattagttgatacatcttttcagaggaatttcatcgaacacattcaagtcacaaaccacagcagatatcaaaaataagaaatttttgaaaaccacacaaagtgtaatgatgagatggaattgttacctcctcagacaatgttgaggccgaagaagaggaggatacgaaaaagatcacaacctagacccgttttgtcaggacaattgatggttataacactcgggtcaccttctttctccgattgactgattatcactacgttgtccgaaaaattcccatcttgtgattgtgatttattcttgctttaagctctaattgtgatttcttcctcaaaactatcttattaatcttctctctccgatttggttcatcaaaatcgccgattatgttcgaagtcacagatgttgagaccgtcggttgagatgatgatcacggcggaagggggacgattttcttcggttatcttctccaatttgatgatgtggacgccgcatgaagctgatcgagagagaattcatccggagaaaacaagagaagagagacaatgatttcgcaaacagaggaaagaaaaaaaattgttttgtctcttaccttacccaatgggaaaccaccacgtatacgcacctaaaacatcacaaaatacctaagctaaggtgcgtaccttgattaatttcatttttctgatttaattttggcttctttttgtaaggattcagtactagaaactcttaaggaccctccaatggaggtggtctcacatccttagtcatagagttccactgttcaacaccgaactttgcaacctacaatagcacagtttagtaaatcacataaacactaaacatagtagtcaaagcatagcaatgagcaaagttaaaagtcatacatccttaatgagagtaccaagataatcttgtctaaaagatttacggaaaccattcctgcaaagtgaaagagcaacatccatcagcatcatccctaaagagtatacaacttatatcaacaaaaagtaagtatgaaacgatgaacattacatgaagatacagaaggcggtaagaggtggcttggcctttctacgcctcattggttcatgttcatcagattctgtctcaacatctgaagcttctgaacaacaaacacaacaaccaaatccacagagattatgataacactgaaaacacaaaatacagtaaggaggggaaacaacaaaagagatgatgattacctggatactccgaacaaaaaatcaaggctacacatgtgaatgcttataagctctacatgaactttctggttacatttttcactgaattttcaacccaaaaaaaaagttgtgagaagccttggaaatcccaatcggtaaaccctaaaccgaacaaaaattcgactgaaaatagatccaaagaagaagaaatcaccagcgagtgaagatagcactgccatctttagaggtgttgctgctactttccgtttcgcctgacatatcttacttttctctgtcttctgagagaattctgactccagcaagggttaggatttttattcgatgacaagggttttatagactctggtggaaggaaaaaaaaaagtaaatttgttgaaattaaaaaagatttgcgtaatgcgtgggctacaagaaagtggtataaaatagttgtgactccgaaatattcgttaactgtatggttgtgaaccgactaaatatgggcgataaaatgtgtgcttggatgtgggtgtggatgctagatgtgtttttctgtcaagatcctatggagactccgaaatatcatgttgttactcatcacagatatgggaagtgatatctcaaagcatcttagctcatcgctatacacatgttcagtgtaattctctccttaatctccgactctacatacagccacacacctcgttttcgtttgaggtatgtatatccatgtaaatcataagctctagcctcttctataaccgtaaaattggctttagctgcttcagttctttttaatgctaaggtagagttgaattacgcagctgtttcttgccagatagagtcaacgttaggcaagaattcctccattgatgggttagccattagtaaacttgaaagtgatagacctacatccacacctgcgtcaatcagacaatacaaagaagggaagatctgcatctgatcatcattaatataggaatattttatacccaaccagcaaaacacacaagtcacaagcaaaggattcgaaaccaaacgtgacttttaagtctacagcattagtaaaacgaaaaacatagcttcattacttgtttaaacaaaaggcattaccatttcagtgaactacaaaaaacccacttgctcacaacttaacttcaaataaactactttcactaataaaggcttcatttacaatgcatcgcaacgattagagataaaccgatttcagtaagactagaaccacaaaaacgagcatatcatttctagtagtcatccaaaatctcttcttcctcctcttctttaccctcagcttctttcttgtcatcatctgtgttctcaacttctttctcctcaacttcatcatcatcgtcaacttgtttctcctcagcatcatcaacatcatcagattgcttctcctcatcttcctcctgaaaaagtcatcgaatcatctcaacactaaagatttcatttagtaagtgaaacactgcccattaattatgaaacacatacttcctcatcagcatcattactttccagtgacttgttatactctgccttaagttcagcagctttatccagataaactttcttctcctaaatgatcaaagaacacaaaccagagtaagaacacagtaaacaaatcaccatgacactaatgaagaaacacgaaaataaaacaactcacttcctcagtcaaagacttccacttctcaccaccgatctttgcagcctacaatcatatatatacatagcccagattagtaaatctcataaacactaaacatagtactcaaatcatagtaatgagctcggttcaagtcttacatccttagctaacgaaccattatgctctgacttaaacgttttacggaagtcactcctgtaaagtaaaaggttaacatcagcatcaaccctagagactatatcacaatctaaaaaaagcaagtatgaacaaaaaacattacatgaagataaagaaagcggtaagaggtcgcttgggcttgtttgaagtagacgagctcttcttctcatcattggttttcttaagtctctttggcttaggtccatcagatgttgtcttcttcctggaacaaaaacaaacattcaaataattcaatatcacatacagaaactatacaatcaagtcttgacgagtcttacttctctgcaggcttcttcttagcctctgcttgtgtctccacaacttgtgcttctgaacaacaacaacaacaacaaccaaatacacagagactatgagacgatgaaacacacaatacaataagaaggggggaaaaccaaagagatgattaccgagattcactctgatcttagcatcgagactgcaattgtgcatgcttataagcgctacagctacactcttgttacatccttcactgtaatcgattcaatccacagaaaacttatgagaaacccaatcgttaaagctgtaaaaccctaataaatctgaaataaaaacctagatctctaaattcgaaacagaatattccgtcgattcaacagattaagcaagtagaactcaccagagagcgaaagcgcttccgtctttagcgcgacgtaaggtagtagaagtgttgctgctagtctcggcttcgactctcttcctctgctttggtgcgtttgaagttgtcgatggtccagccatttcttcctttttctcggttaagatcgaaaatatctgtgaatatttttcgtgttcgagaattcgattcgatgagaaacgtttgagagactcggtggagaagaaaagggaggaaaatgagagggaaacgaaacttgttttctcagttatggcgccaatctgatcccgcgatactgtgtttttaggctttgacacggattgttgacgtggcgttctaatccaccgttggtattgtataaagcgaataaacggtctagatctggatatgatgttcgcgtcccatttattcgcggtttttctttgtttagatgggctttaggttttgaggcccattataggcttaaatattattataaccaaaattaatccggcccgatataaatatttttccacataattagaaaatgattgatttaaagtaaagaatagtaaaaagttgataacggtaaaagtgaaaaaaggctataaggaagatagagataggcatgtgggtgtggtgcagagaggtgagaagacttttgaagggttttagggtgatgggaaggtgaaatataagcagttctctcgcttactgtgccaccaccaccaccaacgtcagagaatctcagctcctatactcttctcttctctctctttcaaatctctttttttttaactcattttctatacatttttacaaatttcagagtaatagtattatctgattgtagttacgtctataatccaagttatgatggatggatttggggaatatctaatagttaaactgtttaaactctatcttcttcttctttgttttttggtgttttgtgttgtttgtcttacttatactaactttcactctctccaatatgataatcattgggagattatggaataactttcttacctccagcagaatataaataaatttaacacaatttaatactatctttttttgttttttgttcaacgcatacaatttaaaatcataaacacatctctccatcaaagaagtaaaacgatagtttgatatatctcatacacttaaacattagcctaagagaagatgatgattaacttaaacaaaagttgttaaatagtaacctaatacatagaagaataacaacaacccaagaaagatacatatttcacaaagttgataaaagaaaccaacaagaggacatgcataaatatagaatgttgttcttttttttctgttaaagagagtcgaagttaagagaatagctgagaggatcgtagttgaaactgacgtgtctcttattcttcttgtgtattggtgatgatctcatgttcttcttcatcttcttaatctcggctttgattctccataaaatgctctttatcagcttcttcttcttcttccctagctccattaccattatgcatcccattgcttttttggtcgaaagttagaattgagagagatagagagcaaaggactagagagtgaataaagtcaaaatgtggttatgcaataaaactaaggagaaggaagaagactacttataaaaagaaagcagtatctctgtctttgttgttagagctgtaccaagaggagaagtgatgttgacctctcacttttatatttttttatatcagttatgattatccatatacacgtgtatagcttttatctataatcttctagttgttggatttttaaccgtccaataagttactaatccacaaaacagcgattaaaacaagcaacatagaagaagccattggaaaaattgagacgcatgcggcgatttgaatagttactaatccaccaagtactatttgcttcttttttttcaaccaaaattttctttcggtttcaagagttttaagatttacagaatcaatgtaattgttgaacaactatctcatatctcttacattagattaagggaacaaacccactaagagggtgtattcaaaatcacgaagaatagaactcatgtggttaaacacatcttttcttatagaaaaatttcgcattttgaaatggtaaagttggtaaagttggaagtagaccaccaaacaataaactctttatgaaatttatccactacaactatatgaaccattatcaaatatgctcgcggagacgaccatgattaaatttcatccctaacaatcttatacaatatactaacaaggctacatatacacaaattaaaagatagtttgataagggactaacactagttgataaaaacatacgagtattcaacaataatgcgataaaaaaaaaaaaaaaaaaatggaggagagaatctaaaactacaaaaagagacaaacgaaaatgaacagtttggtctcgagaaaaaagggagggtacgtagaaggtgaagaagagtaagtttgtacagcagaagcttgtttggtcgtggtctcttaacgtaaacgcagagcagaggcatgggataatgctagctacttcactgtcaattttcacatctccctttttttatattttattattgtagagaaataaaaattattttgttaggtagttgatgacaattccgttacatggttttggcaatttcgttttctcaagaaaactctagtctgttggatttattgcagtttttgcagattttctctattctcttttattacttcttgtgttttttgttttattatgtctctactttcgacaagtttatctttcttcttcctcttctttaaatgtgtaatgcagtacatttgatttggcctctatcacctacctcaatggatcttttgttaacagattgcattaatggtggttgagttcatttttcatggtttaagtaataaaaatacttaaacaaaggccaaggaaatactattttgtgaaaaatgatccaataaactaggcctgggcaaaaaaaccgctaaccgattaaccgaaccgaaccgaaccgaaaaacatggtccggtttgggtttggatagcttaaaataactggctggatattatatgtcttagatttcggtttcggtttcggttaggttcgtaaccgataaccaaaggataaccaaagcatatatgtatgatagataatatatcacatatattgtatgtattaacacttaactatgtttttctctttattagtttgcaagttgaatttcgtgagttgtgaataaggtgttttaatattatggagagtatggaccatctttgtgagttgtgaatatttcttttttttacgtacgttctatatcggtattggtcaaaaattttggttgttttggtttttagtcggttatttcggttttagtttatttatggttaccaagtttaatatccaaaccgaaccgaaccgaaagatatccgaaccgaaccaaaattcttcaaatatccaaatggttcttatattactataaccgaaataaccgaaaccatgcgcaaccgaagcgaaaccgaatggttaaccgaatgcctacaataaacattgttcatgacaccttttttatttgcttttctgtgtgttttacgaattttagtatgaagaattcatttccatttttgctctttttggctcataattaataacgaagaacataagattgaacaacgacatgaagaaatccaagaaaccgcgaaaaacctctattcatgtttcgagagaacactgaacatgtctctttcagacgagtagaaactcaagcagtactctcataagaacaatacacagcccaatggctctctctctttctctctgtccctctctactacacaccaaaattagaacaatgcagacaaagattagtgaccagaagcagctaacttgggaggatttttgccttccaactcttttggttaacttagtaagtatcagcctttagtttttgttagactccctttggaaccaaatccacatcaaaaagcagatggttggggacttgggatgatgcaggttcttccacgaggaagacgggcttttgctctgcgtttttgtccagggttgtaagactcatagttattatgatgaaacttcctgaaatgctaggttgagttcgagcacagacttggccaccaaacctcctcttctacacaaattccatcacataatcatttgagccacatagattcttacacaattaatgagaattatggattcttcagacgtttaccttgctagagagggaaggcatgctttgactttctctagctctacaaagcaacggctgtagcgctcgatcctatattgcagtaaacatgtgttgttgagttccaagagagtatgctatcaaatttatcacgcacaatggcttatagatatgcacataaggttaaaaacatgcaaacctttgctcagcctcgatatctacaccaacagatgctggagctgacagtgatgagtaaattggtgacccatacagtctgacaagcttcagcagcaaatccagggaaacgctcaaatgcctaaatataagatatggtgtagcaaacactgtgagaacaaatcaagaattcttagtctaatgtactatatctatgaccataaagatcaagcctattaatgcatccatgaggcatgataagtttagaaagacgactctgccattttttaaaaatcagaaaagcgagttcttactgatccatgccgctccctaaaagagctgttagaaggggaagaagggaggtacaattatccagtgtcaaaatctcatttctctcggttattatacccagtacgtccgcagtaacctgtaaccaatgaataagaagattggcgtgagcagataatctttttcatatatcctgctactgatacaaaaagaagatacttacagcattatcagccatcttctctatcgagcctatcgaattttttacatcattcctttcccaatatctacgaactacctgcaaatttggtgaatcaatttaggacagaataaatcaggagtctttccaatccctaactctttgcgaagcttctgacatctcaaccacctataaaatccaccaacataagtaaacaaggaccaaaattttcaataagcagaagaggagaaccatgtccagcgtttcactcccagctaaaacatgccaagtgttgaaatagtaattctacgcatgctaagtggtcgtgcataagcatatgaaaactctaataagtattcaaggtactagtctaattagggctaagccaacaaaattgtcacaacgtgactggtttcacgttacctgtaacttagccaaacgagactgcatagagctgacaaattgattgtgctttcccattatgtcttcaacaatattttcttcagaaggagaatcgatcccttgttcaactggcatatggttccctctctgcttgaactatatgaaaggaaatacaatatctattatctctggatctcagaggaacatgagcaaaagcatgactagatgtgtagttgaaaattactaaatcacaaaatattatgtctattaagatgttatgaaggcagtaccatttgaaattgtataaatcaaatgcattaatttcctctttgtccgtaactttctaactttcctcttttgtggcaatttacagtcagtgtgttattgcctcaagatctcaagttgaaaatagtaaggctattataccatatttgaagggcggatgtttggagcaggcatatttccacttgaaaaatttgaaacaggaccctcgaagtttgaaaatcttcctctcctctccctatttatgacgagtgactggaatcttcctgatatgataagacacatgaatgagattcgcttcatttgcaaaagaaaagatgaaagctgggctgaagaatcacctcctttctgactttcagtggggcttgggtctctatttgatctgtggcttaccaagtcatctgaaacaatgactaaagcttagaactgagaatatcatctatcaaactcaacacaggtacgtcatagcaaccaataatcttaaacacatgattctttccactatttgcatgtttcactggagcaacttcataatattaaccctacaggccacattttaggggccaaggtagtgtaagactaccagctgacattcatattagcactgaaacaggcaaatattcaaaaggacaaaaacatacagttttcatcgtggtttcgtggaggtgaccccatccgtgaccttgaattactcctgccatatctcttgtatctaaaatcattaatgcttcgctcagttgcaccccgcatgccaacctttccaccaggaagtgtacccccatctggtatattatttggttcaactggctgagactcagacatttcaagaaccgaagcgtctggcagatcagggttatttctgctgctaggtgaccttcgggaatcagccgcctgcaatgaatacggcatggttcttgcaattatgtcaagttctgctctggattcagtagcctgctctattctagggtctgctctggggacaatcaccggagcaaaatctgctgccttattgacaggattcgcctttgggttagcttttgtaaaattcctccttgacgttgcagcattagagacggctgttgaaacacccgaagtggcttttgatacattggtcgaactgaccctatgaggagtgcctggtaaacttcctgtggcttcaaacagcagacaaaaccagaaatggcatatcatttaatcagtgctaagattaagtaagaagaaaagagaaaaataatagaagcaagcatacatgaaaacgtccttgactctttagaaacgtctgaattttgagaaactgacaacctcccgagaggctttgattccttcatcgaggactctgaattttgtgatgttgatgaccttccaatggactttgtttcttttgtcgaaggatcagagttctgagaaacagataatcttcctagagactttgtttccttcaataaaggatctacattttgggaaacggacagcttcccgagaactgtctttgagttattatcattgagaactactggatctcttcctgagcaagatcgtttctctggatgaccatttgattgcgcagtgtctccagccatacatggctcagtacgctgaccatgcatttgaaaatgagttggttcgtaaagattactaccagctacaattaaacaaaaagaaaaagatatgtagggagagaggaataccgagagatctacaacccacacgcctacacaactctgattgtatgagcaaccaagaagctttccctcgtgaacattcatatctgacaatcttgaccatccaacatccactccatcatgacatctaattggctcccatgagaaaatctacgatttgcacaggattaaaccaaaggagtgaggtaagaagagtaggaatgtgtattttgaaagcaaatgagtaaacataagaacgaatccttcaaaagatgagttgttcaattaacatatatctaatttaagaatctacatactgcatatcaaagtatagaagaatttaccttgagactttcttgcaatccacaaagcacagtctttccatctggattgaaactcaggcaacggaccccggcagtctagcgaaaatgagaatattaaaggtagagggaaaataaaatgtcaccaatttgacttagcgtaaaacaagttgtacctcaggtccaccagaaccaatcagctcgaatgtttccagatcccagaattttacagttctatcagctgaacctgttagcacaggcaaaaacagaatgcttcaaatatttgtaatcacactaattttacatattccatgtaaatatttaggtgaacgttaacagagagtgagagaagtagtcattattaaaacgtcggcattctattgttatctacacaacacagcaccattctgaaaatatctatgttacacacaccctcaataatatgaccaaagaaatgaaaaatactttagatgcatatttacttccagatctcaaatcacagagctaaaaagataagatggccacaagagtttcaattacataaaaagaagatgacgccatgacacagggatctatataactggttgggctgggctggtaaccgcaatacagttgtgatcagacactcttagcctagaagttttattttgtgttggtgttagaaatttttaagagtaatacaaacctgttgccagtaggaattcatgaggatgaaaatctaggctttgaatttgcccttcatgactcttaaactcggtcagcagttttccagctgttaaatcccaaacctggtaaagacaagctgcatatcagatccattaacacacagaaagataaaaaaaaaggttcccggtaaattgcttttcaagataacaatacagtgcgctgagagaggtaaagaagcaataaccgagagagatgaagcatccgaaatagttggccagggtggtctatgtgggttttagcaaaatgcaaaagaatagtacgtcctaaatactctcatatagcatactcagctcaggtgcagagaggtaacactaaatagtcgcaagttctcctccacacttaaagggcaatgcttactacagaacgtcattcatgagatacatacaaagagaattagaacaaaagcttattcctaccaactctcgaaagccagttcatagtctataaccaaaagcgcagtttcattgctccaaattctcccaaaggtaaatccaaactaattatgtcaactaagcagctgtatttccctccacagtagagaagataaaatcacatacccagaactgaaaaatgactagtgacatgaaagcagctaccaaccttaacaatgttgtcctctcctccagatacaacccagcgaccatctggggtgaatctgagtacattgactcctcgcgtgtgacccttgtaagtatggatgcagcccttttttcgtatatcccatatcttaagatttgtgtctagtgagcctgacgcaaaaaactcaccaaaagggtggaaatccactgagatgcaattggacctgtgaccagtgagagtcctgacaactactcaacaaagcaagtgaaagaacacgtaagtactcacagaagtcaaatcgagtccaataagaatggtctcttggaactacaaaacttactctttgcctcctctaaatcccaaagtttgatagtaccactagcagctcctgctgcaactaagacctccgaagcatcaaacgtcactgaatcaattccacttgagtgcccatacaagctctgacaacaaacaagcacaaatgagatactcagaaagagtgaatcccatagaaacactctactaacttataaccaacacataatgaaacagtagaccgagaactgaccagaatggcattgggcttaccaatagcccaaagattgaccttgtgatcttcaccacctgttaccagaaccctagaagacttccttccgatcttaagacaattgacagcagcagaatgtgccacaaattcctctttaaaccacacagaaagtcaaggctaagcaataggtaccagatagagactctagtcaaaactcaaacttgacttcattcataatagtcttaaatttaaacagacaagtttctcgaaaggtcttaaattaaattactccacggggaacaaatgcaaacatgaaaaaagatgaacacagacagatctcgtgcatatcaaaataaaagcagtagatcaaacacggcacttgtgacacagaacaaaccctaaaaatagaatctcagagaaaaatacgaaaagaatcaaaattggtgtaagaaaaggatacgaagcttataggctcgcttggtggtcatggcggaaacgaaacccttgaagtggaggacattcaaattacactctcaacaaccataccaaaaccaaaatctcgagaaatcgaagaaagcaagcagccctcaagatctccgctttctcaaccgctgaaccaatctgaaagctcaaacgggaaacagatcaaaaacccagaaatcatttctgggaaagatacaaaatgaagcctttaggaaatggaagccgtacccagcaaaaaagggcttaactttcgtcttcccaaaacgccaatctcactctgctccacgaaaacacacaaaatttggggaagtgaagaaatgataaaggaggaatttttttgaggaatactcggaacttcgttgttgtcttagataagcggaaaatctaaggagaagttgaaagtgatttctcttttctccaatggcgaagtaaaaaaggagacagagagagattgacagagagcagagcacaaggaagaagaagaagagagagagagaagcaaaaagggaggcgcagagagagagagagatacttttttaacctttggctacgtcttctctcttttaagttttctccctcttctctctatttcaaattcccaaaacaattttttcatttaattctttgagttcctcatttttcatgcatcttgctactattcacatttacatttacaaggaagagtacaaattattaaacttttaccattggtttctttttgtcagaaaccatcatgtttgtattttgcatctaaaatgaacaataacaattaattattctacataagagtatattcagtggaaaattaaaaagagtatatacattctgattgtaggaacaaaatagtactagtgcatatccaaaaatagtttttaatcaataaaagacttaaaaaaggggagacattgcacaactgaaatcgcggtttgcaaattaatccttaagaaaatgttttgaccgaaattttatataatggaattatgaaactactgtcggtgctataatggaaaatggcgatgtaatcattaataggtgattattgcttagatgttaaataaatttattatcatggacccttgtccaaaagttacaaaatttatgtacaagtgtttcagttctagtatctcttaacatttaaaaaactcgtccaaaacaaatatgcaatgatcatataacttatcggttattttccaaagtatttttatacaatattagtgataacgtactgtgaggataaataagtgagcgatccaacagcaaaatgtaactttgtatccataatgaaagaacagtgacagtcagtagatagaccaacgttggatagacaaaaaaattatggtgaaaggtttggcttgaaagtaacggactacctaattgcatggggccatgagcgatcccatacattttacaagtacacaaactctaactccaaaaacaaaagatttttttatttaataaagagtttttttttgtgaaaccatgatttcaatgttgcaatgcttcttgaatcttgactttaaccaaaaattcataattattttgaatggttaatttaatcatttatccgtcgtcgaatttttagaattagggacttgatttattggtgcaatgttatttaagtagaattgacatttcacattacattaaaatatcaggaacacctattttaaaatcatgttttttatattctcttgttaaagaagaaattcattaggtggtagaaatcaattacgtaacatcaagaaaacaactttatggatagatgttaattaaataaacattcggtaagataaagtttttatgtggaagatgattgtaacaacttttaaagacaagattacagtaactacaaaattttgaaatagaaacctaaaattacggacatatataagcgttttgactttttagagtttaaattactttgtccctcattacatatactttggctgcttgcttttgaaagcgcacaatgcattagctaattaaaaagctaaatcaatcattgccaccatggtctggcctggccttggcctagatgtgctgtcaccaaatctgagttttgtaatccaattattgtattattcatatgcaagctcgaatctccatccactccaattttaatactccaatctttataaaacgttgaactttggaagacgtgatacatggacgtgttagtacgttagagttgatcaaacaaccataataatattcctcacaaaatctaaacatattactaagattttttttttagttttcttctgagaataatgacagactcgtgatatctatgatgatgaacctgtctaccttagggcatatgtatttgactaagacgactcgcttctctctacctaaaatatcttgttttaaagtttatgagaataggaatagctaaaccgatacgggcctagaatctgacccacgaacgaaaaacgggcctaatctgacccaccaactaaacataaggatgacatattttggagcactttcctttagagactttaagcttatatactctatcaacaacaaaagcttgaaattcacaaggtttcaaagactaacaatcgtagctcaatcatctcctagatcaaaatgcgattgatgacgactacaaatctagattgccttctcctctatctcactaggacgaaatgcgaccacgagcataaagatcatcaccaataccacagccacgaagctgctgaattcacaaatactagaaaagacagaagaggagaatgacaatagtttacctttgattcaaaatcaaacatattttataagctaaagacacatgaaccaaacagagacaacacagatttgcatataggaaaatcatctgaatacctaaggaactgtttctctaagactcctcaagtacgatccacactatgtaacatctcaagtgctaactcaatctagtagagagtctgagctccactccctaatcacccttaccatcatgaccaagatccaccctttcaattcaagatacttcaatgatactagtcttaaacagcaaacatagtaaactaggtgttatcccaaattggatcttgatcttgctaatggaatcatttgaaacaaccgcagcctaaaattgcccttattaatcatcaagaaaccacatctagatccaacttttcgtttcttccaatctatcgaacactaagaaaccaataacaagatcaagccaatgaatcaaatcaacataaatagagagtgaagaaacccttatgtatatgattgctaaaggttgaatacacatcacactacatacaaatcattctccattcccaggttccagtaaacacaacaaacaaaaacaaacactgagaaaggaaaacaaaaattgtctttcttgtttcatcactgatcaatgaactcgaactcatcttccttaagatgtgaaacaaatttaacaagaccacgaccttcaatttctttgaagaactcaatcttataaggaagattagctgagattcgtttccctttccaaacagcaacgtaatctttgagtttaccttccataccttctaaatcaacctctggaactcgatttacatgataaaccttcaacggtgcagttactctaaccctagatcctatcttcgccttcgcttccgcttcgatttcttcctctgatgacggtgaggacgaaggattggcgtctgcgtttatcgaatctgcggattttatcgctacatcgcatcgaatcgtggttcgagaagtttttcttgagcttgagtgtttgatttgagattgagaggtgaatagcgagagaggtgcgacgatgcaagatttgagagccatgggggtggcggtagcagtagtggcggaagcggatagacagtcgtgagaggacggacggcgaatggcggcggcgatggccggtgacaaagcgatttggctactcatatcagtccgagtgaagaaaaaaaaatgtgtgtgaagaagatttgtgcaagtggaataaaactgattcgttttcttttttcttttttcagtgggaagatataattaacattttactattacgaccttaatattttgctttacaattttaaaaattataaaaattttgaccattgatatatatgtttatatatatcattggatataagttgtattttattttatttttgttaataataaataattttgatctaaaatacaaataattttcaaaatgtatagttgaagatggtcagtccaccggataagccactaaaattagatgtgttattattttgagttttgactgaccaaataaaaacgaaagattatggagtgaaaatcaaatgaaagaatgcaaattaacctcatggctcatgcacatggtttactaccggatcattagtgtgatagtgtctactatttccaaacgatggaaattttttatcattattagttggaagaattgatgctaaaatatgcatttacatttttttaatatgtcaaaatcttcatctacaaatttatatggatgcaatttaatatgattttttttcgaatgaaacaaatcaagaaacgtgtaaatgataagcagacagaaaaaaaaacatgtgaatgaaatggataataacaaaggtttaaactttaagaagtaaaaaggaaagggagaagaagacccagcaatataaagaagtcagacgtgtgtcctttttcacgggatgaggaacgtgcggcttctactatattcatctgtgagactctgatgcttcaaagttccgagtcagacagaaagaatctctatcagttaaatatcttcgaataaaatcttcttaatccacaaataatatcactttagaagttcacctagttaacctagtccaaaaacctcgttacttcaaatcatctatttcgttattgatcgactaatccaaacaaagaaatggaaacacacaaatcgttgtagaaaacacgtacacagtacatatataattcaaaacacacaaaaaagggcaaaagaatatacaaagggttttagagttatagggaagttatggcacaaaaggatgtacttggtatactctctcatgtttgcttctcttatcacatagatggtacttaccgtaaacttgacgccgacaaaaaacaaaaaacaataaaaatgaattccagatatataaacatccaaactctctcaccatcctcacaatttagatgagattaattaactatgaatgtcgtccaggagcgttaccgatcagtctgcattgttcaggtagcattgtcgatatcacttctccatgcaatgcaaacagttccccgtctatcccgcaactgtcatgcgtatttttccccgcctttatcttcactgatttcacctgcaattgtcatgcatttgatcaactacattctattctagacttataatatttgcattgagtttgaccgtttgattagcatttcctagcacatagcgagttgcaggtttcgtaatgtaagaaaataggaaagataatttacctttacacactcaacatacggaagagaaaggtgtcgacctgtttgcaaaagtataaaaaacctcagtaacctcagtcttccacacccatgaaccaagagcatatccattgtaccatcatcatgttctgaattgggagccacgacttgggaactttgcacagtccgacaagcatggttacagaccatgatgccgaggaaatgtccctttctcgaaacccatttatcctcaaatattggagtgatgctctgtttcctcagtcctgtctctatatcctcaggaggaccaggcagctcgatcgaattttctacatcccaagcagacggttcagtgtcccatttgggtcctgcatcccagattggacctggatcagatacagtagatgatatatcttccctgtcttgaccaccggtattcccccatgaacatcgagttggaggatcctgcacggatgttaaccccatccatcctttatccattcttgactttgatcttgtccttggccaattaggggttgttgactgtgcttgaggatgaataacctctggctcagccgtaacatctcttcttccagaggacaagcgtttcattttaggatctattccacggacatattcagacggctcagtgctggcatgtgtgctgctacaagtgtctaattcgcctacgcttggggtcattatggagtcaatacttgataaactggaggctctaggaaatccttctctgcttgatctcctcattacatccgtgtagagatcttgcatatccacagcttccttttcaagtcgaattttgccttctgcatcctctttttgtgccggaagatattccacttcatagctatacttcggcaaacacatgaacttgaggaatccagcaacaaagtaacgcaaaggaccaaaccgtttttggtatttttcagagagctccaaaactgcaaatagataatgacaagaaaaaccatgaaatttagttatagcaggtgaatgccacaaacattatacagtattcatgaaggtaattatatgtgcaataatcctgacgtcaaacacgagacagcgtccaatagctcaaactaatacatcaaacacacaccggagctgttaaagaaatggagagagatttacagccttttgcacaagttcaatgtatttgagtttatccatgatacgtttgaataactaggcgattttctgcttctaactcatcatcagaagagtgcacattctgcaatattctatgaaattatgtgtcttgggagtcagcatagtgttcacactgtgccagttaaaatatttagaagataaactgaaaaattacagtaaggaagatttaaaaactctcctctaaaatgcatgaaagatctaaacagttgcagacacggtgaatgaaacaaagaagctaggaatacagattcaaacctaactacacttgagaaactgtttatcattagaaaatcatacaagacaaagcacacaggtatcctcacttaccatcgctaacaaaaccatagtaggaaacagtcattccaaagtgtataataccggtatgaatccattcaacagcaaagacatcagtagctgttaggccaccctaaaccaaaaaaaaaaaaatctttcactgagaaaatattaattaagtagaagctaattaatgttggcggctggataaaacaaagcagggaccaataggattttaggcggggttaccttcacaatagagagtgctgcagaaataggatctcttacaccaaggacagtccaaactaacgagttatcagaaccagcaggtactattccaattgggatagaaactccttctttcggattgcttcgagtaagcagaccattaagaacctgaaacattgaaataaggcaggccttgagatgagagttcattccaagtaaatagaatctaggagatgttaacatcgaaagcagtcttttgaatccatcttagtctacctaaagagttctacatcaatcgaaaaatcaatagtgaaagttctcatgtgtttcaactcgagcaagtatttccctataagatgcatcccaaagtcctcgctctggaggattagagtatctaaactcttaaattattcaacatgcttgcaaagtggtgtgagcacgctgaaataagccaataaggtttcattttaataccaaaattggttccgaagtacgttcaggcaccagggcttgtaagcagataagtaaccgggagtatggtataaaaggaacatcacttcatgaacttaactcctaaccaaaatagggcgaaaaaatgagtatagtttaggaaaggtaattatcacacctcattgatgattccatcccctccaacacaaataattcctggaagaattattaagaactcgtaagtaatagtagatatgtaagataaaatatatgcatattagaagctagatatgttaaacatatcattaagtgttggaacaagtagaggtaccgtcagagcataagttaatgtcgacagtggaagccaattctctcgcatgacctgctttagttgttttgacaacctccatcttaattccggccagctgtgacagttcacaaaatcataaacaagattaaaaaaaatgcataatgggattggagaaatggaaatggttctctagggtacctaaaagtggaaataatgtgatgatgtagtactacaacatccaaaaagaacaaaaagatgggaacggtaccttgaaaattggttccacgacattatggaaaactttgatagatcgtccatgtcctgacctagggttcaatatgacaagcattttgggtgcactcttacacctgaagaccaactcaggaggggtatcaatggggaccgaaaataactcagacgaagcctgtttctttgcgactaaaggatgtggcaaacagttgataaaacattgttgatctccaaaactggccacccattgaacggcttcttctactgtaggtgcgacaaagcggaaatccttgcggcttctctttggtttcgtgaagcaagacaggccacaagaacccttgccaattggataagcatgcacagtgaaatgcctaagaccaacattgtatgtcacctggaaaacatagataagtttgttgactcagttctccaaaacacagagttaattagttcattgcaaggccaacaaaaacctaccgagacaacatcgttaagctgtagcatgtcagaaccccaaaccaaagcgctgcttgtaagctttgcatcaactgctttcttaatagagatgtccgtagcggctggttgctgtatctctgttgcatcttttccactcgcagatttcctcttatccaacacaagcttcccagcgtaaacaagactacctaacaaatctgatttctcatcccctccaccaatatcgatccgatgctcatcaggcttcggtttcacctgtggatcattagtaacctcaccacgtctcgaagatgccttcaccttcttatttctcttttcagggaatactataggagatgactgctgagatccacccgtagctatttgggagcaaaaacctaaacgtctaagcgactgttgtgcctgaggaatggctactttcaaagaagggttccgattaacaccactcttctgcatatccgtacactaacaatctctctgctcttgagttccgcggacgaaacagacgacaaacagtgatcggaaggcatacacaaaacaaaacccctgatgagcataaacagagaaacccaatcaaacctcgttcgagctggtcaacgaacagattttagagagaattacacaattctaatccgtagctatacatcagatccatcaacgcgttttcaggaagaattctcctgtaacaaaattcatgtccatggatcgatttataaccagcatttgatggaaattcaatcaaaataagaacactatacaacagatcatgaggaatcggaagcaaatgataaacgaatctgaaaacgaaatcgtcgtcagagcttgcttttagctatttattcgtcttaccttagcttctcggcgaacaaaaagaagaaatggagagaagtgtatcagcaaaagtaacgccgccggatcggaggatctgagaagcgtcagaattgaagagaggtggcggagagagagagagagaagacgataatggcggaggagatgatgactcgactcaatttcgattcgatttcgattggattcgactcgacagcagaaacctatggccccctcctttcggatttatttccactacagaacctttttttggacttcttttttccaaaattttaatctattttatttatgatattatagtagtatttgttactttaatggctatgttttaaaattattttgtactttatttttcgaaatattttattcttgcaattgctttattcgcaagatattttttttaaaacccctcatttttaatataagtttttagtcctaactttatatttatatatttagtaggtaaatttgaattctcatagaatttttttagtaattagatttgaatttgtttccttgattataaaatgaaacaaaacaatgttattaaaattcagtaaaaatgttatttatatttcaaaaaacttaataagtaacaaattttatttatcaaagtataatatccatctaagataaatcatataaactctaattttgatacatatatattttctggaaatgttttaaaaaatttcatatataacaaggcgataaatcataaatcaaagttttcctaacaatgtccaaactatattgtgtacttgttcctggttatatggttttgtgattgacgataaaagtgtgatacaatatcattgatatgatttcatgtctcatcttcttctattgttaaatgattttttatatatttatttgttatgaattgtagatgacttgggagagaagtatatactatataagcttattttcatgatcagattaattaagctttgtaacaaacacttatgtgtgtaatgaaagtttgttaagttttcgttatcatctcttctccgatcatcggagtttaatatggtatcagagctttttcgttaattcttcttctatcgtttttgttggagacgagttctttgtttcatttgttattccttttccgttttgcaattggtgatttgcaattttattttcttcttttggttcattcttcttgtatagtaagttgatctagaatgttattcgatcagatcttagagatccagcttctagggaaaaaaaatatgaatgatgttttcaaatggtagtggatagctttggttatgttttagacattcttgtaatcgtgaattgttataataatgtgaagttttattgacttaaaaatgttacagtgcattaattgcattccattactctcgttaatcgatacaaattacgttcatataatcattataaatagtttttttattaattatttaaacagttattaattgcataggttaatccatttaaacaaattggttgggtcaactcatatactcatttagctataaacttattgggtaatgagttgagttgagtttttaacgctcgtagtatcataaaccaaatatatatctatattttaaaaatttaattgtttaaatttataatgagatatttgatattattttcaattagatacaacatcaaacactataattattttttaatctttaaataacaataaatcattttatttatattatatattatatatagaaaagaaggaacatcaaatacgtggatttaaatatttacatagaaaaacgatgacaattttacttataatcaaaattagaagaagttgtagataaatgaaaacattttatcaatacggagttggcccattgataaatctcacaggtagaagttctggattatatttctattgggatgaattttttttccaaaaatatgaatttaactagatgtgaattctaaatttagggaaagtaaagttttcatgtttgaacttttagatattcaaaaagaaaagaaaaaatgaaaacactttcaaatacaaaaacatgatgttgaaatgatataccatatattatatgtatctaagtgactggtgacgtaaaccataatgctaagtgatttctgacatattatagaaactacaaaaaaaacataaattggaaattgccatgatataacctaattctatttaaagaaaaatcaccgactttcacattcaaagaaatttaatatatgattgttaatttacttatgttcttgaatcttgacaaaagaaacgactattttttcaaataaataatttcaaaattgataagaaagtcaaccaccgttacaccaaatttagatatgatatatttattggtcacaaactactactactatttgtagtttaccatattttctcactatagatgccgaatattctgaatataacaaacaaaaaatttcttaaaatggtttagcttagctgtcaatatttccatagccagatttaataatttagctttcagaaaacgattatgctatgttagttgatgatggtttagcttaagtaataaccttataatcttaaaaggatgattagagaaggtttaatagtggaagaagttggtagatgggaagatggtcccgaccattgttacataaacaagtcaaaataaaattattaaagtggaaaatgttatattggtttggttcattcaatttagaatttggatgtggcgaccaacagacaagtgatgcttcgttaagaagaattgttaaaagggcatcttcttctttcttattataaaagcttgggcacatctaaaggcattattgctttattttttgtattacttcaataaagtttggaacgataacgataatgatgcaattaattctttgtcgaatattcattgtagtgtcatggtagattgtaacacgttttgtgcagatcttttttttgacaacagcaaaaaataaaaaatcacacatcttttgaaaagttataaagatgattagcttattctttctcgttgttaacataaagaggattagcttacctttatggaaacttgagaaatacgtacatttcaactcttagaaaaacaattcatatatttcttagatcggaaactaataatgtttgaacgtatgatgtatgaaaaatcatacccttaattacgagcttattgggatataattcacgagatatgtgtacatatgttccacatgttttttttttacatgaaataacaaactcgaaacaatgaattattgttgaaattggaaactcttatataatgtcacaaaatattttccatcagtgagaaaagaacgttaaattttagaacatagttgcaaattttcttaaaatattttaatgttaatttagaaaaaaagaaagaaaagttcttgagctgaataatcaaggatggtatgtgaactaaggcccataagatagatctctttcttctcgctctcgcatctatcagagggagaggatctctactccgatctcaatcgaagttttagatttcgtttttttgtttccggtttaccggatcagtgtatattttcgccttgtacgatttaataattctgattttgttttcgattatgtccgaaactttctcgctcttgcgagtcttcgatctcactctcctgacactattgacatcttcgctcttcttcacaatcctctttgtttccgccaatttgctcgaggaataatatattcatctttcccctattgctcatgatgtttgagcaaggattcaactacatcaacttaggtgtggccagtgatggagcttccccgaagttggcgttaatcggagagtttttgaagcagtttttctactcaaatccggaagaaacttggcgttgtgggctcaagcttagagatcgacatgaggaaagaggattcacatcgcctcaaagccgattgacggtggctgatcggaatttttgcggtgtcccggtgaacccgacaatgaggctcaacgtcatgacacgtggcttaaggacgacacgttcgttacacgtgttagacactaaatcaacttgcgtttcttgtttatctttattttaatttggtttggcctgggcttatatccatgtaatttttttgaaccttctgtatttcctgcctttgggctttaatcaaaggaaattgctggaaaaaaaaaactaaggcccatgagattcaaagcctcattgcatttaataagtatcgagggtatagtggtcaagatgacgagggttttggccttttgggccttttggcgcgtcgagagtcggtgctttcgaagaaaaaaggaattttttatttgattcaccacgctctctctatataaacctcaattaccaaaaccatatttttttccagtatacaacaaatttcgcagcttttcactctttgctctttagggtttgtaaccaaaaaaaaaaaagtctaggtttttgagtcgatttcataagcttttcaggtgattcttcgttgtgtccggtttcaattagttctcgtagattcagattcgaaaccatgtctctagttgaaaacctttttcttgagccacaatccaaaagacgtaagatcaatccagagaccatagagtctccgtctcctaattgcaatcattggttcgtccgcaataagatctgtatctcctgctatacaacagtggacaatttcgaaggcagatcttttgattatctctacaaagggatgcagatgagtaacgaagctttaggttttacaaaagggctcatctctcaaacctcttggcttgaagacaagaagcttcacttagtacttgacttggaccagacgcttattcacaccattaaaacttcactgctttatgaatctgaaaagtatataatagaggaagttgaatcgaggaaagatataaagagattcaacactggctttcctgaagaatctttgataaagttgagaccttttgttcaccagtttctgaaagaatgtaatgagatgttctctatgtacgtttacacaaagggtggttatgactatgctcggctcgtgttggagatgattgatccggacaagttttactttggcaatcgggttataacgagaagagagagtcctggttttaagacgcttgatcttgtgttggctgatgaacgtgggattgtgattgttgatgataccagtagtgtttggcctcatgacaagaaaaacttgctgcagattgctaggtacaagtattttggagacaagtcttgtttgttttcagaagataagaagaagatagatgagagtgatgagaaaggaccattgaatactgctttgagattcctcaaggatgttcacgaagaattcttctatgactggtcgaagaaagacttggattcagtggatgtgaggccgttgctaaaggagatttctttgagatggaagcgtaaagcagacggtgtggtttgaagttaaagtgttgattcattttttatgtttctgcgtgtgttttttttctttcttacggcctgtgttttgtttattatattagatcttgatggtagttattggtaatggaggtactttatgcgtttcataatgtgatgagatgtgacttttgagttttgattcagtttcaatctataatataatgtttcattgaagatgtattgaggttcttatgggtggtacttacagaaaactagtcacattaaggatgtttctggttctaacaacatttagtgagacaagaaacatataacgagatgaaaacttgaaattgaaaggtgattacgcagctcctagctcactcgacttccaaaaagacaaagatcgagtttgtgttgttgtatccttgataccatgattaatgatgtttgtgtttccctcgatgaatgtgacctgaaacatctctgatttggaaacactcctttgttctgtaacaataacagtaagagtaacagtaacagacgagtaaaaaacaaagatggatagtcttcttataggcgtgaaacaggcttagcaacaactttctcttgcaggttatttctttccataaggatctcaattatcagcaaaagctttgtagtacatgcagattcaattcagtaggtttaaagtgcttacgttgtaaccatgttgtcttaattgagtgaacaatatattcatctattgttctatgcatcacttatatggtatcgaacctttttttgtatgagaagatgagggtttgtgtcagtcgtattgtagcaaacaagaataagaaacataaactagatggaaaaagaacaaagaagaataattaagactcatgctcaagaactagaccttttccattttggatcaaagatattacacccaatggcggctccagagtccagatcggataaaggtaattaggatatcgaatcatggtactatccgaagtgtactctaaaatgttattgggtttgacaaaacacacaataaatgggccttttgggcctgacgagatttgacatagagaagaacaaaatggcccattacatcactaaatatttatttcaattacttttatgagtttatctagaatgttctgattattcggattgggtaacgggctgggtgacccgacaataaatgcacgcagagaccaacgcaacggtacacagtacagtacacaacaaatcggattaaagaacaataaatcgaataaaacagtgtgtgtccttcgtctcaagcagtcgctctccagggtatatcttctctctctctcgtcacctatttcgacgattctcacttttacttcacaaagtttccgtctttttcatacccaaaaaaaagaaaaaagtttccgtctttagttcgtgccgtttcatatacccgtcaaggttttgcatttcatcactgtaatgtgttttctctccttctgtctttgttttagaaacttgtagttatctataaatggcgatcgaaagctttgacctttacttgtttgttttggttgaaatatctatcacagggtttcacttaaaatggaggatgataatgagaaagtgaaaggttcgagtaaaaagaggttgagaaaacctaaaagcttggaatttgttggatggggttcgagaaatctcattgagtttcttgaatcacttggtagagataccaccaacaagatatcagagaatgatgttacagcgattataatgaactatatccgcgagaagagccgtgaaactcctttgaagagcaagaagaggagaaagacagtagcttgtgatgagaagttgcgtttgcttttcggtgctgggaagataaatgtaatcaaagtccctgatttggtagagaagcattatgtagagaatcaggaggaagacttattctatgatgatctctacgcttcagaggatgataaacaacagagattgtctctatcagataaggtggctaaacagacgaaacaggttgtgtcaaagcctagagggacttttgctgcaatagtgcgtgatactgttaagcttctgtatttgagaaagagtttagtccaggaactagcaaagactcctgaaacttttgagagcaaagtggtgaggacttttgtgaggatcaagaatccttgtcagcttgttcatgtaaccggtaagctttagctgaatcctggttcgaaaaaaactaagattctataacttcttatattttttctgagattgagcttattcatttgtgacttcttttgactatcactaaccacatctcttattaactaggtgtgaaggaaggagatccgattgatggtaatctttttcaggttacaaattattcgtattatctaaaagatgttactacctcttccctatcagatgatgatttctctcaggtaatattcttagaactatgtctgttccacttttgtcttcctatcagtgacaatcaaggcaaaaaattagtcctcaatgtttcttctgaagcttactaatatccgtaatcttttttatatgatattgaatattgcgcaagatctttgtttcccccttagagcgtaagtagttatctgatatcttatgcagacaacggctagtcaccacaacttttggttttagtttatatattgagtgattcttgtttatgatttgtaatagcttcaagttaattttggcaggaggaatgcgaagaattgcatcagagaataaataatggctttgctaagagacttacagttgtaagttgcttagagtatctagtggtaccttagtttgctgccttgttgtctttagagctttctctactaatatttgtatttcttgacatttactcttgcaagttgctcccatagtctgtttattctagtgcttctgatttatttcacttctctcatctaatctactctaaccgtggacaggttgatatggaagaaaaggctcgaagtttgcatgaagatgtgacaaaacatgtatgttgctaacttactctattttgacatgatatcaaatatcaaatcctggttgttatgtcagattgtgtatgaagctgcaaattgttattcagaaaaactgatttgctaactaactccaacttttacgaatgttttttagtggattgcaagagaacttgtagtgttacaaaggcttattaatcaggccaatgaaaagggatggcgaagagaatatcctttaataaagcattatcaatattaatatattgttttactttgaagagtaactagtgaatatgagagactctttctgttatatttttcttgacttcttagctaatacactatcccagtatctggagaagagggagcttcttcagaatccggatgaacagaagaggctagtggatgaagttccagaaattgttgcagaagaacttgaacctgaatgtgaagatgatgatgatgataggacaatagaagatagcctcattgtaccaaaccctgaggctcatcaaagtgacaaagagcaacgacaaagagatttaccagtttcttctagtgtcaagaaaagtcaagaaaattccttgcttcttaagaatccggaagagcagttgaggctgctgtgtgatgttcccgatgttgttgcagaaaaacttgaacctgagtttgtagatgatgatggaaaactagtaaatgacgtaccgtaccaaaccctgaagccttcactgaggcgcatcaaagtgatgaagaaatacaaccaagtgatttaccagattctagtatccagaaaactctagaagaccagccaatatggactgcttctgcaggtgcgtcccattctttgtaacttcaattcatcgataggacttaaattggttggattaatgaatcctattcgtccttgcctttgtcaaagtgatgttagatgaatgtgtccttcatagttaactaagtggtgtccaagaagcgagatattgtgaacttgatctggacccatatatttgtttgtgtaaattccaggtaataaagatctccatgaagatgtgtacgagccgccagcaaatggcataacactgaacacggactctatcactgaaggagaaatgaataccaaagtcagtcagcatcagtcaagtactccagtgattgatctctctaacaaaactcaagcacactcaaatccaattgagattattgaattgagcgatgatgatgacgacgacgaaaaggacaaaaacgatcaagcttaccagagttatgatccaaagaaggtgatgtggttctatgaataccctaaaggaaaaacacatggaccattctctctcacagatctcaaaacgtggagtgacgaagagtactttgttggagttccagatttcaaagtatggaagacaggagagagtgcagtgctactaaccaaacttctatctcagatcaaaacctaattgaagaacttgcaaaaagcttagcattaagtctgaaaagtgtgcattttgtttatttctctaaaacggttgttgctgaatttagtgcacataatgcaaagattctgacttttgttgtaaaaaagtctcctcttaaaatccatggaacataattattaacatgaagattccttaaaattatttgaaaatcctaattcttttgcataaataataagtgcagtatttatttaaattgaagaaagtgaaacatgtataaaacccagaagtcagcacaacacttaccagtccagaattaaaaaaactgattgagacagagagaagaaagattgcttgaagaagacgaagacaaaaggaggaaactttcttctcatttcaattaaaaaatccatttttttctctgggtttttctttctcatgtgattgtgtaattgattcttatcgttttctcgcaatcattacggcttcttctgaaatcaacacgctcaatttccttccttggaaaattttggggttttggttttgttcctgtttcattcgtgtgagatttgattacttaagcgctcagatgaaatcatgataattaagaagcacaagagagaggaaattagagtcctttggtcaatttattggggaacttgattgggatttagtcagcttcaaagtgaggagctgaagatggagaatggccatgaggaaagattggcggagagattttccggattgggtttcgaagattcttctcttttgcctgagaacgagtttaagaacgacaacttgtttcaggtcatcaaagctgttgaagcagcagaaaccaccatcaaggagcaggtctggttctccgtctgtgtctctatttgaaattgtttcgattcgtggggaagtacttcctctatcaatccatttccaggagttctgtctaaatttctgtattgacatgtctgctttattagagaagtagttgtgaaatgcaaggttttattaagtctggttgatgcataggggataattaagtatctggagtgtaggatctgtctcttgtttgttagcatttgccaatgcaagatggtttttgtttgtcatcgaagtattttaggcatctaagaatgtgtttttatcctctaagcaggtggaagagaatagccgattaaaagctgaacttcagcgaagtgctctggaattggctaaatatgtaagtaattgtctagttaaaggataagagaggatctctggttacttttgcgcagtctttatcagatatcagtattttgcaattagtgagaatccttttcttttgttatggtgatacttccatggtataagtttagtagctcgtagatcatatttggtaaatttttgattggtagtcttgctcttgttatcttgcctagaaatcagatgaatccttgccccaaacttctaatatcggagatcacacaaattctaccactgtgtcccgcctggttcaccagccagttgactggaagccagttgtgatcaaagcttcagatgctgattcatcaggcttgctggttgttcacccccatgtgaatgctaatggtgaagaagctactgtgagtaatcgttttgaaagccattctgaagaaactataagtaatggcactgttaaaagagctatagatggtactggtccctctcaattcgattcgtcaatatctcctatgaggtactgaaacagaaactaccactcttgcgtgtgctgagtctatttgtaaatcttatggcttagatgaatttccatgaacgaaatgcctataattttcaagatctgatatc

SEQ ID NO: 730 - DNA, 81365 bp, Arabidopsis thaliana
cgcgcaaatccatcattcggttgagctcgtctatgaactttcctcagtttgctccatgcttctaaaagtgtgagcttcctatttattgttcccaccagtaaacaaatgagaacaagtattgaaaatttccaacaaattttatttgtccccaacaacttacttttggagcattaggtaagcaagcactactgttgcgcttctactccgaccttcgaagcaatgaactaaaatcttgccaccagtttcttcgccatgcttgatgaaatcgagagcttcttgaaagatgctctcgatatttgagtcttcatcatcggttatctggtcaaagggaagacacaagaagaaaacgatcatctttatagatgcatttttttttaccaattccttttaagagacatataagacaggttcacttactgagaagttttggtactcgaagagatccgggtattgagtatccgattgcccgatttcattagcgcacaaacatagaacatgagttatacctaaatgctgaagagtgtaaatcgaccttgcagccaatcctcccccgataaaaagattttcttgtatcattgatggtttctctgtattagcagctttgctaatcaatgatatcctctcaagaatatgctcaagtctaacctgttatcaaggagaatgcaaacaagagagacaatgtttgagttcagttgccaaaaactatattatataatgaagatcatattcaggataaaaggaaataataaaacttcatgatacctttagctcataagcatctgtgcaactgttattatcactgccctcaaaaaaaccagtgttgaaaccgttctcttggcaaagtttcatcacttcattccgcagtgtttcattccactggtctagttctttattagactcagcatcaacctggacgcaccatgaaaatattgagagtgaagaaagagaaaatggctgagaacttccatccaagaagacaaacttttttttttataaaaaatctgaacctactttacaaattagaacatagtgatcaaagctcgaagcgacaaacctttgcaaacttatggaagtcacggagctttgctgccaaacgctgactgctaagagattctccacctttaccggatcttccgtgccaactttcacgtgacttaggcgaagacccgtcttctttgttttctgaatttggtgtcctaggaactgatttttgcatatctgactcactgtgatcagagctgttatcactaggcacccgatcttttgagggagatggataatgattcacctcatgcccatgagtatgtgaaggtgactcaggaacagcaaagtcttctctgtcaaaatctgcacacattgttttgtccatcatactaaaaaatgcccgaagcaacacatctaatttctgatgaagggtgacaaggaagatgtgaaactcttgcaaatccctgagaccagctcggaaaccatttcgaaactcgcgtacaactggtgttactacagatcgaacattagatgtttcttcaccatcttctgcctgtggatatcctaaacttccttctgttatttcatgtaacaaattcgaagaatattggctactattgaggagtaactcaactaatcttggataaatttcttggtcgcttgcccgttttccagcaggaggccgccgtggaacacccgagtctatggcaacgaggtgaaaatcggcagctactgatctatcagacattggactcattaaaccagtatcatatgatctaggtgattccgttatatcagaaaaatcagaagcctgtgagaccaacatttgatcactgatactcaacctggatctgctatctacggaagaagctcttctttccctttgaatggatctatagtcctttggatggtaccgtttgatggcggaatcaaaagcttcatcaaatgaacattcatgatgctttgcagaagacacaattctgtctgtcagtaacagatttgccgggttgccacgccatctcagctgacgacacggtaatctgtcttcattcctaattactagatctaacaccaagattctccctagagctgcagcagctctctctgctttttcttcagtttcaaaactactcatgctctccagcattggacatccatgaacataactgtaatcacatatagagaatcctgggctaagaagaggggttctatacaaacatcacattaaaaattgtaaatttgaaagtgcctacatgatcctattaggtaagactagattttacataatcctattaggtaagactagatttctgttcagctatttctctcatatttattatcatttaaagcaagattagatttctgtttaactgttgttatcaaattttatccaataaaataattccacctcatatttgtaatttagatctttcttattttataatacaatttttatatctaataacataacatcttttatttttcttaaaatatattatcaaatggtatattcatatttcaaatggtttactatcatctagttaaacactaatgcaaaggaacaaaaaaactgtcaacattatgctgctggtccaagtaaaaaatggagaaaagtgataaagaataaagatgaatcttgtgctttcacctcattaagagaagacaacggctgagctcaagggcttccagaagttctgaacatgtcatttcaccaacctcgtccccctccgaagtcgctttagcttgtgctttttcagtggcttctttgatcagtgtccactcaggattacagctgtgaattactctagcctgtcgcatgatgattactcattacttgaaaattctagaaagaaagtgaaatgagcaaaaccattactacatttttaaaaaactacaagaaagaaaagaagcacctgcggaatctgcacccctagccacttggaaaactcataacctagacgttctgattgcgtggccatcctcgatgatgcaaatttaataactgctgcttcttccttacgagaggcatcttcagagctggaactattgaacagggcaaagaaaacaactcctccagaattcacagtaacctgtacagacatctaatagtgtcaaaagatcctcctagcatcaccagtccaagatcataatgatatatatacctcaagtggtttactctggtcttcttcagaatgatcagtgctactactatgttcagtatgatgaagtgaagacaacatattccatgaaaaacagctcgaatcaatatccacagtagaagctttaccaagcctttcccacaaactaatctctgaactctgcctacttggtggacttttaggatcagtattcctctctcctgcactggataatacttgtatcaactgacatgaagactaatatcctaatttagaaacctttgttctgatatactcataagattccaaaatcataatcaacaaaccaagtacttgacaaaaagtcagagaaagtgttaacctagtgaccatatcatcgatgcggtgaaggcggtgagggaagccagaggatccgtaagtagcacttcgtttacgaactaaatccaaccattgagtaaacctataagctggaccagatgctatatctcctaacatgtacaaaacctgcaaattccaaaagtcttccaatttttaagacgagactattaatataaccctaaaacctaaaacgaatttaggatcggagaaatttacacgagaagtgacggtgagaggaagaggagactcgtgctcgtcgtgaacaaggtatagatctttctcttcgtctttttcctgcgatagcaccataatatcagatcagagaaaaaggggaaaaaatcaaaatcaaaatctggctctgcgaaaagagggagagataaatgtgggggtaatgatgaacgcaaaaggtgggggtgataatgatagattattaaatttgtgggggaaaaatgaaggatgattacttgagaaaatggttgatctcgcttcttctcaggttccgccattgcaaaagcttaggttctgtttaattttagaaatgtctttttcttcaaatgtcagctttgtatctgagaagaggaaagtctcaaggtatctttaattaatatgaacttgtcggacgaagaaagaagacggatatttaatttcataaatttattattgtaataaagactctgatcattttattctcattattcaagatttaaaaaaataaacatattattatttacagaactgtcttctaattttattttatttccgttttgtgttattatttaaaactatattttgtatgaaactatttcggtcgaaatcaacaacatttatacaaaaatggttttagattttaaaaaatattcactaaagtttatggtttaatctgaaaaagttcagtctaataaaataaaatatttatagaatttttttgtcaacttatttctgaaaattaataagcataaatattagtaaaaaatcaaaaatatatactttctttgttttacaatataaattgttttggaccaaattttttgttttacaatataaattattttcaaaattttatgcaaattatatattattttaatactttataattatttctatttttaaaaaataaattgaattttttaaaaataaatatttttaatctacatgtttttatctaaaccaacttgtatagcgaaatctcatattgaattaacaaaaatcctgaacaatatgtaccaatccacttcgagttaccttttgttgtgtattagtttaggcccacactaatatatttgactttcttctctgtcttatatatttagctaaaagcagacctagggttttcgtatccgttccagtcacggacgacttctccgttctctgaactctcctaaagcctctatattcatcggattgttcatctccagtaaaccaatctccaggtaaattgaatctgaatcttcaccaaaatcctttgtaatctcagaatcatcgattttatcaccttcttatagtatagatcaatccttttcgtaaatcacacgaattctctcaattaccgtgtcacaattccgattgatttttgcagtttggtgaatttgtaagaatgagtaaacgaaaacgtccggatccgaaatcatcgggaggtgatctaaacgagccacacgagaagaagcttctggatctgattcgaataaaccaaggaagaggcgcaactatgttcgaattgaaacgcgagaaaacgatcccagcaactatagttactcgattgatcgcttctctacggaagaagaatctcatcaaagaagtagcaaacatgaacaacaaaggtgtcaaacattatcttgcaatggagtttgagccttgtagtgaacttactggtggtgaatggtacactgatggagctcttgacctgtcgaaaatcgaagatttgaaagccaagtgtgtgatgattttggagaggcataggcagagggttgttactttggaggttttgtgtgggtattttgttaaagaggagaagctgagtgttgatcagactaaggagatacttaagaacttgattttggataatttgatcatggaggtgaagagtaatggaatgaatgagtttgcttctacgagaatcggagaagtttgctacaggttgaccgggaaaaagttcggtaatggcgaaccgagagctggagcttttgcttcgattccttgcggggtttgtccgcatatagcgatctgttcacctgatggtgttatctctcccactacatgtgtttattttcagaaatggttagacttttagcactctctttttttttttttttttgggtttaaaacttaagattttagattatgatgatttgttttttcggttatacaatagagaataatgctattgatatctttaaattaagagtcaaggttgtgatttgaaagagtagatgtcggagaagaagatggaagaagctgatctgtttctttgcgacaagcttcccataattgttgctctactcctagtttccttagctctaacaaacctcgttccactgtaaagagaacaagttaatgtgttattaaaactagaattaggacacaggggaaatcaattgaagaagtttattaccgtcaacggcatcttgtgaagtcggagattttccttcactacgactggtccaaaactggaaacgttcatctgcaatgtcttcttccacactatgcaacttggctctaccccagaagtacataagccatgcctgcatttataaccaaataacgtcggttcatcaagattcatcgcgataaatttagttaccaaccacaatataccaataattaccatctcttgtaacaaaatgtcacattataaccttatagttatgaaattataggcataaagaaactacctgcttaaaggcaacatcttcttgttccccttcttttatctctgcatttgagaaatgtgataacatagtaaggatttcatcaagtttgactgctgatatgatatattgtgcatgtttggactctcttctcttaccgtatgattctacaaaactgagttctccatgccctttggaatctgtaagatatggagaaaacagactattgatctcgatgactagtaaaaacagactatatttgacactgtactaattgatgatatagcatacataccttgacgaaccaaactcggtgttctcttctgtgcgaatgcaagcataacagcatcctcaacctaaatttcgttgtgatatgagaacttaattatgtacttgaagataccttaaagtaaagaaacaatggtatattacctttaaggatgccagctctctcaaacccatctcaactgaaagcatactttcgatatttccttctccaggtagatcacttaaaaatctagcagttttgctctgatcactcccacctgatcaattccaaaggctggtaagtaaacagtatcaaggaaaccttggccatagcaaatattaagactagcctttgtcccgagataactccttggtcttttgtgctgcagatatgaccagctcaaatggaagaggagccagagccgaccatttttcatgcctggatggtgctatgtcagcacaaatgcctacataggtaagccacaggaaaaccaaatatctaagaattttaataaataaactacctcaccacaactacaagcctttgaccaaaattagagagctgagtaagtgtatcaatgagaacacgttcacaagatggatgcattacttaccatgctgcactgccaaaccccaataccgggcaagccagcatctcttcaaggctacttcctcctagatgatcaatttttttttccatacaatcagaaatctttaaacgtgagtataatgagacttgagctttctaaacataccatttcgtcctgtgttaaaaccattctttgagtcattatacgaagagcctttgcttctgattccgcttcttgaaggcattccgcagctgtttctgcctcatccttcaagatctgaacataaagaaatgattacataatgcagatcagaataacaaacatattctaataccaaaatattagtagacctacctgaatttctgaacggagggaaacaacttcctcctttttcccatcttttttctcgttagcagccttaagagcagcctgccagccagtcagtcttaatcgttaggctttacaaaaatgtttatctataacttaatgtggcatcataaaagtacaaaatgggagctcaaccaaagaagcgattaaaattttatatatctctacacactaacctcacgttggcgcaatgccgcttcctttctgaaggaaatcacagttcatcatgagctttatagttaccgacgtatattctaaagaagagaaagataaagaaaaagaggtcacaggctccttacctacttaacaatttagcctccagagacactccttctccaagagaagcaacctttttgggacaagaaaagaaaagggacagatgaatctttgaaaatatgctagcacctacacgcatgtcattctaagtaaaaataaaatcttgaaatgtatgcagattccatgaaatttactttttaaaaaatatagagtacaagttcattgcattttcatgcatatatgaccacaaaatattgatatgagagcataacttcattgcatttggtcaatcaaacacactaaaatgtttctaacggcttaaataaactaacataatggtacgtagctacattataagatacatacctaaaaatacagaatataaaatacaagacaagagaggctaatgaaagattaatttcaattactattgttaagataatgtaagcaagttcagaatagttttctctcaaaactcaagaaacaaattcagcaaagataaactagtgataacaactggatcaaaacctgtttctccagctctcgagccctggcttctgctgcctcacgcatttcttctgcacggtgaagctgtaatcaagaacaaactgttatgaaaacagaggataacaacttattttcatgaaaaataattttagtgaaaagacgttgaaccttctccaatacaatctcattctcctcttgtagcatatccacctgcaagtaaaaatttagtcaacctcaagtccaacagcttctaacaattttcatatacaaggtaaaaatgaccagtagataatccacaagggttaaaaggaaaaagcccacatacttcatcacgaagagctgaagcttctcgctgataccccttatctctcgaatttactaagcgtggtacatcaccaaagtatctgaaaacgctaaatctatgagataataggaactggttttgacaaattccactaaagaaagtgaatagttttcttcacctttgatctctatccttaaatgaatgatcaattggaggaataatcaccggaggtttcaacgatgccttaggtggcatccaaaggggagacgcattcggagttgatgatctactaaacgttgatggccttcctgtcgacgacgaacgcactgaagtcacttgctcagtgatgttcctacctatctaataaaactcataaaaacaaacacaaaaatgagaaaaatcacagcagccaaatctgtttcttaagatctcaattacgaaattttaccgcaggtgaatgcgatcgattacggcgagcgaaggaaccgttgataggtccagaagaaggaggtgcgaatttgaattcgtgatcgtcgtcatcatcgtcttcttcattgtctttgttctgtaaagccataaccttcgctaaccgttgagccgccgctttggtggctacgttttgagttcttttaacggttgataagccaccaacaccaccgatttgattccggtgagctggagacatcgacggcgatctagattccgtaccgttggatgatctgctccattgacgaccgtacactgggctactcggtctcctgagatccatcaggagaacttaaagccagattcaaaatcactgaagagaagaagaagatatgaacgcggtggcgtgggagggattttggtaagcagtttaaaaaatgtgaaagagtggaaacgacgccgtttaatacggaggagaacacatgcgtcatcgattgggattagatttggcggaggtaaaagtgggaccactttagtcaactgcagatttgatttttaattgttatgacataatttaattaaaacatttatataattttaattcataaggcaagttaatatattaagaaattgaaggaaaaaaataaaaatgaatgatgtatgaaagaaaaagaaggtaaaaaagaggaaatacatgtgaaaattatgtgattatgtttaaggacatttgtgtctaattatgaaactcaatcacaaatatataattaatgagagatattgtatatttaaccatcaatcttacttctccatatgtatgtgattttcttgtatataccgagtagaatttacactaacttatataccaattgtattatatttctttagtttgttaaattatttagtagaatttcgtgaattcaataatatgcacaagtaaacaacatacatatgtttactagtatgcaataaaatactgatatcattgaataagtaaatttagtagtatttagtgacattcaaaatttagcatagtattattttgtctatcaaagttgaaagtttttgccagagtgaacaaagacacaaaaaagaacatacgtattttttgtctattgcgttggcagaaatcttgaaggctggtgagctcaccatagagcgagtaagaagaaaaaacattaaaaaataatgaatttaatgatttgtaaaataaaattcattcatatgttttggatttgattctaataattttattgtaaaaaactttttgtagttgaaaaaaaaaaaatagaattgttttgatagttacatgacctcattaccacgtctttttgataagattgtggagcagataattaataattgttggactattggtctatctagacaactaacagaactagacaactaacagataatcaataattgttgtaaaaaatctgtatcaatgcaatacctatttaatggtgttaataaagacaatcttacgccaagaggagccatagataaccaccttagcacaaaaccatttttgattaatgaaggaacggtgctacaaagactttgtccactaacgaatgaacttggcgttgcaaataaagctttagaacaagtctctaagtttatgaatatttatcatgttatgcttctcaccggtcttggtaggatgaacggtgttcggtttcgggaagcgcatgattctatggggaaacaacgaagagtagatggttatattaagctggttatggatatgcaatttatatctcatttcgttgagataaaagagttttattgtacgtctaaaactctaatttgatgtttatgtctgaaactactagtgatcatattctgtaccggagttatgttgaggccttcaaagctcattgtacgatgttagctcatcaggcaagttatcacttttgttatcaatagaattgttttgtatttaaataaatcacataggaagttaatgtttgacaatgtataaaataagcatttttcttacttaattgattctaataatattttttagttttaatttaaattttaatatcttaaatttgttattatttgttttttttatcacatgtctaattttgttctaaaattgaaaaaaaaactaactaccaaacaaaattattttttatttttgttttaatattaaaaacaacttttttttttgaaaatttgttggtcaacgacaaactaagtcaattggtgtactaaaattgttcaatatatcgtcatgcaatacatatatttttttttgttgcaaatgacttcgacatgtagtagtgagtgatgattttttctttttcttggacacactatgcttttgcaatgataaccgatagcgtattttgaaatgatcagcatgggtatattaaaaagttatataagtcttggcatgattaaaattttaaacgtgaaatgttgttttaaattagggattttccaaaaataaaataattagtttttatcttccaattcaatcatgttaaccttactaacaacagtgaaacatattataagaatataaacaactaagtttaaatatatgtagactgttatgtcatttgtcaactccaacgaactaacgaactccgctcgcgacaaagaaaagaagattccaagtgaaagaaaagattcctgttaactaaagcctggatagttgtggatactttccccacctagtgtcccaagctttgaaagggctcaaagatgagatttttacaattcttgagataggtttaatggaaaaacagtatcgaacacaaccctcgcaaatacatgccgaatttcgggaaaatatcctgaatttaacgaaccatactcgatcttgcttccttgcttggcctcaaatccaattcgtgtctcttcgtttttcacacaatcgaagattctgcctgctctaaggtacagctgcaacggtataaagacctaaacgaaaacaatatcaacagattaggacattgagacattgatttcacacatgtattaattgtgacatttgttaagatttttcaatggatacttaccaaatcggaatatggtgcttgagggtaagctgacatagctttcgatataaaatacgcatcagtcatctggtttaaggcatcttcgatagaagcatcaagatccatgacctcgtccaacagggtttggaagtcgagattctcctcgggctctactagctcgaagaagcttttatcgtgtggcctagtgatcttctttgtgatttccacagcttctagaatatctccacagttgtgaacagcaaggctaaacgcagcaaccactataggacttcgaggtttatcagcaagtgctttgtgaaacgccaagattgctatcctgttatatattatgtaataccataagacaacaagaaaaaaatgtccaactcataagatgagatatgaattcagatgaggatctatcttaccataagctgctgtgacaaggcctatcaggtgctaacaatttatccaagttagcaaagagagactgcatgataaaatattcatatttcagtttcttgactcgatgttctaaacgacaaacacatctacaactatctaagagatgctttctttctgaccagaagcatgttagtccttttgtcacgtctcctgaaaccactgcgtgcaagatatgctgcctgtgaaatcaaagttagatagacaaacattagtaataaggtgcaacaaagagacacaaataaaccctgattccatttacctgaattggtagaagaatttcaagtatcccaaatttccacagcaatctcaaagaagcctctgctgatccataagctaacatgtaattcatttccatcaagatccttccctgaacaattgacacagaatcatttatgaacgtgatataggccaacacgatataccaagcatatatttctttggaggatagacgcagtaatgtgagcctaccttgtcaagtctttgtactagtaaggaaaggttcttaataaaatgagcggtttctttggacattctgaaacctaaacgcgcagcaattcttattgcacgaagaatccgagctggaaatatcataaatgatgagcttgataagttttcatcatatagagccttaatgggttgcatagaaaaattcttgtttttcttttgacacccttaccacagtcctggtgaaaagatgtgccagcgtgaatcactgttcgaacctgtgattgtagaaccacattttgaatacatatatatcaccaaaatggtgtgacataaatctgaaagcaaattagagtagaatacattcacactttagcttttctaatatcttccattcctcccaaatagtcatatacgactttggcatatggatcaaacatcaacctgagataggaaaaattataagaatctccaaactactgattcaaaaagaaaacactgaagtatataacaagattacccgttaattgtgaaatcacgctgcaaacagttattcaaacggatacagtcctcatcaccatctgagccactcgattctttgcattcagttctcgtatttctcgaagaattctgtgcagaggtactaaaactcgaaacctactcaaataaaagaaagtctatgaaaacgcaacaaaaacaaatcgaaatccaaaaacaaaagcttttcctattggtatgcatacattgtactcgaaagaaatagaaagactagattaaaaaaaaaaaaaaacctctattaaatcatctccaatgtgtacgtgacatataggaaaccttcttccaacaatttcacatcttgggaaagttcgaaccacctaaacgttaacaatgccaaatcagattgaaattatgttgacagtaagaaaagaaaaaaacagaacaagaccaacctctctaagttctgcagaggtaagtatatcgaagtctttcggtgtccgcttcagaataagatctcgtacacagcctcccacaaggtaaacatcatgtcctacagattacagaagcagtatgagatatggttgaacaaagttttcgaaacttagagaaatctaaggactttgaaactaccaacctttgcttttaaggccattaagcacttttcttgtggattttgcaatcattgagctgcttagtccaagatctttcgaattcagttgtttccactcacgatccccttcattttccaaatcaaccaaaatcgaacagagttgataccctaacattatgagtaggaacaatggattgatgactaattccagttcaattatggacttaagcttacttggttcatcagaaaccttgtcttgacgatcactgtccgtggcaaaaccatctgactcatccattgtctcaattgcagcagcaacagtgttgaaccgtatctgagagcgtaaaaaatcgaattaagaaagtaaaaacatataacagaatcgaataaattgtagaactggttcatataaatagttcaccttccataagcagtgagactggagagtacgaacaggggaaaaggatctgcaagcaaaacccacacttgaaatcgccatggaaattggaaaggttcaacatttcatcatgggttttcaaactttaattcagtgaattgtgactagaacagagagacttgcagagaagttagggttctagttccgggaagggtttttggcggataccacgcgccatcgccacacgccgcgggactaattgatacttgaaactattgttgtttcaatgttactctttagaacatcttgccgttttaatgactgatctaacaactttaattatgttgaccacttttattttaataattgtaaatgtaaacgccaacaataaatcaatgagtactctatgttcgtgcttgagttttgcgtttacatttgcaaaaaaatactaaaccctataaaataatttttatttaaacatgtgaaagtttgtgtactcgagtaaatgcaaaagttatgaaagactatcaattttaatgcataatcacaaacttaccaagctttaatttgacagataatcactaatttgtggttaagaagatagatactagtatataaggtcatggtgtaaaagtcttcaaatacaatttcttacatcaaatacattcatttgtaaaggaggatattgggtgaatatgtcaaaattttataaagtgaaaaaaataaagttgaagcatatattgaagaaattatatagatgaattatcctcaatttttattaaattagtcgcacaacaaaaaattaaattggtgttggattataaagcaggtggactgttgtccaatgaaattggctaagccaaaaaagggaaaacaaattaaaccccattacctaatttataaaaaaaaatggaaatatgtgtggaaacaaatctataaaggatgattaatatacaacaacttatgattgtttacaaatctatacaaagcaagatatatatagaaacaaatccgaaattttaatgacaaagataaacaatgcaattaaggatttgtttgtttgggaaagaaaacaaaaaaaagaaatatgacaagagacaagagctccagaaacacgtgtccactatttgaacgctactctctcttcgtcttctctctctctcacaatccaatttctccagataaaacctaaataaaatccctttctgcgcatgttagcaagatatggttccagagtaaactgaagaccaaacaaaaaaaaacgcttttctctccttcaatttctccgtctctctctcgttttccatggccgagttacagttagtagaaggtcaccagattaacggcggttttatcccgccggcgataataaactcaatcgaagcaccggaaacatccgccgcagccggagtttcagtcggatcgaaacgattgagaagacctagcgttaggttaggagacatcggcggtgaccagtaccaccaacacgtggttgcggcgtacgattctccgcaagtccgacggccgaaatggagacctagtggtggtggtggtggtggtggtggtaacaggaaggagccgaataatcagagtgggaagacgacgtcgtcttcgaggactcgaactatgacgaatttgagctccggtgggtatgagaatactggaaccctagatgaagatccggtttcgattgggagttggcgggttaagaaatgggtcaaatcatccggtggagagacggcggcgacgacgacgacgaatacagcttcggcgaagcgagttaggtcgaattgggcgacgagaaacgatggtgtagagcaaggagatgagaaattcagtggagaggaagaagaagaggaagaggatgaagaattgggaggagaagaagggtttagggatttcagcagagaagattcggagagtccgatgaaagaacgaagacggtacgagaatagagaggttgaattgttaggagattggcaaagtggaggaagaggaaaagaaggagtgaagatatggttacaagagttagggttagggagatattggccaatgtttgagatgcatgaagttgatgaacaagtgttaccattgttgacattggaggatcttaaagatatggggattaatgctgttgggtctaggaggaagatgtattgtgcaattcagaagcttgggagggagttctcgtgaaaaatggtggaagagttttgttttttgtgaccagccattggcaatgtctgaaacttaattctctcttttgatgtttttttggtttgaatgtaacattttagttagtttgttgtaatggtagaggaagatgaagaaggattaacttatttgtgattgttgtaccttgtggtttttgatggttgggaacttaattgaccaatttatccaaaaccttttgatacaaataatccaaacatagaaaacagttgttgtccggagtaataaaagaactctgacatcattcaacgatattactatacatttaaactcttggaaaaacatggatgaagaatcacataaatgcagtagcaccatggtaaacaagacttgaggaaaggtggactaactctgggtttgtgttttacttagagaggaaatggctggacccctgagaaatcagatttgtgtcacatcagagagatatggagaagttaacacataacacagcatttgcttgcgttttcctggatgcatctctatttcattggttaattcttcaatccagcttgatgtcgtttttcgactgttctattttcttcggctctgccgggaaatatttgattccgctaaggtcacctactttgcttataacctgtccaacacaaaaccacacacattgattcaaaacttgtcttgcattgaaaccgagctctatcgaagcatatagatctattttagcagttttgtgctttgggacttctgtggaatagcgcttatttgtaataagaaaaaaacacaagtgggtagaatgcaatattttaccttgagggctcttataagatcttctcttgaatgagatgcggagatgcaaatacgtgccctagccagcagtagaggtgtagctgggaaacccacgaccaccactgccacctgttcagagtttcaaggttccattgcacccacaagttaatcatttactttttgatcttgttaccttgtgttaatcgagttctcatatgatatttggatttgaataatagaacttactttttgtcgcagacattctcttgagaaagctgggatttttgctgggttgtaaagcattataggcatgactggggaatcattgtctccaagtacctcaaatcccatcttctgcagctcagcccggaaaaagttgctgttctcacgtattcttgctagcttttgtgcccctgttcagtatttgagaagaatgggagtttttaggttatgagtcatgacctgattagattgtgctcagtgacccaaatgaggccaattaatgacacggtgagaaaaaaaatcgagtacctcgatttgaaccatcctctcccagaataactttaatggcagatataatttgttgtgcggaaggagttggtatggatgttgcgtaaagatgagctgggcattgatgcttcaaatattggatgagctcctatagaagttgaataaaaataataaattgattatacttttgttgaatttaagaagtgtacagcttacctaagtatcacatggtatgtcgtatagatactgaaggcctttatatatatatactaatcgtcatttcgcaggttcaaaataagttttgacttttgagtgagcgtttttttggttaatggtttatatttgagtgaaagttacggctatcaatattctttttgagctaaactaaaaggtcagaaacttgatttaccaaaacaagactgcaggagatttgcaagatcagtaaataaaaacaaatgtagcattttctaaccttagatccagcaatatagccaccacaagacccaaaagattttgtgaaggttcccatcattacgtccacatcagctgtgtcaactcccaggagttcacaaataccctttcctgttttaccaattgccccaatgctgtgagcttcatccaaataaacatatgcctgaaacgaagatagaagataagttaggtgtatcttttcacgcaacaaaaaactcccaatagtttagaaaatatggcatttcaaagggtaattttagtcaatagagttccttaatttatcgcttatattgaatgtggcacatagtgaacccagttactttttaaggggtatttgcacacacaaaatagtttcagttatcaaccaattctcataatcagtaattcaggaatattgtctcaccttatacttcttgcatatggccacaacttccggtagatgacaaatctccccttccatgctgtaaataccttcaacaacaacaataattttcttccatggtcgatgtgtcctaggttgaccttctgcaatttgttctctcaaaactcgttccaaatgggaaggcgctaagaaacacaagcaagagaatatacatgtaagccatccattatatggaaagaacctctgaagctgaaacacaacaaatgcttactgttatgctggaaaacacggatagtggctccagaacctcgagcaccattgacaatagaactatggttcaaagaatcacttattatcaaccctccctgtatacaagacatcacaggaaaaaatatcaacttaagcatgggttttagaaaagagacaacatacgccttcatcataaagggtaaaccaatgcatacctttccaatcaagactggaatgatagccgaatttgttgcatagcccatgccaaaaacaacagcagcaggctttcccacaaacctagtaacacattcctcaagttctgcatgcacggatgtagttcctgatagcagaaaaaagtttgtttagaaacagagccaaaatggttcttgaatctataggcaaagacactttacctgcatcaacacgagagctacatgtacttgctgaaaatttcttcaaggactcaataacacgaggcgtgcaatattcatcaaaagaaccaaacccaagataattgtaggaccccaaattgaggcacctgctagtttttgttgttcgcctgcacagagtcaacaccaacaaaggtttactcagcaaccttcttaatttagaattcaaatcttcccctaattaaacttgaatgggacaattttacaagactgtatcaaccattcgaattcagcattttcatattctcccaacagaatcaaagaagctacgactactgatagaaaaacacaagtagacagactcacttaagcgtcttgttgttgtcattagagtagcgctcaaccacatcaaaccaagcatcaggtgcactcgatataggtcgttcaaaacaatccttgaagcaaaacggagataaacattagtcatcaagcagtaaacacgagaaactcataagccaaacattcacaacgcttaaagcttgcataactacaatgccaataatcaattcgattttgttaacagaatcatagatttgataatgaatttacctgaatccgatgatacaatcgcctgatatagaaatcctcatgccccaaacagatcggcgcgtatccctgtcgatagccaatttcaccggaataagaagcataaagttaaacaaacttgtacattgatccacatctacgtacattatatactggagaaaacagacagacctggagattgctagtgaaccaccaatcaatgaagcgacggaagaaatctcggagctgaccaaaagcaaagagcaatccatagctgaagtaggtggatacagcggttaaataaggaatcgttatcattttctccaagaacggcttcgtcttcttctccggtcaatcaacttgcctcttcctctcctctctcgccgtcgctaggccgaatcggaaaacgaatttgccttaggcgatctggagaatatttccgactctctcagaaattgaaagttgagagacagagacacagacagagatttgaattggaggaatcttttcccctccgtgagattgagaagggatcggatcataaaaccatttcttttcttttttaatattaaaatatttaatagtacagataatttatctttagaaccttaaaacgaaatagcgattttacgtatcttgggccttggagtccactaattcaaactaggcccaaatgtgatagctgatgacctgtttgtttagaactttaaaatttagtttggagaaagaaaaaaatgaggttctaccgggagtcgaacccaggtcgcaggattcaaagtcctgagtgctaaccactacaccatagaaccagatgcttaatgagacaaaagaatcatatttattagtattatgatatatttggacttgcatgttattttagtttgattgatttgtttcggttgcaacatttttagttgggttgaattgcatttaatatgtcacccttaatttccatatatagagttcgattttatgaattaagttttgtaatctcctttaaatccaactgttttccatgtgaatattgcaccaacgagtagatgggagaatggctggtggaaaaagaaaaaaatatgttgttcttctatagcagccaaataaggatttctaagaattaggatatgtcattgttgcgatgaaaaagagtctcgtctttatcaaaagaggttacataatttacaacactccgatagatacaatgtcaagtcggtttttgagagaaaaaaaaaaaaagataaaacattttcatcgtgcatgcaccaaccaagcgagaggaaaataaaaatcaatttttccttctcaaatttcgatttcgttactatatgtatgtgacttttaatttgatattttggtatatttattcgatttgtaattttcatcttgcataaaacgagtgagtaaggaaaattcgtgattatgtttgatttggtttcgtttaacttaccaagaattatttgaaggatgaataattcaaattggttttttattttagtccggtgtataattttattaaacctaattgaatttaattttaaaaaaaaaaaaatatatatatatatatatatatatactttttctttttgaatcagcaaatgaatatagactcggattatatttggtctacaaaataaacaactaactgattaatttgcatacagtttaataaagttgaggaaggactagataaaccttcgtttaaatacgtccatacacctagaaaggcacgaaaatgcttttataaaaagatcaagtccttgatgagatttatgaaaacgttttaaatatatatatccttagcacattccattatcatatacagtacgatatgcaatatgtgagtacaaatatcttatacgtctgagcagataaacttaattagcaacataataatatatataaattttgtaaagaagagagacaattgttgtgcaccaaagctgccggccagctctactaaaatccaaccatattcgaaagttttgccttataattgatgaattatatctaattcatatcttaacggcaaagatgagagtgccatagtgggagtttatataaaggatatatagagttatagacatacatatacacatacgcaccaagcacatatcataattggtttaatttactaaccaattccggtttttcatttataaataataatgtataacgtatatagtttgtgaacacgatcacctatttacaaataaaatatgatgaagaggaaaaaaacacaagaagccaaagtgaagcatgatctatcaactggctgaggaaatggtaatgagattaggtaaacagtctcaataaccatgcatgtctattgtctacactctagatactagactgcttaagagtgccatcgtaatgaaaatatgcgtttaattgttaatcaaattagtaatagaagttaaaattaattttttacacattatatatgtacaaaatatattccattattaaaataattttcttcttacataatgaaatatgattatttctacgcaataaaaattagtgttaatgttttaagggaataaaagtaattaatagagtagaaaaatataagaaatagacgtacggtgcaaatacgattagctaggataatatatataattgaggatatgttggcattaattattgcgataaaaagaaatacaattatactacagctacacaagttgccaagtgttctatcagattttggaaaagaccaacatcattgttcttagtatgttaggaaaaaaaaagagaagcaaattatttataaaaaaataaagaagcgaaagagaaagagagaaaaacaaagaaaagggcaaaaaaacacaatgtgctgatattatctcgttctcctttacatgggagtggaatcatcactcatctattgtccaataaagccttcaataattagagatatcactctacactaaaatatcaaatgtggcacgttacatgtaaatcttatctcctgtttttgttaaaacatttttaaacgattttctttttaattcccataaataattttcttaaaaacaacgtagtcgaagttagtttgatttgaaaccatcttttaggctaaaattttcttttgcccgaaatattttggcgcatagaaaaaaatggcacttctttatcaccaaaatcatattaatggtttcgatcatataacgaaacttaaaatcataagtaaaattaatggaataatcatattctttacatattattttaggctttttacgttttttttttatgtgttatgcacgcatattttctctcagttttttttttttttgaatttgattctcacattattttcatttctttaattttctttgatctatggataaatcaatttcgaatccaacttcaacatatgcaattcaaatggaattagcaaaacttcttgatttggtgattaatgcatatttaaccatagtaaatgattatatataaaatttcaatgccttttaaaagttaaccgttccttagatatgtcaaaatattttatagttaaacattcgttcctattttagaaatacacattcaaattcataattgaaaagaagaaacatgaacttttaaacatcataaactttttcctataaacgagaaaaatttaagaaaaaatgatatttatctagtggcaatatataacaaattcggccaatcatttcatatcctcttcaatttatcttttatatctttctctttttatataggggcctctagataaagccgacgtactcgttatcttcatgcatgttttattttacttttaacaaaaattcgtatcttttgcatggaacacaattccacgtcacgattcacaatggacatggttagccatgatttgccaaaaagtttggaatataaagcattcaatattaaccccatgatgtcatatatgtatacatatattgattgagattagtcttttctcttttgcatcttttttttttctcttttgcatctttcatttggtcagataatttttcttttacaataattggaaaagtatagttataaattttaatataatctattgtcaacaagtaaatgttgatgtgaacgtaaatagctgttgttttaaaaactgtaaaacttttagaggtgctggacttttgttttttgatgcaacgaaaatgatcctattaaagaaagcatattattgcctttggccagtatattttaaggttctttcttgggctgaggactcgagtaaaaaagcggattttaggatcgatgcattgccgtacataagatattgagattttaatttgatgacaaagcagagtgatgagggttaattacaaacatgtctatatataagaatttagaaatatttggtgatcacaattttagacatagattaattcagttgctatgtaaaaaactgcatatgcagaaaacaatgtcataagtcataacctttgcatttaaatgttttagatagaaatactacaagtaactaagaattatctactaagtgaaaacaatatatatatatatatatatataaacagaacaaacttatttcatttgcattgtgtttaattacggccggattataagaaaacattatatatttattataaacagaatatattagtatatacgaccgtaaattcaatatattttacatttcgaacaatcaaacttaatattgccacgttgatatatatttgtatgtttgtttttgaacaaatatatatatgtatgtttatcacatttatataagtgggaaaaaaaagaaacagaaaaaaccttgaaatttgtttgtttttctatccgtcataagtatcagtgaccaatttatcaacttctcgatctgacaagagtgatcatttcgtagttacaatgttcaaattataaaaatggccaaaaaaaaatttggtttagtctcacactctcaccgacaacttacatataacctttaaagcaaaaccacaagaaaattctaactatttaaaacctttttttgaggggttttaaggattatgaaagatctgcgagacaaacgaaaatagaacgagggatatgaggtccaaagcagaacaacaaaacattatacttgatatggtttgtttttcatagtcgaaacattaattgtggtcttttgaagcgtgagtatatagtgtgtcttcataatttaaagttcagctttttttgtctattgatttggaaccaaagtatatctttcctgttatatctttaccttggaactatttggaatctgataattgaatacactataataaacatgattgtttttacttaattgataatgaatagtatgaaaccatgtatgcccggcggctctcttatcatgtgctaattgctgacggctaatttggtgatccctctctggcagttgtctcgctgatgatcctggcagctaatcacaagatttctgagctactaactattgaacctcatgtgtcatctctccgctgaattcagaatcagtttactttccctcaccctttcccaatttgcatcctctaggcttcaaagagaaccccttgatcaattttgaggagaaaacgatttgattaatccctcttaatgtttatttctttttatacaatgctaattaactactaactattgagtccaataggggcttttgtacaatctcttctcaatcttaagtttgaaacccttcatcaaaaaaaaaaactgagctacatggttctggactaattactcttctcacctttttttttttttaggattacttctcactcccagaccattattgcaataagagaaaaaaaaaactaattaacaacacatgagtttgaaccaacaacaagatccaattaatgagctattgtttttgtttgggctaatctcaagccgcatgtccgagatttttagatataatagaatggaggtgggagacatatatatatatatataacggtaaatttcgaaacaagatcaaatgaagcttcgtttgcattagagacgattaatgatttcgagtgtttctggcgacatgtgtggtgtgattgcatctaaattaattcgaaataaaaataaaatttggaggagcaaaatatatcacgagcgagactccaacatactaacgatactttaagtctttaccactagaagaaaaggtttagtattttttgtcaaaacaaaagaagaagaagtagatatgtgattaaaaatatattatatcttcaaaagtagtcatagcagttcttcatatcatttcgtgtaaatataaatttctaatcatgtattatgtgtgttaattaactaagtatgacgagttatattattaaagattttgatgatataatatattcttaaccacatataatcttcttctttttttccccacaaaaaaaatccttattcatacttcaggtaattaacactcctgtatctacttatcatttttcttgtagtgaatttagttatatttgaaatggatataatatttatcattctgagtatcccagaaaaacggttagtccattgtcccaataagtatagatttatctaaattaaatggtgaacaatctcgtcgttatatacttgaaataatatttggatcgatgtccttttcatttataacttttactataaataagatcccacctaaaaaaatgaactctttgaaaaatgaaaatcatgtgaaacagcataataagttactaattaacctaaacttgtgcgttcaaataaccataaaagtctagaatagattaaaagttttacaaatgaagttcatgctattgttattttgtcttattagttatgaattattggagtttgttctttttcccaaatcaatccatcaatattattgttttaacaaaatcaagcgctttactattttcacctacttcattatcatattaattataaacattgatctactcttgaaaacgagtaaaattaactatttttgtatagacaatttaatacgtaacgcatgaaactacgaaagacggttcaacctactatcaaaattgtctttgaaaatgtaatagtttcaaataaaaaaatttagtaaatttctagggaaaaaaaaaattatgggtgagttctaaacccctcttctattttaattttatagcacactttccaaccgaactaattttttgaaaaaaaaacatatttgtattccctaagaataacaaccatatatatgtgagaattgaggtcctaaccttcatttaattgtccgtgcatgaccaatttttgtgtagttcatgttggagcctgtatataaacaacttacattttatagtctagtgtaaattatatcttgaagtttaaacttcatccgatatacaagaagtaatttgtcgaccaaatgttaaataaggagagcttatataccttagtttagttaacattcaagcactaattaaaatgttcactatatgaatctaatccgagcttaaccatatagaaaggaaaaaactcctaaaaactaaaaatattatccaaatattagttaagctgtctatttctctttccctcggtttatttttcctctttaaaaagtaagacaaaacgagaacattattagttcaatatatatattttagtgaaataaacgtaatttcaagtaaaattgaaataagcatctacaaattattaaacttgagaggacagtcgtacaaacaaatgttaatgattgagaaacgggcaaacggctaaaaagttttttttttttcttcttcttaaaattgtgaaacgtaaattcagaaagaaaagtggctaaaagtgaaaacggcaattatatttgcgtacaaacgtcgtcacatgaactaattgtctaattttcttggaaacgtaatataattaagcacggacctcgtaatttagtccagttttattgacaaatgaggatataaagtgtaaaacatagaaattaatattgtatatattaaatgtattcacatatataggtatatgtgaaataggtagaatctagacatagaacccttaaaagaaaagagttggcctaaaccgaaatcgacatgcattatttatgaaaaagttattatggtgttggaattgttctgtcaattattttttcgaagagacgaagagcatttttcatttctgtatagtagtacacctacaaagactaatacttttagaaattatattgttacttttctaaaaagattgaaaattcttatatgattcacacgaaacatttatctttattgcctttcccacacacttcccttgttcattctcaagacatcccctctataaatacttgaagtcatcagaatgctaaaaagtcgtgccattagcctttgatttcagaaaaaacacttacaaagctgatatctttcttactacttcgaagaaatcttcttctcccttccaaaaaaacaatccctaaacccggaaccaaagatcgacattcatggctctcttcgacactcataacacatgggcctttgttttcggcttgctcggtatgagttctcacgttcatctctcttaaaatttgatatcaccagaacctagctatatcctaattttgatatcaaaaccagtatatactaacactagccactttcatttcttatcgtgtaattttcaggaaacctcatttcctttgctgttttcctctctcccgtgtaagtattactattgcatcattacttcactctgttcttgtttcttcataatatatgtcattacatatgtttatgtttttatctaactagctagctagagctataatgatcatatgatacaaaacaaaatgagagatattaaactaagagatagatattgattattcgatgcaggccaacgttctataggatttgtaagaagaaaaccacagaaggatttcaatctattccctatgtggtggcgctcttcagcgcgatgctttggctctactacgctactcagaagaaagatgtcttccttctcgtcaccatcaacagctttggttgcttcattgaaaccatatacatctccatctttgttgccttcgcatccaagaaagcccgagtatgtaacattaccaacataaatatatgtatatgtgatgtttattgtatgtgtgatatttattgattattttggtgcagatgctaacggtgaagctcttgttgctaatgaactttggagggttctgtttgattctcctcctctgccaattcttggcaaaaggaaccacacgtgcgaagatcattggaggtatctgtgtcggattctctgtctgcgtttttgctgcgccgcttagcattatcgtaagtagtaatagtctctagctaatgttactacagaagtatatatgaagaaaatatgatttttactaattaggtttgtattaaaaaaacagagaacggtgataaagacgaaaagtgtggagtacatgccgtttagcttatccttgactcttaccatcagtgcggtcatatggctcctttatggtcttgctcttaaggatatctatgttgccgtaagtcatcattatcataatcattatcgttatttgcatgaagtggttgcttttgtttctattttacctgagcctatgatgctaatcatagataaagagagatatgaattcacaaaaagcaaaacccttttgttcggtattgttgtcgttttacatttaaatatcccactaaacactaaagattatatctttaacaaaagagttctatctacaaatatgttacatagacttgtacatgtattgcacgtaacctccccataaacatatatatacaaataatacatagggggaaaatctgaatttaaaaaaacaaacaggttttataatatattttagtcactacaataacactgattttttttaattggaaacctcaaaatttataattgtacacattattttttttgcaaacatttgtaaaggataaagttcatatataaaaattaaaagtaggtatattgctttggcctttgagcactaataaattatctttaatttcacctttttatatgtctttcaatttatgcagttcccaaacgtgattgggtttgttctaggtgcacttcaaatgatactctatgtggtttacaaatactgcaaaacgccgtcggatttggttgagaaagaacttgaggctgcgaaattgccagaagtgagcatcgatatggtgaagttaggtacactcacatctcctgaaccagtagcgatcaccgtcgtccgatcggtgaacacatgtaactgtaacgatcgaaatgctgagattgaaaatggtcagggagttagaaacagtgctgcaactacttgagtttgcccaagaaaccctaataagaaacctatttgttgactattttgactttgtacccttcttgatatacctatcaatcaccattgtccacgtgtactagtttcgttgtagtaattttcaaagtttatcgaagtatgcgtattcgaggattaattaaatcgggaattacattttcctgagttaattttttctctttttcttttacttatgggacaatgtaatgaaactatctgttgcatataaatattttccaagttgaaaagaaaatgaaaattctcaagcaactatcttttttagcatgcaaaaatccaaaacaaaaactcaaaactattagttttacagaaaatgtcaaaaaaatgattgaattttaaaattagaaacagtttaattcttaaattctaaaatgccaataatatgtaaaaagtgtaagtatcaactagaggaaactcataagtttatgagtgatacatatatataaaatgaaattggccatcaaatttgaattgctgaatgttaatccactttcagttcttagtcttcgaattttaatgatacatatatttttctaatcgaagtgtcaaatagtatttgttttcatatccttatttaattagaattttcattgtatgagagtttaggagtagtgttagttacaccaatatctcgttccctaaacgtatgtatgataactatgagtatatatattttgatttttagtttatgtttaattggaaataaaaataggcttatatgttttcttaaagaaattaataggtttatatatatgttacaccccaaaccatatgatacaagaaaaaaacatcaaataatcccataccaaacaacaagatgaaataagtatccttccaccttaaatgaaggacaaaacatgaagtttaagacctatctttgagatctagttatataagtcaatgttgtatggtattgaatccatgttgatcggtgcactaggacctgagtagtaaggtactgaatcatgttgaactccagaagtcatatgagatggagccaagtggttcaagtttgttccaaaaggtgagagcattggtccaaccattggttgacttatggtggacgttccatacataggaatattggccgatggttgcgaagcgacttgtgtgttccatatgatgggtgcatcatatgtaggatggttttgtgatggctgtgaaatgacttgagtggcttgtgcattccatatgttgttgtgtgtaccatatataggaatgtcaagtgatggttgcaaagtggtttgattggcttgagtgttggaagcagtagcaccattgttgtttattttttgccatgtgattggtctttgttttgttgagatacttttgttttccgcaatagtgatgtcatgaatgcttggcctctttctctttttatcctctgagttgatatgtgcaaagtatttttgagcatgacttgcaacctgagttgatgttcttgtcactacacagtgacgagaaatactacgccaatcacctttcccatattttttcaaaccatgcagaaattgtctagtttcattaagaaaacaaaaaatagtgtgagaatcaacatattttgagttctaatatcaaactgaaaatgcaataatgttaccagtgaccacatatacaaatcaacacattctgagtttcacattcagtgacctgtaaaataataactacgtctaaaatattatttaaaaacaagtgagtttagtaggaacctgtgttcaaaaggcttccaaggaacaccccttcgtcgtttttgctttagttttgatttacctttgtgtttagactcatatttgcgatcgttgccaccttccaatatgcttctttctttaccaaaagcattgtgatttggttcttctaaaaaatcatcataatctggaagacgtacacatccagattcaatcaacataacatcacgagctaaaatgttgtaatgctctataacttgttctaaagtttttcccggaacaactgtagcaatttttttccaacgaatctctgttttatcgttataaattgcaagggctttctcgaaagcaatatcatcatccttgctccaagacgatccgacactaatttcctgtcctaaattcattttctcaaaaaaatctattacttcaaacaatttagatcaaccaaaatactctccgaccaaagaaaaaaaaagaccaaaacaattgatttgaaatcgtaaactttgttttatgaaccccacaaactagtattgatagactagtaagaaccccaacctttgattatttcaagaactatgaacagaagatggaaaaggatcaaaacaccagttctatagtatttatagttaaaaccacaatatttttattttcctttttttctctaattatggtgcttaatactttgtaccatacgacaaatggtatataatatcaattgactccttttatgttaggaaaataatatatagaaataaatcttcttttcttggcagcacatagaaataaatctaaattaaaattttccattttataggattaaataaaattgtgctggtgtcaactgtcaagcaacaattttgcaattccaacacatctaagtcatgaggccaaatttaacttttaataaattgccctatatatctttaagaaaataatattaaataacatcttaagattccatcacattttgatgtagaatattctttcacacgcctagtgagacaagaatcataagaatattttttaaataactaaatatgtggtctctacatttttttaaataattgaataaaaataaaatacatttttcttaaaacgtggagaccacatatttaattattagaaattacttagtaaaactaaatatatacatcttaattatttttttcttaattttaccaaaaataatatatatatatattaattaatttcctatgtgtaaatagatatatatgtttaaaataatcttgtgtctatttaaatacgtcatcatagctgacgataatggccaatgactaagcatgaacatttgggtactcaagtcggtttcggtttgggtctttcgagttcgggtttttcgggtttagaagtttaggatccgttcggttatatgtattatttcaggttgaatttggttcggattcacctcgggtttagttgattcgggtattggtcgaaaaacttggtaaataaccaaaactattttgggtttgagtactacttactgaaaccttgtctaaatatatccaaacatgcaaacatacataaaataaaagtatccataaaacccaaaagatctaaaaataacacatattttcttaagacaataacataatacaagaagtaaactttattttgagtttgttccataatccaatcattaaaaaaattataaattaaagttatcagtatatatatatatgtctgtacatgtgtgtatatatatacattcgggtaataaaaagtactcaccggtatcagatttggttcgggtaatatccaaacctgaatttattttagaacagaatccgatcagatattttacaagaaccgaagtagagcggattcggattattcgggtcgggtttggcttttggattcgggtattgcccaggcctacccaagacacgctttctcgcttattgtcgacaatctccgaagacggcccacttgagaagttcaacttctaatctatcacattaatgggattaaagtctgcccgtataaatgcagacaaaaaataaaaaatctcaaacttctcttattaatgggctacgcccatataaacccagacaaaaaaatggaagaagtaaaacttttttattaatagataagtaaaaaggttataaataaaaattaagattagagatgtgataaaatcataaattaacaaaatatagaagtcttcgaaaagaaaaccgaagcggctagagagctaaactaagccgattcaatcgtggagtcgtgagacgaacaaaaggagagagattccttttgggtttcgccgtgattcgatcttcgcatgtcaatttgaaaaccctagtttttgatctctctcaattccaagctactcctaatttcaaggttcgtctctttccctcctccttagatctgcttctgaattgaaatcttttgaattacgattgtaggaacttggaattttcttagctttttgtttcattgaaccgttttgagattttgatttgttcttagtcgtgaacgttgtgcagaactcaaggaacttcagacgaatttaaggagaactagttttttttttttttttttgaaatgtcgagctttcgtgtgggaggaaaggtagtggagaaggttgatttatgtaggaagaaacaattggtgtggcgcttggacgtttggccatttgcgattctgtatactgtatggttgactacgatcgttcctagcatagacttcagtgatgcttgcattgcgcttggtggtctttctgctttccacatcttagtcttgcttttcactacgtggtccgtggatttcaagtgttttgtccagtttagcaaggtaaacagacagtccaatggctgttaacacctattttcttttacagatgaatcttgagttactggtattgaccggtcctgtgtctgtgtctgtttattcacaggttaacagtatcgaccaggcagatgcatgtaaagttacaccagccaaattttctggttctaaagaagttgtgcctcttcattttcgtagccaagtaagttcattcaagattttttgtttaatagtgaagttgtcgctaaagtagtctccatgaatgggtttctatgtttctaggttgttctcgtgatatatgtaaagttcagtgtttttccccttaacaaaccgataatttgtctctgccatttctctctgcgtaaaatttgatgaattaaacccctatactttttgaatcctctttggcgtggaaatgcttgattttatcagtactcttacttctcatgttttttaacagtcttaagtattttgctgttttgcagatgacagattcagcatcctcgggagacatggaagaaattttctttgacttcaggaagcagcgttttatatactcaaaagagttaggagccttttccaagcttccttatcccacaaaggaaacatttggtcattatttgaaatgtactggtcatggtacagaagctaaaattgccactgccactgagaagtggggaaggaatgtgtaagtcgccttgtaatgtttctctacatttatcgatcacttgtttactgtaacgttgatgattgatgttttttttattggcaattttttcgataggctcttattttgtgcgttctgtttttcttttaatatgtcctacgaacctctattaaaacatttctctgtgcctttgcctctgtgcatatccaaagttttgtttgttttttaatctggtttgacactttacctctgtgccttacagatttgattatccacaacctacattccagaagctaatgaaagaaaactgcatggaacccttttttgtatttcaggtgttgtttactttataatgcatttatctaagagctctttttatagttattgtggcgttaagtaatattgtgcttcttcctcaatttgcaggttttctgtgtgggtctttggtgcttggatgaattctggtactacagtgtgttcacactattcatgcttttcatgttcgagtcaacaatggcaaaaagccgcttgaagacattaaccgacctaagaagtgttagggtggacagtcagaccgtgatggtgtatcgatccggaaagtatgcaattgaataactttatattttaccctaaaggtcgtttttgtattactgctctgtctaaataagccaaattttaggtgggtgaagctcttaggtacagatctgcttccaggagatgttgtgtccattgggcgaccttcaactcagactggaggagaggataaaacagtaccagcggatatgcttttactggtaggaagtgctattgtaaatgaagccattttgacaggcgagtcaactccccaatggaaggtacttttttttcattaacatcatctttgtttgttatatgacttctctttgaagttccgctctctagactttggtatttgaagagttctgaattatagcattgcatataacttggtttttgtcatcttacgtgccattcttattattgcatcaacagcttctctcacaatatgtgtaagaggttctagtttctttgtttgacactaagaatcatcaggattaactagtgtgcactacttagtttatcaaatggatcttgcttaatccgttacattataaggtccatacgtgtagtgaactatgtttcattaagattatatgatgtctataataggttccaattgttggccaaagatctgatgaaaaattatcgatcaaaagaaataagaatcatgttttatttggcgggaccaagatcttgcaacattcacctgacaaggtatttccgtctcagcgatatcaaccatttccttcttctgtactttctctaaatcttccatactaataaatgtttggggtcagtccttctctctgaagacccctgatggtggctgtctagctgttgttctccgaactggatttgagacgagccaaggaaaactaatgaggacaattttattttctacagaaagggttagagatctttcctttatttgttatttcatttcagcatgcttgataaattttgattgttctgatctatttggtaaaaaattaggttactgcaaacagctgggagagtggtctgttcatattatttcttgtggtatttgccgtgatagctgcaggttatgttcttgtaaaggtacggcaatatttttttcaggctcttattcaaataaatatgtctatttatactagtgttgaggaaactcatttgcagggtctcgaggatcctacaaggagcaaatataagcttttgctaggctgttcacttatcatcacctcagtgatcccgcccgaattgcctatggaattatccattgctgtcaatacgtcattacttgctcttgtacgacgtgggatattttgcacagagccttttaggatcccttttgcggggaaggtattatctattgtgcttcatttggctatttgttggtcttaagtactctagatcttgagcttgcagcacgcttaaaggaattagtattcattcttgattgtactgtggtcttactagtgtcatactttccctttgctgacaggttgatttgtgttgttttgataagactggtacactcacgtcagatgacatggtaagtcaattgaaagttctgggtttatggtgacttgatttttcttatgataacttcattatcgtttctgctatataggagttccgaggagtcgggggtttgtctaattgtgaagaagcagagactgatatgagcaaggttcctgtacgcacattggaaattttggcttcttgtcatgccttggtctttgtagaaaacaagctggtatgagcaacacaatttcttttcctttttgacgttggaaaactcaaatttttggtatcagttttgctgttgttcctgtttatgggctgtgagaaactccattattgtgactcttttgatctatgaacacatgctttcctatatttccgatatgtgatttccatgtagtatacttcttacttcaaagtttgaaatgaatcttaatgcaagagtctgcatgtgatacatgatacatgtactagtagtcatctttctgaaaccgcttgtggttttttgcgttgcatcaagaatcctctttaaaaaatctgtcatgtccttacaggttggtgatcctcttgagaaggctgcacttaaaggaattgactggagttacaaagctgatgaaaaggccttacctagaaggtgattattgatattttattatcctcttatcctattgttctgattctctctatttggctatttttactaattatttgtttgaagagcgttatgcgacatatgaagaatctatttctcattgttatgtcttattcgctgcagaggaaatggcaactcagtgcagattatgcagagataccattttgcttcgcatctgaagagaatgtctgttatcgttcgtattcaggaggaatatttggcatttgtgaaggtctgcataatacatcatacctgtacaataaatatttatcagtgaatcccaaatgttggatgcttatattttaacttattttcaagggtgcgccagagacaatccaagagaggcttgtggatgtgcctgcacaatatatcgaaacatataagagatacacacgccaaggatctcgggttctagcccttgcatataaacgactgcctgatatgatggtagttacccatgctctcatgaacctattggcttcttgaaaaaactttattaatacctagaaacctgtcagtaatatgccttacagacagaaacaatagaatttcactgctcatctgttgaggtctgtgtgactctctattgcacatcctaaatttatgtcagaagtctaagctccttaaatcagctatctgcttttgcacttgttatgtctcttgatatggtcattttgtagttaacagtatcatgttgttctggattatgcaagcttctgccacatgcttgtaagttgtacttaacatctatcctgtataatgataaccaggtcagtgaagctagggacatggacagggatgctgttgagagtgatcttacttttgctgggtttgcggtaatgacataatgctttgtgttctatgcagctttagtttcttcatatgtttgtatggtaatcgatggtctggtatctccattggtttgtaatggattaatcatgcatcacaggtcttcaactgccccattagaccagactcagcccccgtgctcttggagttgaagaattcatcccatgatttggtaattcataccgtgtatcttgtaatgcgcacacactcatagattattggacctcctatcactaccagtggttcattcagttccttttctactcagtacagaattacccgtaaagcagctttgtcattactccattaaagaactataattgagtattgatatagacatatatatattttggatctttcatttccgctttctgtcttcatctcattgttttgcaggatgctcattcaatcttatattattaaatacacaggatgtcttatccttctttcatgattccaggtgatgataacaggtgatcaagctttgacagcttgtcatgttgcaggccaagtgcatattgtatcaaacccagttttaattcttggacgatcagggagtggtaacgaatacaagtgggtgtcacctgatgagaaggagatcatcccctacaggtgcagtcatatttttaggacagttactctagaattaaagcattctcatgttttataatcttaggtagtcacatgatagcagcagtattgtgtctctctttctccatgctactgtttttaactgtctttgaagtgtgtgctccccttggtgtggtgttttaactttgacttacaatattttgctctacatgtaatgattgctcaagtggcaaagatctgacacttgcatggtttctttcattctcctgcttctgacctgagaaaggatgacctcgtttttgttttcagtgaaaaagagatcgaaaccctggcagagacccatgatttatgcattggaggtgacagcattgaaatgctacaggctacatctgctgttttgcgagtcattccgtttgttaaggtatattacaccttgtaatctttgtcaggtggtttagtattccttagtaacctataaactatagggtctgaagttttttttttttttttctttcaggtttttgcgagagttgctccacagcagaaggagctgatcttaaccaccttcaaagcggtgggcagaggtactttgatgtgtggtgacgggacaaatgatgtcggagcactgaagcaggtagcgtttattttcattgggcagatgccatgcaaatgatgtcttcgctttattttatttctttgatttaattttttttctttcacttttgaaggcccatgttggagttgccttactgaataataaacttcccttgtctccatcggattcgtctaaagatgacaagtcaaagtcaaaaaagtccaaactgccattagaaccagcaagcaaaaccataactcagaatggggaaggatcatcaaaaggaaagatcccaccccaaaaccgccacttaactgctgcggaactgcaaagacaaaagttgaagaagattatggatgacctaaacaatgatgaaggtgatggccggtcagctcccctagttaaacttggggatgcatcaatggcatcccccttcacagctaaacatgcgtcagttgccccagtgacagacataatccggcagggtcgtagcacacttgtgacgactcttcagatgttcaaaattctcggtctgaactgtctcgccacagcatatgtcctaagtgttatgtacttagacggtgtaaagcttggtgatgtccaggctacaatcagcggagtgttaacagctgcgtttttcctcttcatttctcatgcccgaccgcttcaaaccctctctgcagaacggccccacccgagtgtcttctccgtgtacctcttcctctctctgataggacagtttgctgttcacttgaccttcttggtctactctgtgaaggaagctgagaaacacatgcccgaggaatgcatcgaaccagacgcaagtttccatcctaacctggtgaacacagtgtcgtacatggtgagcatgatgcttcaggttgctacatttgctgtgaactacatgggacatccctttaaccagagtatcagagaaaacaaaccgttcttctacgcactcattgctggagcagggttcttcaccgtcatcgcctctgatctcttcagagacctgaacgattcgctgaagctagttccattacctcaaggtctgagagataagcttctcatctgggcatcacttatgttcatcatctgctactcatgggagcggttactcaggtgggctttccctggtaagatttcttcttggaaacataagcaaagagctgtcactgcaaatctggagaagaagaagaaagtttgaagagaaactaaacaggttaggttgaggtaataatcatcaatccatacaattttttactcgagaaagatgttcgtttttggggatcttgttttgccagaaagcttcaaaaaaaaaaacatgagcatttttcccataggtctcccatattgtctcattaccttattttgtcactctctaagaaccactaaatctaagggctttcattattagtctttgtaattgtttcgttgcttactttctttgtataactatgggctaatatagaacgcttaatataacgcgtatccgtgcaaagagcagaagacgacaaacaaaagtaaatctcatcctcaccagaaacgttgtaaataatcttctgtgataaggtcgacggtagatttcaagagattgaccacgcgtcggtgtaacattggtttctccactgattattcatgcgagttgaaaaaggaaaaaagtaaagaaaaaattaccaataacggcaaaattgaaaagggggaagaagagaagaatttagggattttggcggctttagggctctctctcagtctctctctactcccgtcgtccgcttctttttccatttccctctctgcgctctcgtctttgtcttcttcttcttctctatcccgattctacggtggcgctctgatccctaaatttctaggttttaccattttctgtttccaatttcaatcgcgatccgtgcttttttcgatggcgtcgattttgatgctgtgagaagagttacgccgtcgccgcctcttagtgttcttcggtgtgttaaaaaatgtcgcctcctctccgagaaaaaaccctagccgcgatctataatctgttgagttttcttttcctcttaatttcttcaaatcatttctagtttctaggtgatcctcgagctcgattttgactctttttgtttttgttgtcgcgtgaattttttttacagaaaacgccggaagcgttctgacaagaagatttgtcggaaggagccgaatgattctgctatggctgctggtccggtggttatcaagcgcgaaactgaagatactcctggagaagaagaagaaggtaacacctctagagacaacgccttggttgaagtcaagttagagaagcaagaagaacttggtcttctcgttacttgtggaatccagaaacgaaaacgactcgctcgtggagcaagatctcgaagatattcagacaccagcttcgaggaaaagccgattattatccctccgaagcacaagcagcagagagtattaaccactcgatggaacaatgaaaggtagtaaaacgaccaaagcccctttagtttcatgtgttttgatttcatgtttttgtatgaagagagcaattgtttttttatgcaggattaagttcgcagagcaaaccttagcggatattatgaaggagaaaggtgctacttttgaaaaacctgttacgcgacaactgttaagagttattgctcgaagcaagataggtgatactgggctcttggatcattccttgaagcacatggatggcaaagtaacaccaggtggttctgatcggtttaggaggtgttacaatactgatggatgcatgcagtattggctcgaaagtgctgaccttgtcaagattaaacttgaatctggaattcctgatcctacttgggttcccccagcttggtggatggttcagactgcatcatcacatgatcaatctgcggttacgtcaaagcttcttatgggggagattgagcaaatgaagaggtaatatgtttgcaacaactcttgtggttcgatatttgatttccttgaaatgtgcttggagtctcatttcgtttttggtaagcagtgaaatcaaagaacttgtatcaaagcaaaatttaccagatcatgctgatgcaaatgaggtgactttgagatcgtttttttctttatgttagaggaatgtgttaagatgagcatattagagattcagaaacattttttttatttgcattgcttcccagaaactattcaaggaacttaagagttggagggaaaacactgataagcaaattgtggagatctcagaatcgttgacttcaactcaggtcgagactataagcaagtagaacgtatttgtttaaagtttcttgattgaaatgatcttaaccttatgaagcttttgtctaccatatctcgcttattctcagggcatgttcaaggaattgaattcgtggaaagataaagtagatcagcagttactgggaatttcaaacacgctgagcaatctgcagccgaatgggagcacgtcattcagtccagctcaggaaaattgggaacatatattgaagacttccaatttggaagattttacaacgaatggttttgaccaatgggatgaccttattgatggtctaccagaggctgtcaggccggagacctacgcgcttccaacaaatccttgcaaaagctctctccaagatcagtcattgatctctctccaagaccagtcattggtctctctccaagaccagtcattggtcaacgtagatatgcaaatgacagaaaggttagagcagttgtttgtttgttttggcccaagagtaagggtttgatgtttattattgtctaatattttgtttctctatttagcagcatgactagaggtgaatccagaagctccagtcaggaaaaagctgaaatgactccgggttcttcgattactgcaggtccaaaatcagatattgacgacccaacaatccagactcaggtgagttagtcaaacatattagaagcattggtctggtgtttcagttaaactggatggtcaatcttggataatcctctagcctctagattaattatgatcaatttactactgcgcatcttatcacagtctttgcttcattcactataccactcatgcatcgtctgatatgcatcagatgttattgggcaatttttcaaaagctttgcattacctttacttgatgttaaggaatcaatatttgagaattatatttgtacaggaaaccttgaaggagttggtgacatggaaagccaaagcggagcagcagctgatggaattatcaaacgctgtccttgctcttaagggacagaatcaacccaactggcgttacccgtgaagactaggcacagattgatcaatgattttgctttaactagtcgattccacctgcatagaatcccttagagacatgtacagggtttctgataaaactaaaccaaaaaaaaaaaaaaaaagaacaaagagaggaggctagagaggagtcgcatctgaaaagcttaggaacaggtaggacttaagtaagtcatatagaagaagtttgaagtgaaaatttgaaggtagagatgctttaatggtaattgttttgctgtatattctctctcggatctcttattcaacaatgaagcttacttttgagtaatctcttttctttatcccttttgccatattgttaagttgatgtcatattaccacctcccacattgattcagtctttgcttcaatatcactaccacacatggctgcatcttctgatacaggaaaccttgaaggagttagtgacttggaaaaccaaagcaaagcagcagccaacggaaatatcaaacgctgcctttgctcttcagtgacagtaattccgctctagctaatcgattcacagacaaagaatcctttagagacatagttttttcttataaaatctaactaaaaaaccaaggatactagagataactcgtcatcttgaaaagtgcaggaacaggtaagacttaactaatatcacacagaagaagttaataagtgatcatcatctacatcatagtgaaaatttggaggtataattggttttgttgttctagtggttttgcttttatattctctctaatgactcttttttctctttcaaactaagaatatgtattattaagtttaaaatgttaagaggtacaaaaaaccattcgccatacaaaatgccttaagagaagaacaacaccatggcccaagtactcttcttcttcttcttcttcttgttcatgtccctaactttcgctttgtttctgtttagagagatgtcttgtgatagaatgtaggataattctgtgaatattggcatgatgttgaattatatgaatcagaaaggtatggattgccgatcaggccaagactcgatcttctggaagtaatcgacaggcaagacaccaacaatgccttgagtcaaaatcactttgttgtctgaaatgtagaacgcaatcccatcttcaagagctttcttgatgtggaggaagatgataacatttacatttcttctcacgccactaatcacttcaccatctgtaggtaatccacaagagaagtgaacatgcattctattcatacgctttaagcccgatgctaagatggattctaaattcttcctataagttccatgtacacacactggagcttcttctggtgacaatattggtttaagtaacttctctgactcaaccgtcgtgattgagtggccttgattagcgcgaatcaagagctctccatcctcatcgatgaggctaaaccgttttttattgtcccttgtcacagcctctctaatttcatcaatcgtgtgtgaatttaactgaatatttgcacaagttttcaaattcaggttgagtaaatcttcaactttaacaaaaccatcacctctcatgttcaatctcagctcagtagccatatgtcgcaatattctcgtcaagattcgtccaagggcatcgattctatccacaaagatcattgcatattaaggaaaagcagcagctagattcacccgtttcactgcacgtatcgtcctcaagtgctcctgaatttgccagaagagagctttcccagaggaaggcgtgtagtttttttcatcattcaaaacctgagagagaagtttgttgattgttagattctagaaaccgcgttgctagggtttcgaatcacccaaattgaaatgaaaaaaaaaaaattgtgttcttgcttgtctgtttattttggtttatttacaattcattccggttcaatgttaggctttcattaaccgatttaattattcttccggtttaatcaaaaacaattattcttcttctttcacaatctctcctgtgttatttacgccgactcaaagaacccaaagctcttggaggaggtgatcttctcttctcagatcatcttctactcttgagtatacccttcctttgaagataattcctagtttgggacttatccttacttctccgggatttcactttaatccaccgaagagttttgacatctgaattgtattgttttgggtgtgatcccgatagaattcgagggtaggaatcggaaaggtacgttatgaaatttgataattgtgatttctgtgactcgttattgatttttaagtaaaagaacgaagctttgtatatgatattcggagttctaggtttaattgaattgttgtcgttgatgttttgatggggtttaactttttgaactaattgctctgaaattgcttaaccaaatcaagggttcctatcaactgtgtcaaaagttttctctttgtgaattccctgtttgatggctagggttaatagcaagtgagaccatgaattgctttttatggttactatgttcattctgttattctgaagccgatattatatgttgccaagtttgtgtgtcacttgaattatctgttattgtacagttggatttgtgaagcatttatctgtttctgtgttttcgaatttgctaaagctttttagagtactaacttcttcttggttttgctgcagtagggtgatttggtttagaagaagaaagaaatggagggttttgtcgatcactacattgttctaggtttagcttctggagaggaagctctgaagcttaccgagaaggagattgcaaaagcatacaagttgaaagctttggacttgcatcctgataaacgccctgatgatcctgatgcccatgagaaatttcagaggcttaagacatcttacgaggttctcaaagacgagaaagcccggaagctgtttgatgatcttcttagaatccagcgtgagaaacaacataagaaatcgcaagtagattccaagaggcgtaagatgatgtcagatctggaggaaagggagcgttctgctttttctcctaatccttccgctagagcttatgatgaagaagagagaatcgctaggaagcttaaggaggagatagataggatacgtgcaagacatgcgaagaagaaaagtggtttccaaactccagagagtaatgtagatgaaaagagaaaagaagaaagaagtggtgctggagctagtgttcaactcgataaagagagaatgttgaaggtttcttgggaaaaaagtggtgaagggtatacagctggaaggctaagagaagtgttttctgagtttggtgaggttgaagatgttgttattaggagtaccaagaagaaatgttctgctcttattgtaatggctacaaaggatggagctgtgagtactattttactaagttggtttctctctttttctttatacatcaagaagttaaattgattcaatttgttttttgtcttataggttgcagcgacgaggacattgtgtggcaatctttctaatccattgttggttgtacctcttcagaaagcagcccaaactgattttctgacggctaagaaatctgcagaagcagaaccgcagagtaacatagtaggtgccggtcttcaagcttatgaagatgccgtcatgcaaagactgctacaggtatttttctacgctcctcaggttcttgctgattcattcgtttgtgtttttttttctcaagaactctcatattttactctcttcaacaggcggctatggaccagaaaaagcgaggggtttaagccacatgatcaagaacaaagctccttcaagaccaaagtgataaagaataaagctctgcttcatgattaagaattaagctccttatacattgtttgtgtacatccaatctcatatcagttgttgttgtagaatttaaaattctaactcttctcgaaaaaaaaaatgcttcgtatcatcttcaggagagctttcaatttgtaccggaagtctttttcaaacaagtttttgttttgaagaaaattttggatttgtataatattcctttatctagtttcatttggaattctgttgtagatttcatgtgtttgtccatgatttcaccaaatatctcatttatttgataattcaatcactacaatagtataaaaatgtgatgtttagaagatatatggatttaaaatgtaattaagcacagggttgatggttactaaataaataaagtggacactgacagaaagttagaaaccaaacgagaggaggcaaagacacaaactagaatgcgtatgaaagagaatgaaattttccttttaattttcttttctaaaatgattcgatgtcttcatcatattagcagaaaatacatgtgacaaaaatagtttcttgaataaaagtaatttaggtttaggaaaaaaaggctataatttaaaacgagctacagtttcttcgtatgtaagcgaaggagacgtttttgcctttatttagtgccctaagtactgtacgtagtgtagatacatatcttcattaagtagaaaattttattcataaaaactcaattaactttttttttttcctttttattgcagttttaagttgtaaattacattgtttttttttgcaaaaagtatgcaataaagtattaaattaattaacactatcgctacaactacttctttaattagtctatactattagatatcatataattttatttcttaaaagttaaaagaggcaatattgtacattttgaatgcattgtgccttattaaacaattaaatttatttaactttaataaagttaaaaataaaaataaaaatttggactctggtagtatattacctgattaatatatttgagtatttgaccaaatttatatatttagaaaatataaaaatatcaactaattaataattcaactatcaatgaatttttttccttcattcagttaaaagcattcatggaatttgttttacttcccattttttcatttgatgtggacaaaaaatctgaaatggaaagctattattagctaatcaatcattgtccaaaacttggttttatttctctcctaactcttgacttccctctctctctctctctctctctctctctcttcaatgccttctccaagtcagtttctttcctcattcaacagtttctcttcttcttcctctgcttaaacgaaaccctcaaagaaataaaaaaaagctctcaagaatggcgaacaaaccaagaaccagatgggttcttccttacaagaccaaaaacgttgaagacaattactttcttggtcaagtccttggacaaggccaattcggaaccactttcctctgtacccataaacagacaggtcaaaagcttgcctgcaaatccatacccaaaaggaagctcctttgtcaagaagattacgacgacgttctgagagagatccagataatgcatcacttgtctgaataccccaacgttgtccgtatagagagtgcgtacgaggacaccaaaaacgtgcatcttgtgatggagctttgtgaaggaggtgagttgtttgatagaattgtgaagagaggtcattacagtgaaagagaagctgctaagcttatcaagaccattgttggggttgttgaggcgtgtcactctcttggtgttgttcatagagatcttaagcctgagaatttcttgttttcttcttctgatgaagatgcttctcttaaatctactgactttggcctctctgttttctgcacaccaggtgtgaatttgttcttgttcttctctaattttgttccgtgactgtgttggggatgtttatgagtatcaatttcgttacttgatgagtcagtttgtctattagtagtactttaaaagagcacattgaccccttgcttaagatcccatctttcaaatgcagtgactgtgtgtggtttagctgaattagtttgataaggagctcttgttttggacacacaaatctttgtctttcaggagaagcattttcggaactcgttggtagtgcttactatgtggcacctgaggttttacataagcattatggtcctgaatgtgacgtatggagtgctggagttatcctctacattctcttatgtggttttcctcctttttgggctggtatatttccaatgccttctttctttataaatgcattgtttccaccaagtgcttactctctctcggtgtcttattctgtatccagagagtgaaataggcatcttcaggaagattttacagggaaagttggagtttgagatcaatccttggcctagcatttcagagagtgccaaagatcttataaagaaaatgcttgaaagcaatcctaaaaagaggctaactgctcatcaagtgttgtgtaagttgtcatgtctgcgaaagttgatgagtttttttttcttgtaagctgattcatatgttcttgtgtcaggtcatccgtggattgtggatgataaggttgctccagataaacctttggactgcgcggtagtgtcccgcctgaagaagttctctgcaatgaacaaacttaagaagatggctttacgagttattgcagagagactatctgaggaagaaatcggtggtctcaaagaactgttcaaaatgatagacacagataaaagtgggactatcacgtttgaagagttaaaagatagtatgagacgtgttgggtcagagcttatggaatcagagatccaagaactcttgcgtgcggtaaactagctactactcctttattatcaactttcacttttaacatctttgttgtggctggaagtaatatcatcttctcattgtgtgtgtgtgtgttaggctgatgttgatgagagtggaacaattgactatggagagttcttagctgcaacaatccacttgaacaagctggagagagaggagaatctagtagctgcattctctttctttgataaggatgcaagtggttacatcactatcgaagagcttcaacaggcatggaaggagtttggtataaacgattctaatcttgatgaaatgatcaaagacattgatcaagataatgtgagtagtacacaaatgatctttactgtttgtttgatgaagagcttggaagaaatgtttatggtggttgctttttttttgtaggatggacaaatagactatggagaatttgtggcaatgatgaggaaaggaaatggcactggaggagggattggtcggagaactatgaggaactctctcaactttggaactactcttcctgatgagtctatgaatgtctgaagtactcatttttagtgaaaataatttagcgactttatggagcaaaacatgtcatatgatacaacttgctgtttctgcttactctaattctgcttttaacaactcttagtaattgaaattgtaagctctcaacaatttgtagaattttcccatggattttaccatatctcagagctttagagaaaatgttgtttttttcctttttcacaaaaaaccaaaggagttgcttaataatgtgtcttgagggttgacattaaacttgaacaaaacaatttccaaaagtgagaacaaaaataaattaagacactataactgaactgtaataaaatttgaagaagagaagagattagtttgttttcttgtcttcttcttctttctcagtgatcaacttcttctctgcagtttcatcctcacctccaaaaccgaactcgttcacacgtgtcttatccactgggtaaacccacctttggtataagtatatcaagaatatcacatctgaaacacagagagagagatccattaaataagactgtttctgaaaatctgaatcgaaatagagaggaatttgatagattttactcaccatctctgaatacagaaagtcgatgtaaaatcggcattttgatgacaaaggcaaagagatcgtcgataatggtgttgaggaacttgtaagtcatctgtctccatggtaaatgtgccactgatttaagcttgtagttgatgaatagctgaggacacatcatgatgaaacctgcacaaaacaaaccccaaactcaaaacagcttcacaagagagattctcaacagttattttaaggatggtgaaggctattaccgaacatgtagacacagcttgttagtgaagatagtatccaagaataccagctcttgtggcgttcataagcgagagaatatatggacaagccaatgacaaggaggaggagcacataggataagaatttgatggcaatgtcatcatactccttggttttattgcttgcatacgattcacgatcatggaacctcaaccttggaatcattccacttcgatcaacctgttaagtttaaatgtttactgaggtctacatgcaaagcaacaacattagaaatgtatatataagaacttataagtacctctatgcgcatggctttccctattttccagaactcaatgcagacaccgactccggaactagccagtatcatccatgaagtgtcgttgtcaagcaagtagaggaagatgacaaactgacagataaagttcagtacaacagactttgcagacagcccttccatagatttatttttgttccagaattggatatctgcagggtaggccaaaaattagtaaaatttcaacaatcattcctacaattgttaggaaagatttcggtcttacttaccatttttgaatgccaggaagtcgaacactgaatgaagcatcgaaacaaacatcgtgatccccaaaagatagggatttccttccaaaaacaccttctgtaataaataaattacacaacaaaataatatttacaaacagctccagggagaaaccaagagatatgtaaagaaaataatcaatagtgtctctccaccaactagtttcaaaagttaatagcaaatcataagttcatggatagaagatggtgattgactataaataaccagaattacctttagttcgtcagattcaccgtcaagcatgcttccatagctacgctgcatctggaaagattgatcaacttgctgaaacagttgccacttcatcatgcttatgggacttatttccagatttagtggtagttctgagactgtctcattgactggaatgaacttgtcccttagcagccaaaactcattgaagtaaattgtaggatagtaatttcctgtggtcggttctaccagtaagtctgcaaatctaaagttaagtaccaacatataacaaattgggcaagtagacaatcacaatgccaaaatgaaaaccaaaataagagacgtgacacaacttttgaccattcgaggacccaagaacttatgatccaacctttttaaaaaagaagtttaatccagcttatgctaaaaaaggcatgcagcagtcacatggatagtgccttcaaatgttatagaaagcatacacagagagagttgtgtaagaaaccaaataattaataaacagttcatactttcgtcaaaagaaattgaaggatacgaggagcaatgtttggtggtacaccattctgtgaatagctgtcatgaaagtgaaagcagatattagtctaccagtatggagtcatattaaattcgatactgacagacagtcaaagagaaaagcaggcatgctatgccatcaagtactacttgtttaggttaatagtttttttatgaaggaagtcaatgctctctcgtgtgattgcttaaggttatacccataattgataagtgtcattatgtgcctatgctttttaagactctgctattatttctgacaaaaagtagaattatatatacatcaacatagaaagcgaatccatcatgattataactttgttcttattttagtcggcactgagtgtttctagaggcgcaaaaaaaattatactacacgaaaaaagcagaaccaacttactgagtaaaatcatcaaccaggttaatcgtgacattaggtttccagagggatatccattccacagggacctcttccttgggatctgatttcttatctccaactttctgcgaagcgcggttggcgttagctcattacacatctattgaacatatttgagttcaagacaataacataactatatgcaaagtttcctacagccatacctcaacttcaggttcggattcatcagagtctttgggactgcccaagagactcttcttcttattttttttctgctttggaaagtaagtcgccacagctgaaatagtgaaaagaccagtccaaatcagctattacagaaaccgaataatcaattgttgtccaaaagagccttaccatgcgtcctactaaaactattaagaggttgatattcaggatcagtggggtcaatgggaaatccagatcgagcaaaaaagatatgagcatacagacttccattattctgtagtgtctgcgaacaaaaacaacatagtaactcaatgcagcttagtaatagaataatattggaggaagcaatatatgaaagaaaccaaaatatattaaaaagtcaagcaagtgattttatacctcagatggataatacgtaagtgacttggtcctaatactctctggtgtccatacagcataaggtatattcgtctcatgccaatatagcgcacgatcattgccaaagtcattgaacttctcctgctctgatagataaaaccacatatcctggagaaaaaacatcggtcgaatttagattcatgaacaaaaaaaatcttgaaaccctaattctccaatcaaacagtaatccaacactagtcatacacaactctaaagcagacactataaacatgtttacagaactacacacgatttattaaaatccatttgtagaagaagtatgaatataaattgaagttcaaattcatcatctatagaacaaaagtttaccaatgattcgcccttgtggaagagattagtcatgagctgagacggagcagtgggatccataggtttctgcttaggagaaaagaacttagaagcaaaataccaaaagacggcgattctaacgatgccggaaatcgtggaaccaaatccacgctgctgctgcggtggagcaccatcggcgccagccgcttcagccaccgccgccgtttgtcctgccggcggggccatagtttaacgaatcgagaaaaggaggattgtttttagttacggcggattcaaaagcagctgagatgtgaattcgctgaaggagattctgagatttgtaaaagcagagagagttcgatagagagatatttatgggattctttatttaatttatattttttgtataaaaatctgaaagaagatttgaataaacaaaatatataagtgtgatggagtcgtgacgatgctcttccaatgcgattcaagtagaagtgttttatgacaccaacacgtcgctttagactttagaacaaagtaacatttgcatctaaagaactctgtattttagatatttactattatttcccgaacctttagaaaataatatttgtacccatatattttgtagatataaaattctaaaaacatgattttgatttgccattctgtgattcactctgacgtttggtaatatgtctaactttcatatgaaattttaccaaaaaaaaacaaaatactaaggaaacttggttttagtcacaagaacttaatgcttccttagatccgtctactaaaaattggaggataataatctataatctccttagatttgtcctagtatttaaatggagtctctcagatctcctactttccgacataccaaaagcaaaacaaagaaacttagtcttgtcttgtgtaccagacttttgtctcaatcatcttcattgtgaaggccatgcttgtacatgagctgttccaaagcctcatcaaattctttctccagatcaaatatctcctcgtgatgcctcttcttcatgtcttccatcttcttctcttgatcttttatcagcatctccctctcttccacaaactcctccatctctttctcttgaaactcgatgaagcttgacacttcctcagctctgcgaaagaatcaaaaccggaataattcagttactcttaggtttgaaaaacaaaaacgccagagggattatgttagttagtacatatacctctttcggcaatcgtcattgctagagggattaatgttctgctgctgctggccaacaaccttggcacgttcctgctgctgcaacatctcgaaattctcctcctttgcgtctcttctttcatggatctgtttgattgaatccatgaaaaacctgtcgtgtgcatccatcttcaaaccaccacaggttttttgttggacaatataatcaaaaatgtgaatcagtaggtaatacaaaatgtcaagtttgtgattttctaggaaaaatcatacctcttccctgttctgttcatgctgcatcttagttctctgtctcacgatccgattatcctctgcagttctacgcagcttctcgctcataatttccagagattcctcaagcaccttggcgtgcttgttctgttttgagagcttgttcttaaagtagttcagctgctgattgtcctcagagatctgcctcagctcctttacaaccatctcttggtatgatttcaactcgaatttcagccttgttttgcctaatgaatcatagatatatacataacagatgcattaacacggaccaacaaaactttaaattccaatgacaaaactaaaagcatatatcaaatttctttgggggagagaaccttgagagtgttgattgaatatgtccagatcttgcttcgttgcaaggaagccatacagttggcgaacacctccagaaaacatactgcgcttctgaccccaggcaattctatctaaccccatctcagctaactcccggtggaggcgttcggcctccaaatagccagtggcactgctctcaaacatcagaacactcatcccacgatggccctgtggaccataggaatggcgtgctctaagagcctcatacttgtcgaagtattccagcagctcttggttgcccatgccgagccactacaatgtaacattctaagatcagtagaatgcaagagaaaaattaaagaagtaaaagacagaagaattccaccttatcgttatcgtccttatccagtctagtattcatgatgatgaccattggaggccagacaatttcataatccttttcatcctcacccaaacccttccactgcccataaatctcaccacaaggaatgacagatgcgcctctcatctgtagatccttttctaaaacttcagccaattctctatggagcttaactcgcctagctccttttgtcctcgcatgagctagtagagggtgcaggttataccaatcgatggcaccaggtccgttctgacaagctggacaatgccactgcctctgtggttcatttatctgctcgatcgacaagctatccaagctgccaaagaactttttgaaccacttattctgctttcgtgatccatggctcttttgactcacatccgagtcataatcatcacttgcaaggtcgtcatcagaatcatccaaagcatcggaatcattctcttcctcagaagcattatccacatcatcctccacgtcaggaaactcctgcacagctgtgtgctgagcagaacctcctcttgcctgccaattccatcctccttccaaaggagggcgagatacaggtgggggtgccacaaagttgttatcatactttctgctcaacgctcgtccccgaccagatatgttagcttgaatgccccgaccattgccgttacctctcccggatacattgtttcctctcccagatacgttgctacctctcccttgctgctgaccaccccaagctctaggaggattcgaattctgagaaacccaagtttttccagaagtgtttcctggtttgttcttgttcttcttggaaatgacctcccactctcctccatcatcttgtgaagaagccagtctcgtccctgccaaaccttgaaccaactgttcaacctcaggcctataaccaccctgaacgttcttttccttagacattggaccagccctagaactcatttttacaacctatagccaccaaagaaacccacagtcactaccaaaatctcaaaatccacacatgaacgtgaagttataacaagccaacaacgcataggctcaaaaaacaaacatcaaagcacaaaaggtagatcaatccgatttatatgaaacaaaaaccaaaaaacgaaggatttttcacagtcaaatactccgatcagcgactaaacggtgaaagcacaacaaaatgaacaaaaacagtaagacgcaggtatcgttacctaagaactataaaatatagggaaaaaagtaacccatagcacaaaaaccttcgaaatcgagaacattagggcaatttttccagcgaagaaaaagagaaatcgagcacagaatgcatgcggtgaggcgatcggaggctctaaggcagaaaacttacagagtaaacgacggagaacgtaagtttaaagcgccggagagtgagagtagtgagtcaggactccggaggaagaaaataaactgacgaagaagagacaaatgaggaagcttattaagctctaaaacggcctcgtttttccgattctggactccaaattttcattcagtttgattttgttttcatttttgtacctttttttttcctttttcgcttaacttaattgttcccactattaatttattgctacgaacatgacttgcttaatttttgtttgtttgtcaacgtaaacatgtcttgctatttttgtatttaatataactttcaccttattaaaaatgcacaaaaagtagatatataatttttacttatattttgttaggtttacattttttgaaaatgtttacaatggaaccatactgaaattattgtattaaggttatatataacttataaaactcaaaataatcataatattatgtactataaaagttacatactatgtaattgacaaaattttatataatagagaaatataattaaattcttttcttgtattatatatgtatatagaaaaaataatatgttatatatcatttaagcgaaaaaaattattgttttaaagatatgattgaaatgtttatatagaaaacaatcacaagattatttactaaaagcaaatcacaaaataattgaccaacctatatagaataaacgaaacaaaatgtgttacgtatcatttgtgtgattggcagttacgttttatatttttgattaaaacatttttagaaaacaaaccacgagattatttactaaaaaaataaatcacaagtaattgaccaacttaaatataggaaacaagaaaaaaaaatactatgttacaaattatttgtgtgaggagttgttatctatatacacattttagtagatatttttgaaataaatcatggatttgacacttatttacaatagaatgttattgtcttaaattcttaagatttcaaaaaattattagaagaaattaacaaaacgatttatatcattaattctctcttatatttttcgattaattgttaatttcctaaaatatctatacctagtttaaacataatatatattttctttcagttttagttaatcttatatttatagaaaaaaatctagttatttttttacatatatcaattgcatatagttgtatgatataaagaaaagaaacaaaataatatgttatatctgataaaatcaacaaaaaaaatagctattaaaatgggaagtcaacaaaaattaagtgagtaaaataaaataaaaaaatcaacaaaaatagcgaattagaagcaaagttgaggattgttggcattttttgaaagttcaagatatttttgacatattatttttgtcaaccactcattaattaaagggccttaattaaaaccttaatggatgtgtaaatttttaaaataagaaaataaaaccttaatggatccaacaattgggctaagtttattttaatttaaaataagcccaacaactaaagccttttcttcttttctcctcctacgaagaaaagtgtctctttcatttttcagtctcacacattgcgtaattttgcagagaagatccaaccatacttcagttctactgtcacaatttgagaagaagaagcgtgagatctgatcactagaactaggaagaaagagcttagactacagaaagaggacttacagagatggataaaatgaatcaggctattgagaagatgaagatgttggttggtatggaggttgaagacgagcaacaagctgctgatgaagaaagctcgctctcattcatggaagatcttaatcgcaattgcgctttaactaccaaacaggttcttaacttccccagattcttcgatcaagtcctctgaatttggtaatttttgtaatttcacatgcggactaggtattcgtccaattagagaagttaggctcgtaagctcactgaggtagaaatgtaaatgagttcctattgaatgcatatgatgtgatcaataacatacaagagattttgagataagtgtttagcagttctatgattttttggaggagaaggattataaaattccatgtggtatgataacagtttgattaataggactaagttttggcttgctactacaaaaaattaggacgctacttggatttagctcctctatgaacctgtagtgttgtctcgtttacaagaatctgttaaattatcttgaattgggtttgtctttggctaatatctcgttttttttgtttatgaaaacagagattttatggctttgcaatttgcttgtcagcaggtttgacctgtacacttttggtaagtataactctcaagtcttagcaatgttagaaagcactatccttatttctgcattgaaaggaatcatttgattggtttagctgtattcttcttctgtactttgggttgtcttagctcttttactggtgatataactctttatctcttatttgtttgacgatgcagtcgatgcttgttttctttaatccggtcaagtttggcatcacattcactctgggaaatttgatggcactcgggaggttcgtattggaattttgtgtagcttcttgttatattgcattggtgtcgcaattctgtgtgtacagtatttctccatttttctctctttgttcctggattttaagtttcatgtcacttttgtatggcagcacagcattccttataggcccacagcggcaggtgactatgatgcttgacccagctcgtatctacgctactgcattgtatctagcaagcattatcattgccttgttttgtgctctttatgtaagtggggtttctcaattcaaaatactggatgcacaacattgcttatgttcagttaaaactaggtagtgaaaatgccttgttggactaaatataatctgtcatcatctttctgtacaggttcgcaacaagcttctgacactgctggctatcattcttgagttcactggtctaatttggtatgctaaaacttgctttcaagctcttacatttttatcctaactttcttagtaatacaattacatgatatatactcttcgaatagtatattatcccgagtggacctaatgctccttatacggtttctgagtttgtcacaaaagctgtcaacattcatcttggagaatgaatcccttgtgttctttaaaactgcaggtatagcttgagctacatcccttttgcaagaaccatggtctcaaagatcttcatgacttgttttgacaccgagttttaagctacagtttacacacatcaggtcaaagatttcttgttccaaaaccttgatgctctggctgaacgattggtcaatctcctccaaatgtgttcaaagcaggacttgtttgatgcaccggtaacgtgccatgccctttatggcttataattgcctctttacatcaagttcacgtcttcacaaatcctagcacagttttttgtatatttgctgtggaacttaacgtagatttggatgttattgctgtttgctacaaaattaagatgttaacttcacttgttttagtttcattgtcatggttacgctaaagacttaatccaggagggaaattgcatattcttatcaaaagcacttaacttgaaagttgcagcataaaatctaaaaatgggaggaaaataaaatctgaaaataatatgcaaagaaatagaaatcgatccctgcccttaacgaacgaaatcacatagtacagtacaaccttgtaaaaagctagcagataaaaagagaacattcagtagaagccaaagagatgcagaagaacaaagctcaatgacttgaagcggctggagaagtaagctctctagaagacaacagtgtcgagcatagtgcctagtgtctgaacaatgttggatgacatgaggttcgagacatgttcttccagatgcttctttgcatcttgtcttcccacattcacaattgccagcttctctggtgacaactcgtcctcctcttgaaccgccttgttatatttagcagccaagctcaacatctcctgttaaacaggagataatgaaaatgtcaatgaacatgattgtagaatatgcttgaacagataaaaacataaccctgtgtttctttacctggaccgtctgttcgttggtcttggagtgggtgtcaaagcgtcttagcgtcagaccatctgtccatttcttcttgtggaggttgagtaacatcttctcctcaagctcgttcttcctatagttgattgctattgagtaatagtgtctgttcaacccgtgaatcaaagcctgcatagtagtatccaaaagtcagtatcagagaaaacctttgatttcgtttcaacttaaaaacaggacacattcagttagtgataatcacctggatcgatggtttgttcaagtgcccaaggttcgatgttgtttgacggggttcctgcccaagcataatggtctgtggatttatggagcggaacgcatcaatcaccacctttcctttcacactctgaatcggatctaccaccactgctacagctcgctgattcaaagcttcaaaactctacaaaagcacacagatattcacaatgaacatatataatacaaagtgaatcacaacagggtatagaacacaatgagtaacattctatttagttttttgagccatcaataaagcaaacaacaaattctcaagtgcaattcacaaattgataagtatgcaaacagagcaaacaaaactctacctgttgagtattaatgtcaaccccagaaagccagcagccgaatccaggatgtgaatgataccaaccaaccaccatctcaggtctgaaacaagatacaagaagaatcagatccaaaacctaaataggaaacctcacttaagcgtagtaaataggtttagagaagaactagttaccttccggtctgtttaagcatgtcgagcatattagtctggaaaacatgatcaacagcttcaacactaacaccagtaccactctgaggcatcgcaaaaacatccacaaccctaacagtgtattcatccacaaactctccaagcatcaatcccatgacttccataggaacaccagctcttcctgcaatattccgatcaattttcattaaatctctactcaaatccgcattttgaatctcagaaacagatcgaataaaaccctagagttccagagcaaaagaggacgagagtaaaatcacagagaacgagacaaaatcataaaaccctaagcaagagaagactaaattagagcttgggtttggattgattaccgtgcttaagcatcttgaggagagcgagagaagagatgtaaacctgctccgatgtatcgagagtcggagaatcaggcgatgcgtgacctaaaccgccaccagctccgaagattctctgtagtctctccataatcagatgaattgattagtcgtcttcttcgaaagtttgttcttctgggtttttgctacaagaatgggatcttataagaaaacctttctcagttttctttgttaacaagacagacgaagatggatcgaattactcgattaggcgacactaattacatataagtccttcaatatttccttttatttattgtaaccaataattcaccaaatttccaaatcatccccaaaaataaaagttaataaccaatttgaatttccatattttttttgtcaaaattttaaatttcattacaatgcaaatcatgtcattgtgttaatattgttaattcggttgcataatataaatctactttacttagagcttatagttttcgttttatgtttagacttctggctagtgtatatacaataactaaacatgtaaatattgaactgttttccagacggattttatttggcaccttgaaagttcacaagatcaatgaaagaaaaaaggaaaacgactccgtttcagtcatgatcaaaggttctccaacaaaacctcacagctctagaccgaaatcaaactctaatggatgggaaaaagaagaatcctttttgagagcaggcaacattttccaaacgaaactgtagagaggtttcaactcaaagatcaggcatgccctttccagttttagcatcatatgtctgctcccagacaaactccattggtgtgtccttagggccagctgcaaagagaaaagtatgaatccttctataagaaaaccgctactatcaagtttgttgattatgttgatagcaaacgaattatgttgattctatgtttatcttatagccgatctatgattatgtttttttctcagatagctaacagacttccactatatatttccaaaatccaacgtttaaagagatattgagcttctatgtaccagttgtgggtcgcggcgttgcccttatctttagaatctctggtcggggaattatggaaccagatgtgccagtgcctctggctactcttacttttgttccatcttctaggtattttacaccaaccttacaaggcctcctgtggtagaaaagataatagattaataagtgatctctcgcttgagcaaaagagtaattggagacagtagtgcagagtgaaatcatacccagtgacaggatcaacaacttggacatttgaggcgtgaagaggagcctctacagtgaaaattccaccttcgtgatcagggcctccctttatatgtttcttgatctgagaacacaggaaaaaaaaagcatcagcgaaaaacatatacaagcttcagtgagtagacaaagactatcccagcagcaaggtagaacatccaaaacgataacagtttcaagataaacaattcaaaagaattgtgtagcgaaatccatggaactagagtcgctttgtgatttagtaaccgtctacttgatgcttggattaaaaaaatgagaatcaaatgaaaattgataactctatggttggtgttgagctagtgatatgatattgattcagtactagttcatactctacaaaccaaatcaagaacaaaaaaatcaaaaaatgaacttgtacattcattctctaaatgcatgagacagagcgaacaaaagatatccagaacaagactatctcaccagattcttcccttcaacgatgacacgattttgggatcgaatgacacgctttatggttccagtctcacccttatctttcccacgaattatcattacctgcacataaaatcataccccagaaacaacagatcaaaaatgaaaccaaactaatgaacaccacaagaagaacatgagtggtgtactcacattgtctcctcgaagtatcttccagtgtctgatgagtttctcagcagctttccagcccatagctgctactctctttgagaataatcctaaaaattacatcacaacaaattcacgtctttcttctaacaaaaaaaacaacgagaaacggaaagcatgaagaatccaaatcaaagaaattgaaaatggcagggccaatttcgagggttttcaactgcggaaagccacctaaattagggttttttcacgtcaaagatacgcaaccaaaaaatttatacataattccgatctaattcgaaaagggagaaaattgatgattagaaatgatatcgccgaaattgacaattaggatgcgaaaacaagtttggtctaatagaagaagcttgcctctgagaattaatcgagagatcgaggaagaggaaaccaatggagttgaagcttttttgttttccgccgacggtgcaggcagcgttaaccacggtggcgaagaagtcgtcagtattttgattgtgagtgtaaaaaagataaaccctaaaacctctcatgtcttcaaacattaaaacgacaccgcattcgcaatttggccaaaaaaattataagtcactaactaattaggtattaacgattttaattaattgggatgagacgatatatgctctgttttcttttctttactagagatgcactgttgatgtattattagagaccaaattttttgtattccgatgtgttagaagttcacatttttatatggtttgaacttggaaggtaactacgggattaaatatgcctggattatatcgtgtatctaaatcatgatggtgtaaattcgttcttgttttgctttttgctttgaatggatgttgtagttagtgcggactaatccgtagcggtttagtccataccatttttgggtcggacaacaaaccgatgcggacttagtttaaagactgtccgcagttagtccgatgcggttgtcttctattttttttaagtatgtactattacggattataatttatgaatggtaaataaaaagcggtccggtctataaacggttttgtctgtttggaccgctgtaatcattcaaagtttgtttttacaaatttacccatgaccactgttgaatctaacatagagaagaattgaatgagattgaaaattagttgatgcaggtttctgacattagaaattacttgcctcctgcaacatgtacattgattgaatctacttgctcttatgtgactccattgcgttggccatgtgacatgacttcatcgacattcaacactgtagtagaagaaaactagtgacttaaaccttaagccaaatccaaaatatttgagatttttttctatttttacgtttacgtgtttccttgaaacgattattttcattagttgttctaactataaacgtcaataaaaacatagaaaattacagctggcagaatatttcttagcctatatagacgaagtaataacagcttacaaattcactgtactcttccaccaaatccattaatcatcatcttttcttcacagagaggaaaaaaaaaaaatggcgacagattctcaaccaaaccaaaagctaacgcttccgttaaaaacaagaatcgctctcaccgttatctccaccatgaccgataacgctcaacgtcctgacggaactatcaaccgccgtttcctccgcctcttcgatttccgtgctcctcccaatcctaaacccgtcaacatcgtctccacctccgatttcgtcgtggatcaatcccgtgatctctggttccgattgtacactccacatgtctccggcgataaaatccccgtcgttgttttcttccacggcggtggtttcgctttcctcagtcctaatgcgtatccttacgataatgtatgccggagattcgctaggaaattacctgcttatgtcatctccgttaactaccgtctcgctccggagcatcgttatcctgctcaatacgacgacggtttcgatgctttgaagtacatcgaggagaatcacggttcgattcttccggcgaacgctgatctctcgagatgcttcttcgccggagacagtgcaggtggaaacatcgcgcacaacgtcgcgattcgaatttgtcgcgagccgcggtcatctttcaccgccgtgaaactcatcggacttatctcgattcaacctttcttcggcggagaagagagaacggaagcggagaaacaactcgtcggagctcctttggtttcaccggaccgaacagattggtgctggaaagcgatgggattaaaccgggatcatgaagcggttaacgtcggcggaccaaacgcggttgatatatcgggtctggattatccggagacgatggtggtagtagctgggtttgatccgttaaaagattggcagagaagttactacgagtggttaaagttatgcggtaaaaaagcaacgttaatcgaatatccaaacatgtttcatgcgttttacattttccctgaattgcctgaggcgggtcagttaattatgcggattaaggattttgttgatgagcgcgtggcttcgctctccgcttaatcaccttcgctaatgatggatatttaaattagctcaatgaataataatgtattaagctctatgcttgtgtcttgtttagtgttttaaaaatggtgtaggtcgatctattttcattattaatcaagtgttcaactttaagtgaatgtttgggttggttattaaacttgttttaaagcttgtgagacgtggggtttttgtacttgtagtaaaataccaatgttggtttcattatagactatagtcaggtttgttgtacttattatacgagtggggatacaaaacaatggaattgattatttgtacggtgagattcaacaataccggtaggtgagtgactatgtctatcccttaagtttggtgaaaagtgagccacatttaatgcatttctagcaaaagatttaacgcccatacgactcttatttattactatgagactatccaaagctcttatttaatgtataatgtaaaggaaatgtattataagcttgttgaattgtgtaatctatatttgaaaaagttacattaacattgaaagaaacatgtttgttaagtgtgaatttaaacaaaatttctttgtaaattgtaaatgtaaatgctaaacccaatcggaaaggaaacctttttgtttgtgtttgcgtttgacgtgtacgttttcacataaataaaccatttctccgataagtatacactgaacattacatattttatctgattaaaataacctagcattattgatcgttgaaagcctagctcgtattttcacaccttattggcttattggttaactactaatgagtgatgtgacaacgtttaatatatgtgttacaagtatttaaatgatttcttacgtaagaagaaatggttaagtgactcattggatcgtccgtcttttgtcgaccaatacatcattcgtgtttttcgtagtcttaaatatgtgagaagacttatgtttttaacccatacctttcactaattaggtgaactgttcgtctcttggagatactgacaattaattttaaaaggaggaacgaattaatatggttagaaatgcaactatagtcacgtgtccaatctcataaaagatatggttttttttcttcttctttctaatatcattactaggtttgcacgtttagaagttaatcaaattgtgttttgttcttgattactttcgaaacttttttttctctacctttgtatttttcttcttctaatacttaggttatgcattgattcacaaatgatatgatttcactattcttgtaaagattattagtgaaaactgttatacatgaatgtttgtaaaacctcggaggccgatttatgatcgaattttcattgttggtggagcttaaggatgatttaatgagttaagttggttttatgtaactctaactatagcgtaaaccctaaaggcttaaagctaaagaaaaacaaactgtgttctgcttttaaatcactaatatgggccgttaaggcccactaagagtacgtatgaatccaataatggatggttgaccaatgaccagtcatacaaagaaaattaaaaaggtcaaaatttaccaaaatctcgacaaagggcaatttcgcaattaaatgcaaatctgcagcgtctctttctctctctccgccggcgaatttctattgcttccttctccgtcaattttatcaccgaccgtctgtactctccgaccacatatacaccgtgactgctcgaaccattggccttaggttagtcaaccctctttagcttataaagtcaatttcttttttccgtcaaattttgggtttagaattaaaggatttgaattaaaaaatttccaaacagtgcttttgtgttatgttgaattgcagaaatgggttgatttgtcttgtctgggtttaatttgaatgtagaatcgaactccgtttggaactggtttgttgaatgttgttcattgagaaatggttgtgtgtgtttgtttttatgttttgaagctcctgagccacccttaagtaccttaaagactgaaactttgaagtatcactttgatggggaagtgagagatgatcactagttcggtataaagatgtcatggatgaaaggtaaatcatctggttggactgcgtttgatctcaagcagagacagaaacaaggtcttgaaagtgaggtcgagggtgatccattcccacctgtttcaactagtgttaatgcatcctttggtgtaagaggacggttgagaagaaaccatgaaccttctgaaaagtctttttcgtccgtgctcttgcctccttcgagatttccggcattgacagagaataaggattgcggaaaccaagaacgagggggttgttgtagaagaaagccggacactttgagtctcccggtaaacagtcatgatttagccttcacgaagctgaaggaaatgaacagctgggcggatgataacttaataagggatgtattgttatccacagaggatgattttgaaatggccttagcttttttgaaaggaatggtttcttctggtaaggaggatgaggagccaacttcaaagattgaggggtattcatccgataacagaagatcggaatatagaacatttgagaaaacagttacaagttcggtgaagatggctgcaaggtccacatttgaggatgctggcaagtatgatctggaaaatagtgatggaagctcgtttctggtcaatgcatctgacaatgaaaagttccctgatgatatttctgaactagatagtatcattcagcggcttcagtccattccgatagaacctgaatgggaagaagatgatctatacttgagtcatcgaaaggatgcgctgaaagtgatgaggtacacaaaggcttaagtcctttttatactgtgttgttgtcaattgtcatattgataatcatatttcgaacttaagtttcaaactttatgcttaaatttacagctacgagtagtcagtatctcatttcaaactttcttatcttcgaagatgaatatgtatcatcagctattgagaaattccttctttgttaaacagatcagcctcaaaccattcaagagctgcccaaaatgcttttcagagatatgatcatgcttctgccaagcagcattcagataaagcaagagaggactggttagcagctgagaagctaaatgctgaagcggccaagaagatcataggtataacaaataaggataatgacatatggaagttggacctgcatggtctccatgccacagaagctgttcaagccttacaagaacgtttgcaaatgattgaaggtcactttactgtgaaccgttcagtatcaccaaatagaggtaggtcaaagaatgcagctctgcgatctgcatcacaagagccttttggtagattagatgaggaaggcatgcactgtcaaagaacttcttctagagaactgagaaactcattgcaggttataacaggtatgtcgattttctgtttatgaagcatcaagtgaactgatgtttccatggttttaagtataataggaggttcacacataaatctgtgacggtgatgttctatgtccattgtaggtattggtaaacacagtcgcggacaggcttcacttcctctagccgtgaagacattctttgaagataacaggtgaagatcactctttgatcttctgtttcatatctttgtcaatcattagtataaataacaagctgaggaatgggatgttggattgcaggtataggtttgacgagacaaggccaggagttatcacagtgcggcctaaattccgacacagctgaaaatttgtttgatctcaaacttagcaaatacttttgtgttacttcattgttgttgtatcatatccccttaagacttgtcatatcattcttctttgtaacatagtcaggttggccaattgtttagtgtactcaaaaggtcgataaaatagaatgtaatgtggaagagcagtggtatttgtagtgagatcaaatgtaacttaagtggggcttttatataaacaaagattgatttttttctcatgaataatttgtttcccttctacaaggtctttctcacaaaagaccgtttagaccgtttactttaaaaaaacctctgtttcacgctaatctatccacacagacaacaaaactcaatttatttcatattttgagcgatgaagaacacagatcgaggaacctcatttatgtcttctcgcgcctctttacatattccttttcctttactctttcctcactagcttcagagcttctgctcaaatacaacaacatacttcaccaatcttaaaacccttttttcctctttgcagagcctgcaacgaaataacaaaccaaaaataatcaagtctttgtatacttaaaactggtcttctagagattgtaacgagagtgataaaatgaattgtaatgctttgaagaacactaccgtcttgataaatgatctcagggtgagtactatttcatctcttgagctgccaaagataacagaagattaagttatggtcgacttcccttcttgaaagaaagttaagttttctttacctgatgtctggccattcattatctactcgtaagcaatgttcactaccatcagaaccaatgataacaagttctgcaggtttctcaaacggaatttttacctagaaaggtatcacaagaaggattcatatattagttcaaaacttgttgccttccagacttttcacagacaagcgcagtagacaaaaaaggagacagaaacaaataaagcaaaagtcttacagcagtagaagctgagaacttttctgtaattgtgagatcgttattacacttgatggtgtaaccttctctctcaatagataacgtagctgcttcccatatatgcacgaaaccaatctatccaaagccacatgcatgtgaaggattaatccaaggaaaacatagccaaaatatacgagttgaaacagaaaatgtgataccgcaagagaaactttgtatgaagcatgaccagtatgaagagtcttgtctatattgctctgcatctctggatctgtgaaaataaaaagaggattactgttagatagaagtctgacaataaatactattaggttctcaaagaatgctacatatttaagggaaccaatctcttgcacaaccaaccagaaacagctcagcgagcacaaaagacttaacatcgagacgtaaactgacaagtggtctagctttataggaactcaagagggagattctctagctaagtaaatagattaacttacggcaagcgatcttgcgattatcattggcaaaaaccttcacaagctctccctgaaatcagaaagtagcaacatgaaaaaactgaaaaacaatcggtagaaaacaactgtgtaagcacatctaacacaactgtactttccatatcaagattccagtataccacaaaatcataatcctagctttccacagagaagaacaactctaacatatgatctcattcatataaaaagatattaaaccttccggttccggtcatccaaaggctgaacttcaatagcaagacataaaccaacatcatcagcagtgacaaggtaatttggcttctttgctcctgcattagaatttcattaacgactatattcttatttccatataaagaaaataagaaacagaaatcagcaggaggggaatgtaccatcaatgtaattcacagatccatcttctagatgacatacccactgaaaatggaagaacagaagaagatagagcaattcaacataagtaagaaaggaagcgattctgttgtctgttttagtacacacctcaaaattacaacttgttgttccattaatggagtaaccacaagcctgaagttcatgtccaggataaggttctcctgaaatttggaggttctctaaagctggtaagggggcatcatccccatctgtaaacaatggttcatgatattgagacaagtgaaagaaagaccatgtaatggaggaattagtatcattaatcattaccatcaaaatagaagatatttttggtatcgttgacgaccgtcttgctgataggtggagtttcgtctgcttggttcagagcaggagattcgtatacactcgtacctggttgcatctcaaaggctgcagaatgattgattgcttctccgtcaattttatccccggtggttctctttacactggtcaaactgtgactgcttgaatcatttggccttaaagttagtcaaccatctataataatcatttcttttttgacgcaagtggacagtgcttttgtcttatgttgacttgcagaaatgggtggatttctcttgactatgtttcatttgaatgtggattttaactccatgtgaaaggcatgaaagatgaggaatactgtaacaggtatgttgtaacaggtatgtcaacttcctctagccgtgaagataaactctttgatcttccagttcataatcatttgtataaataaaaagatgaggaatggaatgttgttacttatgcaggtacaggtttgatgagacaagaccaggagttctcacagtgcagccaaaattccgacacagctgaatatatgattgatttcatatttagcaaatacttttgttgttacttcattgctgttgtatcatatctccttaagacttatcattcttctttgtaacatagtcaggttggccaattgtttagtgtaatcaaacaggtcaataagaatgtactatgactgcagagcagtgatctttgatcaaatctaacttatgtgggggttttatataaacaaagattgacttttcatatgaatgaattgtgtcacaagtccttatctctaattgatttgcagctgacaaaagtaagagagccaaaaaaatattatataccaagtctcatttgttaaacaaaaatactctcttctttcccttcttcctctgcagagcctgcaacgaaatatcaaaccaaagataatccgtcattgcttctctagaaagcctcaagcttgaagctctttgtatctacttacaaattgcctctgcttttatgacagctacaacgaaagtgataaaatgaatttaatgctttgaagaacattaccctcttgataaataatctcagggtgagtactatttcatctcttgagctgccaaagacaacagaatattagcttttacagtggaggattcaacggacatattacaaacaagaccctatcattattggatcaaagtgtattatatatcccctacacttgtgtgtttaatcatactgagattcatcgatttggtatatctgataggatcatagaacaaagcacatgctgattaatccggatcggcttttgaactcactaagtacttaggagctaagtatctattgacaggctcatcaaactcgaggcattctaatggtctacttccctctttaaaagaaagttaattaagttccacttacccgataaggtctggcgatccattatctgctcgtaaggaatgttcactaccatcagaaccaatgataacaagttctgccggttgcccaaacggaatggttacctacataggtatcacaagacggatataaatattagttcaaagttcagaacctatctaataactctttcaacatgcaaagctctctccatacccacaccgccacacgtttcacagagaagcgcgatttattttatgacaaaaaaggacagaaacaaataaggcataagtcttacagtagtagatgctgagaacttttctgcaattgtgagatcactaatacacttgatgctgtaaccttctctcttaatagataatgttgctgcttcccatatatccacgaagccaacctgtccatgcatgtgaaggattaatccaagaaaagccagagagaacataggctaaataaacgagttgaaatggtaaatgttataccgcaagagaaactttgtatgaagcatgaccagtatgaagagtcttctctatattgctctgcatatctggatctgtcaaagtaaaaagaggattactgttacatttaggtctcagaataaatattatcaagttctcaacgaatgcttcagatttaagggaaacattctctaacacaaccaaccagaaacagctcagggagcataaaagacgtaacatcttaatatgaagacgtaaacagacaagtggcaagagggtgattctctaagtaaacagattaacttacggcaagcaatcttgcggttatcattggcaaaaaccttcacaagctccccctgaaatcagaaagtagcaaatgaatattgcaaaccacatgaaaaaaaaaactgaaaaacaatcagcagaaaacaacagtgtatgcacatctaacaaaactgttaaatcgtatctgtactttccaaaggcgaatcttttcccctacaacattttagcatgaaatctagccgacgaaacaaaatgctgaggtaaataatggaaactaaaatccatatcaagattccagtattccacagaaaagaaccactcaacatataatctcattcatacaaaaaaatattaacctttcggttcctgtcatccaaaggctgaacctcaatagcaagatataaatcaacatcatcagcagtgacaaggtaatttggctgctttgctcctgcattagaagttcgttcacgactagattcttatttccatataaagaaataagaaacaaaattcagcaggaggggaatgtaccatcaatgtaattcacagatccatcttctaggtgacagacccactgaaaattgaagaacagaagaagatagattagatgcaattcaacataagtaaggaagcgattctgttttttatttagtacgcacctcaaaattacaacttgttgttccattaatggagtaaccacaagcctgaagttcatgtccaggataaggttctcctgaaatttggaggtcctctatacctggtaacgggtcatcatctccacctgtcaacagtggttcaaaatattgagacaagtgaaagaccataatggaattagtattgttaatcattaccctcagaaaaggaggaagaaggttcttcaaaaactggggacaaaagaggagaatttgaggagcttgggtcatcaaacgcagacccatatgatggattttgagcatcgtcgaccaccgtcttgctgataggctcaagaaactggacatgcttaggtggagtttcgtctactttcttatgagcaggagattcgtccacgctggtacctggttgcacatgcatctcaaaggctgccgactgactggtacacacgaatgcatttaatcatcaaacattgcagacagttatccaccaataactacagtgcatacaaccaggtgagcactacgaaattgatcataatcgtgacatgatgaagtcagatgatctgacacctcatgacagatcaagacataaaaacataaagaagaacagcaccttatttggcctatgactaatctgatacatttgagaattgaaatcatcatatttcccagaggggacaggaagttagaaaatgtaagaataggaaaaagtcgatgaacactaagagtgcagaagagggatactaactattggcttagaactacgaattttcagagtcaacaggaaagactcaagcgtcaagattcattgccaaattaaatcaaatacttttcagcgtgttttacaagtcaagagaaagcagtcagagtcaagagtcaacaacaaacaaagggccaagaagtcacggacttgttcctacctaacatgaacatgtggatttaactccttcattccctgcggtagctaagttaagaccaaccctaagaaagagaaagaagctaaaatgcttcgcttgtagttccttggatgatttccaagtgaaggatccccaccctattatatctattgggatagaaatatacaatgctctagcaactacatgtgtggatttcataaatattgagtgtgtgcacatagttttcatacagtttggaatatcaatctttgcagggacaaactcacctgttttcaagaggtgaaaacgtactagaatcatcaagatggtaattcctcacagctgagctacctggctcatcttgctgctggcgctccaaattccagtctatggctgtgtgatcatgagaatacatggaatcttttgtctggtgtaaacacaagaagtaatttaagattctattcactcaagcttatgatataacactgaggaatatgcacatacggagtgggttaatgccacaccagctgagcgcgatggagccaaaggggaatcatttgagtggttcacatctgactgccatggtgctaactgatattccgactccttcaactttgtctagtacaagaaaaagatcagaaacaatcatctatcatatgtctgtaagaaataaagccaattcaacgctaagaaaaaaacagaagtcaaaaatgaagcagacactgagatttaacaccagataagcccatacccggataacatacctcagtaagaaggagcttttcttgtagatgcttaaacaaaacctaaataaataaaaaacagtagctgtaaacgccaatcgctagtttaacataaaaactgcaagaaaaacttcactttcatatatagtgaagcagagtataatatataatcagtcgtttaatttcctatccaaatttctatgttctgtggttctccatgactccacataaatttcacagataagacaacaaatgcttatgcttccatatccatgaagctcaaaaaactatgtcaaccaagctccgttaatcatcgaataggatgcagtgcaacaaaacctctcaaattaataggctacagtatacagtaaagtcaaagataggagctagagatggtccgaacttacaacagaataataaaacaagaaacgtaagattccaacacaagttataacaaaaaaaataaaagatagcgagagacagcacttcagattttggatcttaccttcacattgctgacaatagactgagcatcagaaacctgtggttgcagagaatactctgataaaagaggtaacaagtatgatacaaatgtagatctttcttgctgtgtagcctggaaaaaaaaacgaaaacaggcatattggcttcgatttaaaaattaaccagattttacgtagatatatatataccagttgcagtataaagttatccaaaaacatgatgaaagtgaggggccagagacaaatcctagtttgaaaactgaagtggaaactgaaataattcaaggtgtccagctaaatagggttaccaaagaaaaaggaaatgaggaattaaagcatatgccagaagacagacaactagtgctgtattcccacacacacaaaatgatagtacctgtaaggcatatgttaggcgtatattttcttcaattatctcttgtctgtaagagagagcttttgatgaagcatcaacaagatcttgttgctgttgatcaaatgcctggttacaacagcaacaatctttcagcttccaaacaattaaattaaatacatttaatacgagatgaataaaacagataagtaaaaaaaaggaaaggcctaccagacgcatgtaggcaattctcttttccagaacatatttttcattgcgaatttgggcttcctataagataactaaaatgttagtcatctgatttagcataaaattaacaaagaatgcaagggatgaaccaacagaaagcattaatgactacatagtttattatgtcatttacgcttatggtcgcatgggctttatttgtggttgagctgattgtttagggttttgctcttgttttgtgccctttcgaagtgaacataaaaaccattgaagagattatctttggtttggatcaatagagagtttgctgtttctccgatgaaacggagtaagatatttgcaggtccttctaagtagcagaaaatctatcttttcccatgaatattatactctgtttatgacaaccttttattgatccaaaccatagatgattttcatttcttgttctgctcacttctaaaggacaaaaaagaagagaaaacccatatgcaaccaaagaaacctgactcaatcacaaacaaatcccaaggaaccacaaaagttagtaacacaaaaccccaatagtgactagaaatctcccatgtcgaacaagactcaccttaacagaacagtcagtaagatatcttctcaactgcgaaatttcttgttcctgctcctggaccttgtgaatgaggtcctgaataggtacatagtccggtaaacagtttttcatttacaccaataaaaccaagacgtagagtaagtatgatagagacctgcttccatgcattgcctgaatgatttacttcaccaactggcatagatccatgagtagacgaactgaagtgtgcgtcatgctctccctccaatcgcattctagca

SEQ ID NO: 731 - DNA, 82415 bp, Arabidopsis thaliana
gatcctccataaacctacttgtttactttatttgttttagtcgctatttagtcctaacacgctgtttaacgactactttgcgactcatagtgtagctggtaatatatgtattcttgtgatcaatatatattttatttttatttttttcactaatatataaattttcttaagaattatggatgaaaggtgctctaagagccaaagaaattgattactttggcaaaaagaaaccataaagagcatttttcccaattttttaagttacaagatagaaaattgcaagttttttttttgttttttttgttcaacaatttgctagtaattctaaattgtaagttgtaactaataaaagaaattttcttccatggtggtaatcatgtaatgccaagaaacactatcggtttatcttatgcaaatcttagccgtaaccatttaatggacaattacagtaaaacctccataaattaatactcgataaattaataatctctataaattaataattttttccggtcccgagttgggaccagtgtaaaaattgatacaaatcgataaattaataagataataatttttttgaaaatcttatataaatatatggtcccatcaatattataaattaataattatgtaaatttatcactatatacacatatgtatgtatatatatatatcaatattatatgtaaaatatttactgaaatatgactctaatatttatttatttcaatttctattaattatttgtagagcttaattctaatatttttactacgtcgaaaaaactttgtattattttttaaacttaataattgttttttgcttgtaattagttttagaaaaaaatattgattataaagaaaaaagtattttttatatcgattttttgtaaaaattacaaaatttgtaaaatctctttataaattaataattattaatttatcgataaactaatacctctctaaattaataaattttttcggtcccgacattattaatttatagaggttttactgtaaatgattacgtggttttataataattcaattaaaatgtgttttgagaaaatggagcagaatatacagtataaaacatatgaaagaaaagagagactcacgaaattttgaatatatcaatcctttgcattattttctgtgaagtcttacccgaacattaatgtgagttacttgtttttcaatcgaagttattaggcttgttatgttgcaacacagaattcaggacttcaccaatgaaagatgatatagctgtaaactcaaagtctcactcgtcatcatcatcatcatcatcatcatcatcatcatcatcatcagcagcagcagcagcagcagcatcatcgtcatcatcatcatcctcatcgccttccacagcctccagtccctccgctaatgccaccccacccaaaactccggccaccgccccgaccgccagtccagtccccatcccaccgaacttgctccccttttccggcgcgtatggatcgccataaggaagcgcgtaatttgatcctggagtctctcgaacggtgacagtgacgtcgagtttgccctgaggtcggccagaggggcgtttgagcttgagggttttcatgaaggggacgccgaagccgacgtcatcaatgacatcacggaggctgagatgggcggagccgatgaggggctttgtgttctcttcacggcctgcgtgtacgatgttgatgtataccttgtcgtcatcgtcgttggccggaggtaaagcgatgacaaatgtctcgttccacgttgtacaagtgttgccgtcttcgtcaactcttgtggaggatttgaacttcggatcgatccatacaacggcgtatggcttgtttgggccgttgcgccagttcacgttcttgatatcctttgccgatgagatggtcacctctacttctcggccgtgggatgacatttccttgagggtatattggaaaattattttgcacgacgaaaataacatgattcatccctgtgtttatgtatatatatgttttagttattagtttatctgtttaacagaatacttggtccaatcaaaaaaatagttgacatcaaacgaaaataaaaagaaataaatagttaatatttatatcgttgtcttgcgatatgcttgtgagaataatattatagccgacatgtccatttagtcggtccaattgtaaatctattgtctatgcgtatacgctattgacgaccaacttttaaaaatcgggccatacattcgaaatgggctctttcagacatgaaccaaggttttcttaggaggtttggtacaacctactgataaatccaatgccaatattcaaaaccatgtgagtcttcacttaaatccaaactctacattgggtggaactgattttaacggtgacacaataatctttcccattgaatgaatggacatgcggtttaaccgcggataaaatgtggtgcggttttaatagtaacgaaaatatatacacatatatttgcagatattttcattactattgaaaccgcactgcataatacggttcggttttcatttggagtcaaggtaattccagattagattattcatttatttatccaaaaacttaagatatggacatttagcattggttcctccctctgtctttcttcacagcatgtactatctcccatctattattttccatcggctttaaagagatcagctggatcatcaatgacccataagctcgagtgggtagataaaatgtaatattttgtgttgtagattgttggttgggtagaaattgtaaactttgattttatataataaagaaactaaagacattttttaatatataaattgaagaccatgaatttagttacctgacatcggtgcattgtgcaagcttttttagaaaaaataagtcttgttgcagtataatcaaatcttgtataaggcaaagtcacattcgtataagttagttattaagttaagaatcgtgagttataagttgtgtcgttcattagagtgtcttctcaacacagtgtttcgtttcatataagtatagatcgagtcttgtttctgtaacacacagtcgagttttgtaatacaatcaagtcaataagattgtttacgttcatactctgttttttctttcatactctgttcttcacacaaaacattaacaagactttggcgaaacataagctagcgcttagatttgtgttgatgcatgtgaatatgatcctccataaacctaaattttagttgttttcttaactaaaatttgtttttgtattatttttaagatatttctttgtgtttgagaatcttaaataaaatgtcataatggtttcttcttcaatgttttttttctgataaaggttacttcttcaatgttatgcgaagtttttattttattttattattagggttttctgcaaaattaacccttcaagtcaatcttgtttgcaagtttagcctcaaagttcgaattatgcaagtcaatcccacaatcttaaaagtcacttgcaatacagccctcccgtgtatcgatgacgtgacactcgataactctgtttgaaaatataagggttttgtgcaaaaaaacctcaatataatttatactttgcaagacaaacctccatatcgaataaatacatatcaaactacaatctaaaaagtctctagcaatatagcctttttgtgtatcgatgacatgataatcgataactcatttagagattttataagtctatagaatatattactttaatgcatgtaatttaatttaattattgatttaagttttaaataaaataaaaccgaaccgataaccaaaatatccagaaacgtagaaaatatccaaaataatacctataactgtaattataaaatcaaatattaattatttttagaaccaaaacaatcaaatactttaaataatcaaactatccaaatattaaatactattttacaaaatagaaccaaaattgttatcattgttatcattggcttattaatttttgtaagtcggctattatggtttttgtaaagctaggcattcttggtttgggtaatttatacacaatcagtagaaagtactaagtagaaaccataagattttattagccggagaagtcgttgtcgaacctccacagttccacttattacctactaaactaaatatgggaagtagagtccttgaaatccaataaagtgttttcttccatgtataaaatagggtatatatgtacagtttatagcgattacagaatgtaggtaaagaggaaatcattatagaaaacccaacaacttcatcaaatccatctataaattataatttcagaaatttaaacattaattttgtttcattagcaaaattatacacatttgtttagacaacgttgcaaaggtttctccaatctgatagaacttcttaaaacttgatgaaactgtggttaaaaaaatactaatactcaaatgcttatataccacaccggttagtccaacctctcgtcaaacattaagcatctaaacaaatattataaactattgaaatgaaagcatatgcatgtcttcagaaaatatagaaaatataaggtgtcatgcacatgtaattaaaagtagtgtatatataggatcgttttaaatacaggtacgatccaaaatactacaattttggcttggtttgagcttcgttaccatctttatcggcatttatagtgtcctacacttgtagcatcattacaatacttatttttgtatctcaattctcaacctctatccttaaactacaacttaatttaacttaacaattcatgcaaataaatttacggaagaaaagtgtaattgagtcattaattgaatcacaactacttccatgaaaccttaaatgcctaacccaactacacactgcacatctctataaaacacagcctttagttctttctttaccactctccacactacactctagtctcacacaaaaagaaaaacaatagctaatttaatatcttcttgtgatcatcacaataccacattgatccaaggccagttaaaatctctttcaccatgaagataaagattatgagcaaaacacatgtgaaaccaacaaaaccagtactagggaagaaacaattccacctcaccacatttgatcttccttaccttgctttctactacaaccagaagtttctactctacaagttccagaaccttctagatctcgaggaacccacattccaaaacgaggtcgtggagaatctcaaagatggtttgggtttggttcttgaagacttctatcaactcgccggtaagctggccaaggacgatgaaggagtcttccgtgttgagtacgacgctgaagactcagagatcaacggcgtagagttctccgtcgctcatgctgctgacgtaaccgtcgatgatctaacggctgaggacgggacggctaagttcaaggagttggttccttacaatgggatcttgaacttggaaggacttagcagaccactccttgctgtccaggtatgatgacttcttttaatgtttatatattttatacatattacactaatcccatgtcagtatctttgtcgtccaacttgtttattttcacgtataataatatagaattagattttcaatcggcgtgacgaaagaaaatatatacaactagataaccactactgattttacgtatctgaattatcacacaaatatctgattatgtaatcatttctatgtggttatgtttactgaatcttgatgcatgttatgtaataaatatatattgaactactacccgtcaataaatattaccatttcaagagaaacatcacgtaacatccaaaactctattagtattagctataaagaaaaaataaaatgaattacaaaataataaaataacgcataaaccagtatatgaagtacaagtgtatctttccagcaagaaaaaggaacgcagttcacgtacttcagaaaatgctgacattaactttgatcaaaacagagttaaaaatgggaaaaatattgacatctcctaactactgaagagtgcatattaaatcacaaaacactatacacgacttaaatggtaacaaaaaatcaggttgacatgcattttatacaaaagtttcttgttaccaataaaatttgttattttagaagcttgacatgcatactttatgcttatgaatatattacacatgcacgtattataccatgaccatacacatatgtataagatatatgtgtatgttcattttcatctctacagtaattgtagtcaatgatttgagaaactcggttttcgaatccctttttttttactgttttttttttttattgtgtaattttttgtaagagaaaaataaattaactgacacaaccataaatacaacattcaatgactgaccaataacatgctacggatacaaactatgagtaaatagcaaacaccacgtatgcatgtacaaaataagtagatagattaaatttgtatatatcactcaacaaatagtacacattagagaatttaatagtcattatcaatcaatcctatacaaatataaatatcagctttagcgccaactaaatcatatgagtttcatcatcatttttttttatcatcgacccacgttgactacttgactataacagtataaaaatattgttttcacaccaaaaaaaactaatagaaatattgtacaagaaaataacaacgtcgtgtaatattgagattcgtggggataaacactttcacctaaatagctgttcaaaaataaaataacttaaacactttcaacgtcgtatatttgattgattgtattcatacgtattaaaacgtgtatatattgcatacgtaacttcattcattatacaaactttcattttcgtcggatatggtcatttaaattctcaacggcattaatgtgcattgaatgtaatggctttagaatataggtgtagtcgttgggagagtcattgtctatgttggtctcgaaactatcgtccaaatcaaacactccaaaccattaacatgaaaaaaaaagcattacactaaaatttaaaagaaaaataaaaacattttcacaagtattaattaaccaacatttttcgtttcgcaacaggtgaccaagctaaaagatgggcttgcaatgggcctagctttcaatcacgcagtcttagacgggacatccacgtggcattttatgagctcatgggccgagatctgtcgtggagcccaatccatctcgactcaacctttccttgaccgatcgaaggcgcgtgacacgcgcgtgaagctcgacctcactgctcccaaggaccccaacgagacctccaacggcgaagatgctgccaatccgacggtggaaccgccgcagctagtagaaaagatcttcaggttctcggactttgctgtccacacgatcaagtcaagagctaattcagtaatcccatcggacagttcaaaaccattctcaacattccaatccctgacatcacacatctggcgccacgtcaccttagcgcgtggactcaaaccggaggacataactattttcaccgtcttcgccgactgtcgccgccgcgttgatcctccaatgccggaggaatatttcggaaacttgattcaagcgatcttcaccggaacagcggcggggctactagcagcgcacggaccggagttcggagcttcggtgatccagaaagcaatcgcggcacacgacgcgagtgtgatcgacgcacgtaacgacgagtgggagaaatcgccgaagatttttcaattcaaagacgccggagtgaattgtgttgcggtgggaagctcaccgaggtttcgtgtttacgaggtggatttcgggtttggaaaaccggaaacggttaggagcgggtcgaataaccggtttaatgggatgatgtatttgtaccaaggtaaagcaggaggcataagtattgatgtggagataactcttgaagcttctgttatggagaagcttgtgaagagcaaagagtttttacttagtgaggaggaagaagaagatgatggaaagaagctcaccaatggtaatggccatgtcaatggtaatggtaatggctatgtcaatggaaatggcaatgggtttgtttgagtgtttgtttagtttaaggttaattagataattaatcaaactacatattttggttaattagctaattaatttgattaaggagaaaaaccttatggctttttaagtatggtaataatgtgctcgtggttgataataagcgtgtgtgggttatttgtatgattatgtagtgtgtttggtttggaattgtaatatttggaccatggttttttagtacttatgttgtttaaagtttcatgtactgttgtcaataaaaaagaaaaattagttaatgcaattgttatcaaatctgttttaactttcaagtgaacggtgtaacataatttgttatttaatttgctaatctctaaaacccaatcactatctatcttcaatggtgattaccaaagctaaaccactctggtgtaaggttaaacagtacacaactttggtttacaaactcaaattgatgattttttttttgttaataagaatttcctaaaaataattaaatctaaaaccctaaagacaatcagtcttatgttctgccgtcgttcattgtcttcatcatctccgttaaaaacagagcattttcagattgatcgacccactctttctcctttctctccataaatctcatcatgttttcattaatactccatggtggaagaaggtcacgcgagttacatcaatggcggaatctgaatcttcttctccaaaactcctctgctttcactgaatcgttctcttccgttgttactactactaaagatctaagtcttgaagatgaacgaaagaggaaaactttcacagtctcttaccttattgattcattagggttaactacaaaactcgctgaatcaatctcaatgaaagctaacttcgatgaaaaaggtaatccagattcagtgcttaaactcttaagaagctatggattcaaagattctcaaatctcaagtattatttccacttacccacgatttctcattgagaatcctgagaaaactcttcgtgctaaacttcatttcttgaagcttaacggagcttcaagctctgagcttacagagattgtttcaaaagttcctaagatcttgggaaagagaggagggaaatggattagtcattactatgattatgtcaaagagattttgcaagatcaagattctagttcttcttcttccaagagaaagcagacgaatcgaaatcgaaatgtatcggttttgagaaaattaggagtaccacagagactgttattgaacttgttgatctctagagctaaaccagtttgtggtaaagaaagatttgaagaatcggttaagaagattgttgagatgggttttgatccgaaaagtccaaagtttgttaatgctttgtatgttttctatgagcttagtgataagactatagaggagaaagtgaatgcttatataaggttaggacttagtgttaatgaagtttgggcagttttcaagaaatggcctttctctttgaaatactctgagaagaatataattcaaaagtttgagactttgaaacgtgttggtctaacgaaagaagaggtctgcttagtggttaagaagtaccctgaatgtgtagggacttcagaggagaagatagtgaagtcagttaaaacttttcttgagctaggatttacgaaagacgaggttttgatgatcattaagcgacatcctcagtgcattggattagctgcggattcggtgaagaagaagaccgagtttcttgtgaagacaatgggttggcctttaaaggttgtagcttcgactcctattgtacttggtttcagcttggagaagttcgttttaccgcggtgtaatgtaatcaaagctcttatgtcgaacgggctgatcggtgaaatgcctgcgatatcgtctgttttgacgagtcctaagctgaagtttttgaagctttttgtggagaagcatcaggatgtgttgcctgagttgaactctatcttcaccggagatagcattctaataaataagatagcattgtgaagaaagattgcttattgtaatttgtatcattaaaagtctaatcagtcaccaaaatgtaaaccttttgttgtaaggaaacatttttttaggcaataaaacaaaaaatgagaacagttcaagctgattcaggcaagaaatcagaaaacttgtaacacttaagataaatttggtaacttttggcaattaagggtgtgtttagtatttgtctctaattagtcttctaatttgttttattaaccatttttgtatggtcacaaaatctaacaaatcatgagatttcaggtaaaacacttgtcatattcgatacatcacaacaactaatcttattttttatttctcatttttgtatataataataattgtaaggtccagaaatagataagaagacagagaaggttaaccactccatatctacactcttttcttaccccaccaaaccaaattgtcatctctcattttcttattcaagcttcgaaacaactcttgaaactccaaaaacttttccaatgtcggaagaaatacgagagaaagatctcaccgactctaaaccatctccaccgcaaccaccaccgaaacgtggtctcatcagccgcaaaagacagcttgtgtttctctctttcatgattttattagccgcaaaaggactcgttgggatcggagaaatagcgtttgtaatcttgtgttatatctacttgtatgagtttctctcaagatttgccttccctcgcaagcaaacagaacagaagaagagactctcaaaccctaaaaacaaactctttcaagcttacttcctcgccactgcaattataggttactaatcttttctcatcaaatacttatgtaaatgtttttgtaaataataaaactctttctcaggcctactcttccctctttgttacatcggagatggaatataccgtggagacattcacggtgctggagccgccgcaccacatctatttctcctctcaggtcaagctttcacagaacctattggtttctctgacaagtattcgatgccaataggtattcttggaccggttttctacaacgctcgtaggattttcgctcttttggattgggttaaagcagaattctccgacactcaacgtcctggtggtccgttgagattgtacggaggaagagtgattgcatcggttaacacggtgatgtggttttataatctgtttggtctcttgttgcctgtgtttcttcctaggtcttgtgagatttacttctccggtgataacaaagatgattgaactgatttgtatttgtctcatttagaataaaaatgttgagttgttcgttttagtgctttgtgtcttatgtctcgatcgggtaaaagttttgggtctaatggattattattaatggagtataaagcaagatatctcgtcgaaaaaagaaacaaaaaatcgtcttgaacaaaattaagaaagaatgaaacaagatcacgaaaaacaaattttggttttgttggcaaaagctagataaagttgaatatctctatatagagtaaaatgggtaaaatgagtcttttacctagtgggtgagacttgagagtgaggcatacattgaaagtttattccccactaagcattcgaatgataaagtgatgtaaccggtgaaaaatataaaaatggaatttgatactacttcacattgcctttgaaatacccaaagttttggacagtacgacacaaattgaatttaaagtattgtaaccataaattaagttctcatagtaacacgcattacacattcaacaacttagccttcctatatagaactttgaaatcttagaagcaacatcgtgttgcctcgcaatctctagaaaccttcataaatattttcagatacatttgttgtgaacaaccgtagagaatgtccctcaactactagaaaatctccccgatctcttttttcagcaatccattaacctgtcaatgcaaaagtccatcattactcaaactctctgagcatgatcaaaacaattttgctattgactcttgttttaagggagaaaacgagaaactgaagcactcgatgataagctaacctgttttgctgagagtccgatactttgcaaatcatcaagctgcagtagaaaatacaaaaagcttacatacaaaccaaaacaatattgaacttcacattgaaaaaactgaatttgctagtgactatatgctaaaagcattccatttcaagtcttatttgctagtgaatatatgctacaaaaatcaacagtttattgtaaatccatcatgatagagatgcaacttctcatttgtaacactttatggcacttaccgttttaaatggagattcttcgcggagctcaactatgtaagctgctctcttgtccccaataccctataatcatcaatgtaggccataaacaagttaggtactaacctataaacaagtcatttcaattttaaaaacattctgatcaatctagtcatctcacctttaacttctttagatcttccctgtaaacacaacaagagaagagaaaattttagttttagttagcacaccaatatagacaagattatatcaacagagttatttatacccggaaaccttatatcaagatttagaaagtttgaagtttctaataatcaaaaagaaacttgagttatgtatattttgagtttaccaaagaacaaaaataacttactttccagctgtgtttatgaacttgaggtactctccaacagcagaattctgcaacatttccagaaacaaaaaaagaagcattatatcagtctcagagattttttgttagtttcaatgaaaagtcatttttaatcaaacttgttaactctttttaccttcaatttagagctgtgtgcgctatatgtcttccaaggactgcagccaatgttcgaaggcatagttttctccggcgttcttagttctatactaacagcagcttcagcagtaatatcactgtgctctgatgcttcttccgcctgtaatatagttaagggagtttgatgtttctcaggtactgatagttggtttgagaatttgcatatcgacttcaaattgtttgatagttcttgaagtcgcatgctgaggggtggtgatgcagtttcatttgctagcaaactgttgttttctttgtccagattttcacctaccataaagagaaagaccatcaattgagcaaaaggtttcattatattactttcttagattaatgtcacaggactcacaacctaccttcatcaataaccagagtcagatcttcttcaatgactgaattgttttcatctctctctactatttgtgctgccatacagagaaaaaaaaacaattaagatcaaagtcagcctttcctttataccagacccttctttatcaattttccaatctcacctttgtctacaaaagcatcatcacaatgagtggctccagcaaacatttcctcttgtttccggggtgtctcctgaagaataatggaagaactgtcagcacaattgatatccagatgttgaaacaaaacataaacctacacaaattaccttatctgtagtgtaaatagcttctgagcttaaagatgcaccatttgaatagcccttataaatgacaagaagcaatattagatatgctgaaacaaaggagacagcttcgattctttgaacgtgttttggcatgcttaagatacagagaagttgcagatggaaaatttaccggttccatggctaccgtagaacttgaaaaagccagagaatattcctgaaaagaaaaccactgaatgtaagtaatgtcttgatgattttcatttagcattgacgttatataaaatattacctcttctaccaaagaagattgaaaatctgtaacagtaatcgacgaacagatttcctacattaagaacatgagactttgtaagtaatgccatggtaataaataaccacgcagctccatttagttcaggctcgcaaggatttacttctttaggtgaagaggcctgaacgctcaagacaacctttgaagtggagattccctgcatcaaaatcaacacaaatttcattcaaggtgagaaaaggtattaaagagcattactcaaatattcagcaattagaatgaagatgctttacctttttcagaaccatctttgctttgccttccacctacaaaatccaaaacaagtctaactgaactatttctgaatccataacgataacaacaaaagatcaattaccttcttagagctatttttacatttcaccgaatcatttgcttcaccgaacagtttccttcaaacattgagaaaaaaaggtcattctttgatgttctaaaactgaacaacaagagtacagggatattgaggcttagagttgagagaaagctgattctgaaagatttaccttgctttaattgcagaagtagcagtgttgattttagtctttctctctgtcacatttcccctcagcactgtctgttttctagaagcagcagacatagtcaaaggtgtctgtctcctttgagcggctgaggataatgaaacagatctatcgagaccattgatcttcttcttggtaggattagtgatggctcggttaccgcctagacagatccgtgatgctaagtttagcatgtaaaaggagtcttggctaaattcccggggctgaaacgaaaaacaaaagggttagcatcgccagttgcactcagtgatagatatacttaaaacgaactcataagcgagcaaagtataccaaacatgtgattagcaaagttatgttggatccttttaaacaatctttcagcatacgagtgagtttgctctcccgatatggcacatgggattcatttgcgtttagagcatacatgacattctgtaaagcatatatcgacttattaactctagcaatctctagaggacctaaagcactgttttgtttcctggaatcctcatatcctgtcagagaaagacaacacccatcacgggccatcagatgctgacataagatcattacacagacaagacaactaaattgtgatcttaaaatactcaacctgccatatcaagaaagttcattctcccaagggagcctgaattggcgtttccagtagtaacatgtatcatcacacctttatgactcctagttggaaggtcactggtcagcttctgggatttcttgaaaccaaaatataagttctggaattctgagagtgacttcacaggtacctgaaagcagaaacattgaaatattaatgatcctaatctgaaaaatacgtatgatgttacaaaacttaatgatcaagaacactaaataacttgcctgagaaagtccctttagttgaattttcccttgtgcaccttctaatacactaaccactctcttctcttggtctaacaggtcatacacagtttcttgagacacctcgtaaactgatacaaaaatcgcgtctcctctttcctcagccatggataacatctcagacattgtaaggacagctaaaccaagttccctctcatttcccttcaaaacatgtcatacataactcaattagcattttcatataaagtaataacaacacaactcagtacctttcagagataactgctttcaatacctgtatcagatgtgttttaccactatttcttgctccgtgggcgatgacattcgcatctttaccctcaaagacagtagatataagaggctttatctccttagtgagaattgaaccagtagtttcattttcttcgtagcaatagtccaatctatatgaatctttcgatctaccacaacacagaacaacaaacaaacatactagttaatttcccttgaaacgtcgctaatccacaacagacggagaaagatttcaactcaaaaatataatgtcaaacctttctgaaaacagaagattaacacaagagtttatatataaaagaacataaatttcgatcaaattaacgaatcccatgacaaatccgataaacccactcaaaattcgaaatctccaaattaacaacagaatcagaaaggaatgaagagaaattacccagcgaattgagctccgaacgaaattgtaacagtctctgaatcatcacccatcggtttctgaaccgaaattgatttcgttgatgccagatccgtcgatggcttgaccctagccaccacccggactactttccggccatggctcgtcatctttgtctccataattctcaaaattcctagatttttttctccctagatcgaatagaaacacaaggaatctctcttggaaagggaaaaaaacgtttgaatttgaagattttgtttcctttctcttaatgtttgaatgtagtagtgtcagatttgggagataaagagagagagatgaaagtgagtgagccgttaagtaaaaaaattcaaaatctcgaagtctggctcctttcgatgatgactcaaaacgtgtcctacctcggcgtatctaagaagcctgcatacaaaacagtgtcgtttagtattaagttaaacgcaccgttttacaggaggaagaaagtttctcggctccgtttatttgagattggcccatctttattgtgaagcccaataattaagaaaccctcttattaattagtaggagttaatgtaatcgtgagtagcattttctctctatcaatcaatgtatcatcaactatgttttccttttcttttcttttttttttttttttttttgctaagcttgtaaatatcattagaaatgaaaatgaaggaattacagaaacaacacctaaagtagagtaatcttggaaaaaaaggagagtaaaaaacaaaattacaataaggctaaagtaataaggctaaagtaaagtatacaattatctaatccaaaggagcacgagcggacgccaacgccatcatcaactatgttctctggtctctttgcgtagtatgtggatcagatgacaaagtaataagagtcttttcattggtagaaacgggaagagaacgatatgtagaataaaagtattatttttagtaccgtttctaacagattgataatttctaaaatgatatactcatacatactttgccgttgtgataaaaaaaaaaatctacgtcgttgtagatgaatccatctttttccgtttatcgactacgagctttgtgtgtgttgattacgttgaatcaacaatttttccatctcgagcttctctgtgaatactgtaatagctattactaagcttgtagaattttttttcttcctacttttgagttaattaaccgaccatatatatctttgttggcgtcgttgcttagtgttgatatcgccttgaaatgattaaacggattgttttctccagggaaatcaaataatggtaaacaattttcaatttcgagtatgtaaaacattagggttttgcagtttttttttttttggtttgtgagaccaaaataaaacatctccgaaagcaatgctaacaaatgttttttcgctctcaaaatagattgaggagatacaatccaacccaaacaaaaaaagttacgtatcacgcatatgtaattgaaaacacatacattaattggcaagacaaccgaaaaataaccattatccatacttgtgaaaagtgatggatcaaacttggtaattgggatctcccttttggacggtccctgtctgaggataagacttgagatcagttccatgagctcctaccacttgacctattacaataaagattatctttatatacttatttcctaatcgttaccataacaaattatttatttcttatttacatattactaaccggaaacgttattgagattggctgcgtttatagcctgttgtctccgaacacacgcgagacagatcataatgggggcaccaacaataaagaaaagaatgaagaagccgagaatcatatcaccaacagagttcgtgttgcctgaaccacctgtgtacccttcgggttcacactccaaaccaatccttcccatttcacgtgctgattcctcggacctttccatctgctttttgtacatatcctctgaagtgggcgtcgatgatccacatgaccgtcctgaaaattttcttgttatatcaaaaatgtagatatcttggcatttatattttgtatatgaattgctgagattggaaggaactggtttgatataataagattgttaccattgattgatccaaccaaaaccgataaagaaaagatgaagagaaagaggaggacacgagacatggctttttgtaatgttttgtcttgatgttgataaattagtgtatgtttacaagttaatggtatttatagaattatactaccaagtattttttgctcgcaacaatgtatttaaatgttttaatacatatggggtcatggcctaatgggtgcatactaaaatggccaggaaagaaagattcccttttaccgattcttattttgggaaataaacatatttttgttcatttgattaacaaaattataattagttacatgttggctccaaactatatattcatctaatatgtggccgcttcatactaattacttttcttgatttgtaatttagaacatcgcacgtcggtcgtgaagaaggtttacttttttagcaacgataataagtcaagtcaaccaatgacagttacattttccgttgctcccatattaaagctcttaaaccaattacaactagtacttgagtaagttggctttgatacattttactactacattttgagtattcaatttttaaagactttcttatttgatatagtagctagtgagtataaatattgcaacttgattcgatagatagccaattccggtatatgaattatggccaattattgttatattatacattacaatgtgcatattcctatcctgcagaaactaaaataaccgaatcaaaaactcaaaaacagactttgtgaaagaaaaaaaaatacctatattttatattccaaaacgatgtcgtttatacgagagattgagaaaacgcaagtattcgaaactttattgggtcgtctccaattaattaaagaccaggcccatttataaagataagcccaataataaggaccctgtctcaacaactagggtttcattttatatatcgaattatcgatgaacaattagcccctctggagaagccttcacttttcgtccaagccgctgtgagtatccttctgtctctgagcttttctcgtctctcttcgtagtcagttttaggtgtttaagaaatttgcagtcatcttataatctcagaattgaacttttttttccttgcatttgattgtaaaatcagatcaattgcagaagctttggtttgtttcgagctttgcttttggatattgttagaattttgtaaagcatttgattctgcgatttttttggttgatcatgattcatcaatttagattagtctaatttgtatcacttggaatgtatttaataatacccatttgcttcttttaatgttgcttgtgtaacatgattagggttgaaatctatgattattttacttctctgtttagtttattctcatgttgtaacatttgtgtttgttgcttagaaaaatgaagcacaacaacgttatcccgagctcacactttcgcaagcactggcagaattatgtcaagacttggtttaaccagcctgccaggaagacaaggagacgtgttggttagtaaagtctctacattttctactttaaatgattttgctcttaattttaatagtgtatgtttcttttgtgtgatgtgttttctcagctagacagaagaaggctgtgaagatcttccctcgtcccacctctggtcctctccgacctgttgttcatggtcagacacttaagtacaacatgaaagttagagctggaaaaggattcactcttgaagagcttaaggtttggattcttgaatttttcaatgttctaagtgttctctctttatagatattaagatgaaagctcatagttgcttgcttctttttgtttttttttaggttgctggtatcccaaagaagttggctccaacaatcggaatttctgttgatcaccgacgcaagaaccgttctttggagggtcttcagtccaatgtccaaaggttaaagacttacaaggctaagttggtggtgttccctcgccgttcccgtcaagtcaaggtatcaatcatttgagatcttagttagagtagtatatttgagacaccctcttgattcttgagttcttgttataacaattttgtatcttttgttttcaggctggtgattctactccagaggagcttgccaatgctactcaagttcaaggtgattacatgccaattgccagtgtcaaggcagctatggagctagttaagctgactgcagatttgaaggcgttcaaggcttacgataagattcgtttggagcgcacaaacgcacgtcatgctggtgccagagccaagagggctgccgaggctgagaaagaagagaagaagtaaaattcgttgctttatagagcttaatcattcttgaattcttgttcttctggtttttgattttgtgcacgactctgttttctttttggtgcggtttatcaatacatagatctcaaaggtttctggtacttgggaaagtttatggaagaaattataacgagtttctatatacgtatcttatattacaacttagtataaactttcgtagacattgtactgatgataagcctaattcaacagactaatacgatacgcgaaactcgagtaccaatgatactaaaacatattgcactggaaactttaacattgcactggagtataataaacctaagtgctataaagttatttcatgtttttaacaaaaaaaatgaaaataagtttgacgcattaataaaaactaaatggaaaatcccattaaaaaaacaaggtaccaaccacttctcttttaaactttcaagattttaaaatttaaactcttataattaaccatcaatgtgatagttttgttactttaaacatccaaagtgacttttgtgttcacctatctacacaaattatgggaaatattgattccgtcaacagatatatttgttttcgttataaataatgaggtgattttaataaataattttatattaataaaaaattaaaattaaagtttctatttatccttaataatatgttttaaaattataaaaatagtaaaaaatcagtccttgtattgagtggtttcttcttattctcttttttttttttctcttcttcgtgtattcaattcttaaaatatttcacgccaagatattgttttattttgaaagtttagagtgtgtacaagatgaacatgtagaagaaactgaatgcatcagttcttagaattattggcatgcctaaattcaaatgaaaagctactagagatacttcgtgcttgtaatattacaagtgatttggaatatttagatgaaaagcaaaacacaaatgatcagagcaaggcaattataacatatcgcactaaagtgtaagtattagtaaaccacataacaaagattacaaaatgatacaattatgaattctgaacatcactgaccaatactgtaaatgtaatggccatcccattattctcttttatttttatcatgtagaaacaagatacaaaaaagttaaaagactgttactttaggtcttgaacctctgagagatcttcccaactccatctctacactcctcagccattttcttcaccttatcgctcacctgaactgtcccttgctcaacatctgctgctgctccttttgccctcacaatggctgcatctctcatttccccagctcgcttccctaaattcactgcatattccttcaaaactgtaatccataaacgtattttctccatcacagtgaagatcacttcccgggactttccactcacggttccagccatctccttcagcttatccatcagggttttggctctcctctcagtttcttcaactgaggatctctccatctcgtttagtactatgctttgttctgtctctctgctgctcgtctcttgaaggtctttgtcaacaacaactctcagtccatttgtttcccatcgctttctagcttcttctaaggccctcccttgttctctagctttctttgcttcctcctcggcccacgatctgaacaaagaacatatgatgggtcataatatggttatggattggacagattgaaagacttactaattagaaatcagaatgcagatagattatttgcattataaacataatgtagctcgaactgtagaagaaatacctggccatggacaaggcttttcgttcaacttccaattcatactgcaactttgaaatccgctggctctcttcttcagcctcttttcgaagattgaaaaccctctctttctcaaaggttatctctgccttgttactcatcaaatcctccagcttctcttccgcatcacgtcttaaccgtgagaggacctccatttctgactcaaccgcagctcgttctttaaccaacgccagattctcttcctctctcttctccctcagctgctccaactccactttcgccagttccgccattttctcgactgcttcaatcttttctcgttccatggaaagctccttctcgaaactggcattgacatccttttcgacctctgcaacgagggcgttatgcgcagacacagctttttcagccatggattctgcttcgatacgtgccaattcctcactgacaatgtcagatgcctcaccacttgaaagagcaatggcagcttgccctttagtgactggtttatgaggctgaaacaatcttgtacaacctaaagtcgtgtgtgcattataataaggtaatgattgagcaagaagatatttagatggaaaatttgcgcataccaaatgcaagggcagcgattccttgttccccagtagataaatctgcaatgatggaaggccatgcatctgggtttatcttatcgatgtcaatgaagcccgagagtttatacagcatctgcatcatgaagtgaattaatgattatctgcaatattatgagaagtgaacaaaaccaagctcgatatgcaacctttttatcagcttctggaagttgtcgtttctccaaggccattttccagcttatcagatcctggcgtgaaagaaggctgcgtcggacaagaaacaagcaaaatttgtagaaataagcaaagtattaaacgcaaaggcattgtcaaagtacagaaatccatgatattctaaaaacagtaagaagaatgattttatgccgttctggttcatgagactatcgaaaatctcactgatatcttaaaagagaaattaaggcagccgtaccagtataagactatgtatatgtttctctcaatgcgatttacaaacgcagaattttttttggacaagtttgatgattttcagcaacataaatacctttcaggggaaaataagaatgtgccctcaacatcgtcaagtaaatcacggttagaaagcttgctcgcgataagtcctgcttctgccaaccctgaaaagagtaaacagaatttagcttcattgtttatcttcttttcgggtagaatcaaaattcaaagttcactctcaccttgaatggaagaaaaatcagggtcttcgggagtaatatcatcaaaagcaagctcagtaacattctcaatatacatagcaggatacacttttgaggttgtgtttctgcaaagagttaaagaacacacataaatgcatgaatttcactttctaatacatacgaaggatattttgaccccaccagaaacactaacaaaatcatgaaagtataccttgataacgcgctgctggcagaaatcagccacctggcatattctctgcgagtacatagatcactaggttgtgtatcagtttcaatgacctgaaagatggaacaaactgaactataagctgcaaggtatacaagtgccagaacaatcacaagtgcaagatatacatagtgagggtctatacaacataaaaaaataatattaccttcagaacttgcagagctgcaaatgcttgacactggatctgatccgcagctacggggacaagaatcttcccaggattaactataacagacataaaaggtgcaggaattccagcagaagaaaatgcacttccaccactgggtatttccaaaagcattctgttgtcgtcaagctcatcttgactatatatgtttagttcatcttttgacccatctgttgattctggcacaggagattttgaagattcaagttctttcgttgtatctatgtctgatattgatgaccaatctgaggtttcgaagtactccggtgttccgttaacctcagaaagctcttcagcagtggcaaatgctgtttccgtgtcatttagtggcacaatctgaggttttgaagtcgaatccaattgtgaagaaacctcaggaagctcagttacagtccccgaggctgcataagcatcgatgcctgataaagaagataaggaatcttccttctgactgttaacatgattttctaaatcagacacattggttggttcagtgttcaggagactctctggatcttcagaatttgtattttccacgcccacaagattactactttctgcatctagaagaataggctcagtggatgagtctaacagagacttagattcagatattattttctcactttctgctgtctcaggatcagtttccgcattgaccatcaaatctgcttcaggagtattttgggggatactttcagtggcatccgcttcatcagtcatgacaccatcaaatgacgatgtctccttaccaagtagtttatcttcgccagacccttcatcacttttctgagctacatcattgctttctatactcttatcctcgtccttaagattgctttcctcactgttagctaccttaatctcatcactagaaatttcatcagatgattgaatcatgctttcctgctgagaagtcaacgaatgcatttcctgtttttttgttcctgcgctcaaaagatgattcccctacaataaatcagtacaaacaattctgaaagaggcacttgaaacgagcttgaatagctttaagagaaggagtattacgcttgctaaaagatgctgctgcatagcttagcccaagaaacaaaatgattccagccactccagccccaactacacctgaaagcaaactagttccagattgttattagtccacaagaaaaccggtaaactaaacagcttcagaacagagaaatcaaaatgctaaagagacttaaccaaactccaacgtaacatgcaatgtaccatttgagtatgtgcgctgtttagcgaacctctcaataacaattgaccacaaaaacaaatcggcgtatacggttcatcaactcaatctaaagattatgtgtagtacatccataagaaaacaacactcatggctcctaccaaattacacttgtaaactatgcagccatatagttttagcttcattgtgtaatcaaacatttcaccagctggttcttacgaaacctcgaaaactccgaatcacactgaaaaataaaatcagaatccaaaaacagatgttcatccgcatataccttcaatcaaactcttcttcttaactctggaagacttcttgtcatcgttatcggaatcatcccacccagccaaattatcagccgacgactttgacgaatccgatccggtccacgcatcaacttcaggcttctgcgaaacacagacaattccataacccgatttcctagccaatcgcgatggtcgtaagtaaacggcgggagatttccgacgcacgccggagctcaaagcgagacgaagctggagggaggtaggtgtccacgtggcggtcgcagaagccatggtttgattgtagagagagtaagagaggataagaaaatatgaagagaatcgtcagtagaagaatggtagaggaggattagggtttaattggaattaaagtaattgtatcaaatgtattctgtgtttttggttggtttcgttacagaatattgcacaaagggagagcgttggacagtgatcagcctcacactaacacacctaaccacctaattgcttttatttatctttccatgtttaacacatatggttggtttaattcacaagtgaaaaaaaaaagctagatgccacgtcagcacgaagccaagaccaggtgttgaaagctcttgaatggaaagtgttttcgctttcattttaaacttttgagagaacatacaaggaacaaagaagagagtttatcacgttttactgttttagtttaccgctttaccgaaataggagtggaatatatccaatgacaacttaagcttctactaagatgacaagtacaaaaaagttacaaaaagctattgccatttttaacacattaatctataagatttgagggttataagcaaggcaataaactatacgagattacatgttgagtggttgaaaaatgttgagaaaatgagaagaagcttcattttttttctatatcatgctcagaggaggtagaactgagaatagagataatccctgattttgtaatagtcttcacacaacggtccttctatcagaatttgctgtggacccgatgctcctccctgaacaatccccaacatatataagtcattctctgatttgttgtaagaaatgcagtatttgctttgaattaccttttgacccgtcggtccaacctttcgtagagtgacatattcaccacaacgtaaagctcctccacctgcaaattctacctgaacacccttgctcgacagaaactgcttgaagtctgcgattttcagatcacctactagaacaggtttgtgtggcgaagcagcacctggcatcggtagtagagacctcatgtccctctctgtcttccctacttcggaatccacccaagctacttctgaatctcccagctgatattatttcatcattcttcagagacattggttgcaaatcggaaaagaagaaaaaaatagtcacggaaataaaaggtaccttcttgaagatcacattgctcatcagcttttcagaaagttggacctgatgtatcaccatacagggttaattcaatcacacaactcaaaacccatgagttaaaaaggatcttcctaattctaagtaatttctaccttgtaagcacataaatcagaagtcacatcgaccgtttcctctatttgaggagcatacacgtgtggacagatgttgttcaagcagtgttgcttcaaatgctctgtagcctcagctatcgcgtgcaccaaaaccttcacatgatatatagtattagatcaccgcaagtttccagttcagtgcttaacactatatatatataagacgagagagaaacgtacaagttttaaaggagaaacatgcgcaatcattgacttgattgagcggccatctgaccgaccttcatagtccattttaacaagtgaacaactaacagtcacctgtgcaaaagcataagaacaaactaaatcatttatcagggaaattagacagcagttaggtatagacagaagaagactaaagagccatattgttttgtttagcaggcaaggcctacgttctgagaataaccttctgaaacttctacatgacataagatcaagtgggtaaaagtaagaacacaaaagttgttcaataacaagaagaaaattagaccgattaatccaaacaacaaaatatctgtaagttgaattatcgtgctaaagatctgattagcaaggtctcccgtgataactaattagaagatcaattaataaatttcttgtatgcatatcatcagatgaagataaatttgacaggcacaacgccatgtcaatgagaattcctatctctctatttctaagtgagaagactactccttgtgcctatcattgataagcagtctataacaataatcagagattctagaaagggagaacaaatgaggacattaactgagacaaaatctctatcaatgtattgttctttggatataattagagtctacttacaatgagctcattggacatgactttcgaaggtcttgtatcaagcatgagactagcagttgcctcatcaagccttccgtccacatcacctccgttctgaaatggaaaattatatcacaaatttaataagcaacacaagactctacatagaatgaccctaaacctttactagtaagcaatcagttgttaaggaaaatataaagatggaactgtagaaccagtgcactcatttgaagaactgcactcataccaaatcaagagcctaagcaactttatggcaaaagatttcctatctgtatcccaaatcctcagagcatatcatgcagatttcttacatctttgttcttcttgatacaaaaatcgtaaaaggaaccaccactatgcaaacatcatggaaattaagaggtctaatttgcaaatataacaagagctaagaaagaccaagaccaagaccagaattcaaggaacgtacatgcattgctcctcggtccatgtcttcatccttgatcacatagtcatctggattaataatctccccaaagtcgtcccattcagatgtgttatcataatatgggaacattggagctacgctgctggatgggggaacaaatccatcaatcaatatatctttatatgcaggcccgtgagaaccaataactgcaagagtagtcagaaatgtaaaaggtcagttgcagaccactatgtagtggaaagaagagcaatcaacaacggtagccagaggtctaattgaaacagacacatattgtgggactgtgaaaaactaaacaaattacccagaaatgtattgtgagacttctaaatgtagcttctaggtcactcaagataaccacataaatgcctcctaaaaccaactaaccagtacattacagagggtactatgtgcatagccattttcagtactagatacttcaattaagttaaagtttacatgaaaaataagaagttacaggccacagaatattcaagggtaataaaatgttatataaaataagaaaaaatttaccatcgtgagtagtcttggtatctatgatcataggttcacttgaattatcatcggatccatgggaagcttttgtttcctcctctttaacgaggctagctcgcaaagcttcttcccttttcagtctgttttgctcttcctcatatgcaattaactcttccccagccaaaggaaccctcttagacatggtgactttaacaaattttggaggtggggctgactgaagcatacgagctaaagtgccaaactgcaaatagaagcaaatgacaattaaaaatcaaactaacagcagtttagttttatgtgattgactacaaaccgaaacatcttgcaaatcttagatcacgtgaactatgaatggacacatggaaagtataatcgccatcgcaactaaggaacacgaccaatggcaaaggtaacaaattggatgaagaacttcgataatttcacttggatttacggtgttactggtatttcaaacttaataattccgtaatgctctgttttctggatagattgacatggacaagaaagcatagtcacacagaactgagaaaagcgtgaataattaaccaaagcttccatttgtttccaaactatttatttgaataaatttatttttgtctagattgaattttaattaaaagtatgatatttcagggaacaggatgatgtctcgctagaagaaaaataaacaaagtacgcggttacaaaaaaaaattatgttcatttgagatgaatgatatggccaattagacagtttgtgcatagtggtgtcaattccattaatatgatagtctactaagaccctttattttgtactggatgtaactaattgataaattcaagactgaaagctctggagattatcctaaaggagcaagccaggctttggtggtaattataatgctgctttaaggtactcaatctctgcctattgtgtacatattgggggtaaatatccacacataaatgggggaactcttattcagatcagaagacaaaaaagattctcatatatccacttaactagctgatcagcactaggaaaagaatctaccatcaggtctttatagcaatgctaataaattttcgttcctcaacgtatgtgggttctaaaaacatacctggcctgtttcagtaaagaggactaaatttctgggatcatttgcccactccacgaatatctctcgagcaaaaccggcttcgagactagccatggaagcaagaacaacctatattatgagatttagtcactacaacatataataggaaaaaatctagttctattatcagctgaaaagacaggaaataataataaatccaccacgttctatgtactaacaaacactaatgagttacttataattttataaacaacctttggaccaggtggagcattatccagatcagtcttgtttatcaacagagtgacatgcctgcatgtgtttaaatttcatgtgatgtcttctgtattctaaacaaacgacggcacaaataaggcattcttataagaaaatctacctcaatagaaaggcattatcacgtgaagtctcaaaggactttgaaatggagtcactcatccactcgaggaaactcttaacatagtcaattgtgctagatgacacgtacgtgagaaaataaatgggaaagctgaaacctctttgtgaccaatgctgcaggtttgatcaatatccagtctttaaaaaacagctgaacattaactaagagcatgatacattcaaagcggttctattacctgttcaagtatcaagagaagttccaggacacgacccgcagtgtctactggcaatagaacatttcctccaacttcaagatgttttgaaatggtatctgaatgataaatggggacatgcacacatgtttctggcagttagaagcgggctgttttaaatactatagaagatacacaacacatattgggctacaagctaacctagaaattctttgtccctttgctgtcttgcggtttgattggtataaagagcatgatatgcatcggttatcagaacagcaggccgaacaaaagactgtaaaacagttccattcaaatgcctgaattaagatatacaattcagtatcacgagtccacatctttacttactgttatgaacattactcgaacttcaaataagataaaatctgaacatatgtacctttctttccgatgattgtagtcaacagcatatataacatcctccccatcctttgttatcctccagatgctacctcccagcatgtgtccagcaacatgaggagcaattacaataccctctccctttcctgatagggcaacgataaaaccttgagacatcctaacaatctttgaagtcataacttaggtttcaacaaccaaatactcaatgtgtgtcaaagaactccttcccgatatgagatcatagataatgcagatcaaacttgcttgagataagtgtcaattgtttctagtttgctatagagcctagaaatcactaaaaccacataccagaaagatggtaattttgagagtaagtcaatctgatcacattctggaaagcagaatctatgtcatccagtgtaaacagatcaaagtcggatacttgctgcaacagtaagatcatcgtgttacaatgcagacaattgcgcaaaaataaccactccagtagttaacaaaatctcaccttcctggacaaaaactgatcatacattgtaaggagacctaatctatgaacaggctcagtagcataaacaggagcggagagtccaagctgcttcatagcataaggaagagcaccaatgtgaagtgtatctggatgagaaagcaaaactgcatctatagtagaagcaaccctgtaaaccagaagaatcgaattcaaaacaaattagattggtgaattctggaaatgtagataataaggatagagaaacctggagagaggttcgaggagcgatgtgtcgaagagatcgttccaaccacagtcgatgaggaagttgaaaccatcaatggagactaagtaggagagaggattctcgttgtaaactccgcagagaggagtcacttgcaccgaagtacccatcttttccgttcgccgatataaaccctaaaatttctccgatgaactaaagaagaagaagccaccgtgaaagagggttttttaattctgtaataataacctccccggtccatatatttccttttacttctaaaataacccttttcttttcaaattgttcatttggtacatataatctttgaaattttttctctctttaccttgattttttaaccaacacaaagagggattagtgaatcttttaccaaaaaatgttgtggtagcagtgaaacatagatggtgagtccattataagcatatgagtcaattctattgtatgttcaaacttcaaagtagatcggtttcattatgattgctcattcatttaaaattacatgaaacttcattcattgtttcaacatgaaaacattaaacacacccttaaggaaaaataggcaaatctccgttaaatatactagagtaaatcaaaaacttttaagcagttgtaccaaatacactagatctatgagcatatggtgcaaccagaagaccattacaagttgataagaacttacgcataaacctttgtatttattatccgtaaatcccaattacaatgaatcaaaaccctatattgataagatcggagttacaatgctcatctcttatcatcaagaacatagcacacaagccctaattctcctcacaacatcaatgatcacgcaggataatctctataattcctctctaatatccctatttatactcttttattcttctcatgcttctctttagctcttcacacgtgcctaattctcccacatgtgtgctctcttatcactaattagtaaatgttgcaactaaaagatcactacaatggtaaaaaaatgttggaaatctcttctatgaaataagagatattaatgaatgaattcactttcagttaattttgaattaaacgtatttgaattctgatatagtatcgaagttcagatcatttgacataggtgtgttgcgtaatacttaataattcaatagttcgagatgaactatatatatcatttgttaggaatatgatggacaataagaaacaagtagctggtatgttgattgtgacgaatgataagttcttcctgattttattgatgcacgttagaaagccaaacaacattttgattcaaaattgtgatagcttcacttcaaaggcaacacaaaaaaaaaaaaaaaaaaaaaaaaaacatatgcatttggtgaaggaggacccgtgaggaccaaaccaaaatcataatggctaaggataacaaccataactaactatcaaacctttctttcttgatatgaatatgaaagttgtagttaggtaataataggttgattagttaaagagtgtaaataaatgtaattattatacttgttttcataagaaaaatgaccagagagattgaagacaattgtttgtgtgtgtttttttttggttctttaaagatagattaagaagattcggtgaacctaaaccaaaagacacctaagaatgtgattttcgattctaattcatcagctggtgacccacccatcaagacccatctccatacttagaaaaatatctaaaaatacaatacattttttataaataaataaaaagaaagtatcaaaatatggttattcttgcaaaaaaaaaaacttttttttaatcatttgttttttgttttttggccttatctacgccctatgctgtctactgcacataactaaacttagctctcgtgtgaaactgataagtagtagtgtagaactgtttttgtgagcctgtggctgtcactgaaatttgtttttaataccaatacagaaattggatttcaatacatttacagattgaaaattcttacaaaaacataaacaatgaatttacaatggtggaccacagtagaattacaaggaaatatttactaaacgaaaatagaaatctgaatgtatagagggaaatgaatcttttagctcaacagaaaaatttcatctatttttaaagctaaagttcttaaggaagaaaatatcatgtggactttatatttctaataaataaattaatgtaaacaataacaaatcaaagattatttttttgggtcagatatgtctctctttacacacatacacatgaaaaataagtgagtctctccatgtggtgaattatacatacatatttatgcatagatatgatatgagttttttttttaaagatgataagagatttctaacaattggtaacaacaatcaatctttttcatagaaaggaaaacaaattgtaagatggcaaaaacttctttgtgcctatcaatatcataaatctctctctttctcttacctctttgccaacttgacctctcctttccctttcttctccaaatgaattactttccacaaaatctttattatctataaatactataaacctttccatttccctcttaaatccccaaatcaattattttcctttgatacaacaggcatagaactcaacgacgccgttttcattcccagtctccttctttcaccattgaagcgtccaaaactgtaacaatgaagacgacgactcggctcctcgatctaacagcggctatggttctagttgtctacgtgtctttctctcctccgcttgtttccggcgaaccagggcggcgtgttagcatgacactggttcgagacgccgctgctctcggtgcttgtatgtctcacactccttttttttcttggttcatagaattatattattttcttgacatacttttttctgataaaacattttcttgataaatgagactgaataattcagttagattgatattgatttattatttttgcggtgagtttcactgttttaacctcatgtcacgcaacatcatctaacataaaccactctttattagctatcgttttctcacgttgaaaaataagattttacatatatataattatatatatatatatatatatatgtcacactttcttttgatatacatttggaattacattttgtgtagtttgcttggacggaagcttaccggcgtatcatttagacagagggtttggtgctggatcaaacaattggattttgcagtttgaggtaattaaattttacatttactctaactctctaattaacttttttttatatacgtcatagaattaaatctgtaattaattcgaaaatgattaaaacacaaaacgattgttattcttaaaaatggttgggattaatcatttgctaccaagaaaatcaatcagccaaccatttgcttagtgagttagttttttttctttttcttattggtcactgcctagttaaagtatttggtgttgtaaccaactccatgagtacgcaaataattgaatccagctatcctagggaagatataaatattttatgtgtattagtcatctacaaattattagtcaaattcttaaaataaatcttgataacgatttgaaatcaagtgattaaaattttaaaatgtgacagctggtagattggtaatacttgttttctagttatgtacacacttaaatacccgaaaactactaattacggcgccgttttaagaactttagagcattatcatgtctcgactctcgagctagttggatcgtgtctcacgcctctcactttatgacacgcatttataacattctctctatagttcttttctacgaaacagaaacacatttatgtttattcaatcgaccactcatttgtctatatagagaactatcaagattatttgaatctttactacaagtaaaaaatggttatagggaggaggatggtgcaatgatatagcatcatgtgtggaaagagccaagacccgtcgaggctcgacacgttatatgagcaagaccgtcgtcttcactggagtcttgagcaataacgcctctcaaaatccaggtcattcttaatttcattttattttaatataaacccatgcattatgagtaaaatggcaacattatccaataataatttattaatcgaaatcgaacatgtttgcttgtggttgtggtctctctttcacgtgatgatagttcaaatgtttctgttaaaattcagcttttttcaataaaataaactaatcgttagaaataatatttttggctctatctctttctatgatgtggctttgcttctttctttgttgtccttgtccccttcctaacgagcacacgctatcgttctaccttaagccacatcaaattactcatttatcctaccttcctcgagctattgtattattttcatgagggcacaactgtcatttataactggacatgtgaacttgtgaagtccagttttgagtctgtcttgagtctgtcttgagtcaaattttgctgtgactttattagaacatcactcacaataatcaataatgctttataggacttgtactgaataattattcttttcttttttttctcacaactgaataattattctaattttcgtttaatataaagttttagtaacataaaaaaacaagtcttagtaacatatattattttgtaaacagatttttacaactggaacaaagtcaggctaaggtattgcgacggagcttcatttgcgggagattcacaatttggcaacggggtaaataaacttgcttgttccccctctcaaaccaacttttttttttctttcttaaaccggtttcaataaccggaaaatataccgaacgatctggtttatggtttttttaagtactgattttgactgattcaatgaatgacagacgtcattgctttatttcagaggacaacgaatatggaatgccattattcttgaccttctccccaaaggtttagcaaaagcccacaaggtaaacttttcttcttttgttccggtttagtttcacaacccaaatcaatgttttccctcctaataacatcggttcagtataatattgtaatctttggatagtagatcctagtttaattttccttaccaatctgttgaaactaaacccgtcaattgaattgaaattaacccgtacgcaggctcttctaaccggttgttcagctggtggtttgtctacatttttgcattgtgacaatttcacgagctatttacccaaaaacgcaagcgttaagtgcatgagcgatgctggattctttcttgacgcgtaagttttctcttgaatcaaatgttttgatctttggtttcggtttaccaacatttactgttcatattggtttaacagaatcgatgtagcagcaaaccggacaatgagatctttttactcacagcttgtgtctctacaggtacatttctttagacccaacaattgtaatgatcaaatgttgccaacaaatttatgattttcttttcagggtatacaaaaaaacctcgatccaagttgcacacacgcatttttccccgaaccatctctggtacaatctaaaatctttagatacatttttaattatttcttaacaaattgattataaatctctaaaaattttgaaattattttgcagtgttttttcccgcaatacgtattgcgatttatcaaaacgccatttttcatcttaaattcagcctacgatgtatttcaggtttgctttcgttaactataccggtttaatttcatttaaaccgacggtttggtatttctaacgctttgctttattttacaatatcagttccatcatggactggttccaccttctgctgatcaaaccggacgttggaaccgttgtaagcttaatgtgacggcatgtaatccacaccaactcgatgcactacaaggttcaaaaccaaaaaatgatttagttcaaatgggaaaaccggtaaaaaccatctataaactgaaccgaaactccggttttgtttttgcagggtttaggaaagatatgttgggagctttaatgaatttcttcagaaattctacgagaggaggaatgtttataaactcatgctttgatcattgtcaaagtgctttagaggagacttggctctctcccacatcaccaagaatcaacaataaggtataaataaaccggaatttcattctcagtcgttttcaattatccggtttaaaattgttcttaaaccggatccggttttggatttcagacaattgctgagacggtcggagattggtattttgggagaggagaagaagcgaaagaaattggttgtccatatccatgtgataaaacatgtcataatctcattccagcttctacttcagattttttggtaaatctagatatttaacatcttcttcaattacagtttgctatagttaattacattattttttccgcataattcactgtaaagattcgattaattccagttaaagttgtgtagttatatgtttttcttttgttattcaaggcttctaatgcttcaggttcaggccataactctcgcggtacacacttgacttttctttttcttcttcttaactttttcttcttctttgtaattagtaaatttagtaaaaaagattatgttacgtagcatcaagcaagaacaaagaatccaactctcatttttttggttatgtttatataatcaggtaccttgactcgaagccaagttgatctaaatgatcttatgtagtgattttagaatttgagattagctaaaattgctacattggtaaaagcatgtccaaatgtgacaaataatataagaactacaataattcacatgatgatcatagtattacaatatttttgttttgacaatccatacttattgtaatcaaaacagtacgatggaggtaattcactagaagtagatacaatccattcggaatttccataaacttattaaaccgaaagataagataatatgaaacgaacaaacgatccgcggactgatggaaactgaagtatcactgattttaggaaaacggccataagacttgaggggatcttcgattagtttcccaagtaaattacttaaactacaaaaataccaaatacaaatactagagagttataaggatccaccacaaaaatatattgatggatgtggaatttggtacagatgatggatttggggaaaggccaagacgagtgtgactgggtgttgaggcacattcggtattttcacctttagattgcctttcttgatattttcaataaataacaattttcatcttttatgatttttgtacttttcgcagtaatccaaatttggtatatatcatatgacgctcaagaaacaatagtgtataggaaatttagattgtctcaatacttcaaagcaaaatattgaatcttgaaacttgtttgtcatcatccaaaacataataatctttcatctggaaagtcataatagtgtcctaactccaatgttaagatgcttcttcttaacaattacaaatgttgtatatgatacacaaatacatattagaattcaataaagtgactttcaatggtctttgatcttctccatcagcaaaaatggcttgtatgtcaaggaaaacaaatgggcattatcggttcctctgaaaatgaacaaacgtacgtacgtagactaccccggcaatgatttttgaggggacctacgattcatttcctaactacataacttaaacttcaaaaataccaaaactgtattagagagttttaaggatctgccacaagaaatatttgtgtttactaaacatagcagcaacaaaacacaaaacaaactcataagatctcctcaaatatgagagggaatccaaataggaattataagaatttctgccagcaaaaacgccataatggtgtaattaatacaatacggtatagcaaacagatggaatcaccaacgtttagggaaaaaaaaactaacgaacaatatctcaaatccaatctcacccgaaaagacttataaacatatattttcctaagccttagacataaatgcaccatcacacatagccaaatgtcaacacaagaaaaccaaaaccagaagagaaaatgaataagaagacactaaactcacacaaaagagaaaaaaaaaaaaggaattaagagaaacagagaagctgttgttattgctcctcctgcacttccacttcgtcttcttcatactcatacccttcttcctcatcagccgttgcgtcttggtactgttgatactctgataccaaatcattcatgttgctctctgcctctgtgaactccatctcgtccattccttcacctgtgtaccaatgcaagaaagcttttcttctgaacatcgctgtgaactgttcgctcacacgcctaaacatctcctggatcgatgtcgagttcccgatgaaagtcgaagccattttcagacctgttggtggaatgtcacacacggttgatttcacgttgtttgggatccattccacaaagtatgacgagttcttgttctgaacgttgatcatctgttcgtcaacttctttcgtgctcattttgcctctgaacatggctgaggctgtcaagtacctgccgtggcgtggatcagctgcacacatcatattcttggcatcccacatctgttgagtgagctcagggacggttaaggctctgtattgctgtgatccacgagatgtgagtggtgcaaacccaaccatgaagaagtggagacgagggaatgggattaaattcactgcaagcttgcgcaggtcagagtttagctgacccgggaaacgaaggcagcaagtgacaccactcatggttgcagagatgaggtgattcaagtctccaactgaacaaaacccaaacaaagaatcccattagcatatagcttgatcatacaaatacactaaattactaaatcaactagaggatcttacagcttggagtggtgagcttaagagttctgaagcaaatgtcatagagagcttcattgtcaagaaccatacactcatctgcattctccacaagctgatgaacagagagagttgcattataaggctcaacaacagtgtctgacactttcggtgatgggaatacagaaaacgtcagcatcatcctatctggatactcttccctaatctttgaaatcaacaacgttcccattccagatccagttcctcctcctaatgagtgacacacttggaatcctgaagaatcattcacatcaacaacacacacacaaatctaaatcaacatcaatcctaaatatgaccaaatcgatagctagattgctaagtttctacacaactacgagatcgaagagagcgatttctaaccttgcaagcagtcacaattctcagcttccttacgaacaacatcgagaacggaatcgataagctcagcaccttcagtgtagtgtcctttagcccaattgttaccggcaccggattgaccaaatacgaagttatcaggacggaagatctgaccgtacggaccggatctgacactatccatagtaccaggctctagatccatgaggacggcgcgtgggacgaatcttccgcaactcgcttcgttgtagtagacattgactcgttcgagttgcaaatcgttctctccttggtatcttcccgtcgaatcgatcccgtgctcggcgcaaactacttcccagaacttagctccgatctggtttccgcattggccaccttgtatgtgaagaatctctcgcatctttgattagtaagctagagtatgaaactacaaaaattgagaaagaaagagaaagagagagagaatttgaaacggttatgacttgtgaagaaatgaagaagacgaagtggttggttttatactaaatagataacggagacgggatttttcatttgggttgttttgccggttctaactgtactggtttacgtgaaccgtaccatacttaaccagaaaaatcaactattgaattttcagttattcacaatacatttttttattgttaaattcgaatgcattttatttcttatgatttaattggttgtattttagtgaaaatactacttttatgagtgtttctctgtttttaggaatataaattaatttttgttataaccaattgaaccaaaccgataaactcaaaccggtaacgttggtattcttctttattgccgccacaaatgacggaggtaagtaacggctgttaggtccgttggcccacgacataaattaatatcctgaaatttactattaataaaacatttgaaataaaaattaataattttttccactttgcaaatgattatgatttttttttttttcaaagcaagacattctgtatattttttgtcagtatgtggagaaaaagtttaattctactgcaaaaagacccactgggaaaatagaacaaaacagtgtatttcttgaactttattaaatcccataattataatttcatgaaggaaaaatgttttcacttataaatatagatattgcacaatttgatccataaacaataaatgttttttttggtaggctgcattaactgctataaagtataaacatctgcattatctgatctgaaataataaggaaaaaaacagtgagggtgttgtacagatagatccagagtgtggatcaggtattcattctcacgtgatgcatgtgaatactgaaaccttgaagataaaaaggctgcgagatctgaacaaattccttcttcttttatttgttctcccgcttttttcttattcttgcacatgaagcgaaccttgacagacacgtgattgataccaacggaaaagcacgtgactggattactgtgatgtattttatatacggtaaaaccaccaagaataatacactatatttatatacggtaaaattgtaatacgtcatacgatttgatttataaagttttagatttattagggaattagggacgatatcaaacagaagaattcaggattaaagaatttagatttgaattgtacttcttcatatcgtaaaattaagacaaattacaaagattgatttgttccactacttcttggtgatttgagattagattccaatatgtcgaagcaatcattaatatgaaatagtaaaaagcaaataagtaataacaaaagatgcacatgtgcaagtagattttcgtatatacatagtttagttgttcagtgtgcattcgactttaagatttatcttaatttacttgtttgttttgacggcaatctagtttcgtgtggatgtattcgagagcttgaactaaaaaaaaacataatttagtttttttttttacggcagtctagttttgtgtggatgtgtttgatagcttacgctttatatataagtttataaatcatccaatactattgtagtgcgatgggtgggtctaatctgaacagtaacgtgcaaatcactcaatgatcaactagaaatagtataaaacaggtgaaatttgaccctacgtgacgtgaaaattagagagaaagacagcaaaaacagcttttaaatgattatggcctatatcagaagcaatgtatcaatctaaaagaaacatatcagtctcaaagttagagcaacttgtggtgtcagtgagtagtagtggccatcaagttacaccatcagtttcataaccaacttaatcttatactaactactactcttcttgagcttaatattttcttaaggtgatcgttatcgtttaccaaatttaaactctctttttaggctggtgtttagatacttagaatatggcatggaaacctaagaaacgacatcagctcgtaaataatatttcatctttctaaagctattacatgaaatttggtcattttgagtttcgtgtgaaataacctaaacttgaaacataaatctagtaatctacaacattggttatacgtatatatattttcttttttctctacacaaaccaaaaccgaaatgaagatgaaaaattcaagagccggtttgattctgcttactccagtacttcatttcccactgtaggattctcatattagtactctgtttcctcttcacaacctcgtaatacgtagccggatcataaggaggaggcatggcacacggaccagaatccgcaggttgcttcacgagtgattctgtcatgaacttccgctcattcccactcctcagacatgccattgtttccgagcaaatctccacggcattccgcggaatctcgggtttaaactggaggagtttcgagtattcggttaaaagatggtacatgtagtcatacacatagtccatcttgaggtcttgttggataaaatcgctggccgcctttccaatatcctgtgcctgcgtcaaaaaaagttatgtttcatcatagattaacaatgtacctattgaagaccaagaccatctcaaccaaagctctaatgctgtgaatctcaagatagaataacaatgtaccttttgaatgtgagagttaccccaatcaacggcgaatttgatggagcggcacttatcgtgctctctaacgggccaataatggtgagctggaagcaaacctctagtaaagaaatcatagtaatgaggtttcactagcagagtcacagagtcacacgccaaaatgtacttctcgctaacggaccatgcagacccttctatatatatcttgtatctgctcattaacattgcataaacccataccactattagtctttcatatttaactttgcataacccaaatatttgactacgaattaaaggtctagaaaaaatctacattacctgtgatggcattggcttgccaagtctgattgcttgtaaccttcctttgattctttgatccaatcctacaagatacactaaaaagctaaacactgctgttttcttcaatgattttggcatagctcaaaaacgttaattgttcattattacctgagcatacaaacgagcgttccactcgtgttcctcagagacattacatttcataagatcttgtcgtgtctctgcgaccattggattacctttccaataagcatacggctctctgttaatccatttagtcctctcattcccttctcttagttccttcaacaaactctcccatggctttatattcacctccgccctacaacaaattcaacacaaatgttgggtttaactgatcaattcaaaactattggtgtgtaattgagaaaacttttaaaaattacgggtgttttgtttattaccatccccagaaggaccaatcaggaaacacgatatcaagcgtctcctcattcccacagtaacgaaacagcggcggaggcgacggcgcgttagctccggcgaattccgtagctctaacgaccggccagtcaacgcagtcaaacataagctcgagatctggaatcttcccagggtacttccgtaaaagctgtaagaaaccccagattgtgaacacgtctcttgtctgaaatgcatcttgaaatttctcgacgtaaattttcccgccgacgatcgctagccggaaagtcgccgtctttttagctcgctccaatgcttccctcgtgattcccgtcctcgaccatggacggagatcctcgtgaatccaacggaagtaatcaggacacgtggcggtcggaggatggtttgtatcatcatcttcgaagctcgttgtcgtcgggtatttgttactcggacatgacgcggtggtttcgttggcggagcagtgtagtgtgaactccggtttagggctttgagtaattaccgtggttggtcgagggtattttggggttatcgtctgagtttgggttttagtcgtcgtcgtcgtcgcggcttttttctctagcagaacctaaaccgtgaaaacgatatgactagttagcatatttgtgcaaaaaacccgactcaaaccgtaattcacttgaactgaaccgattcaaaccgaatatatatcaatctgaactaatattttatggattcaaaaatttctatatatttttacccatacgtacctaaatctaaactaaagttgctgcaaaagaaaaatatataaattaaaccaaacttgtatgaatccaatcgaaccgaaatatttaaacagaaccgagttctttaatttggactttttttgtccttctaaaaccccaaaaacctttaaacccgaaattctactcatggtcatgggagacagctaatgcctaattgaactggaaaagtcataatgagtcccacaacaaacacgtgtcgtgttctacgggattggccgacaacaccaaccaccaaagacacttccgatcaatagtactaatagaaaattcttctctcacgtgacaaaaggcacaaaattcaaacccataaagaaactaaacaccgaaaaattagtttcagctaaacgacaagtggactgtgtcgttttgagggacttacggtggtgtcgaggaggaggcgcgtggagataaaagcgccgactatgaggaggatgaggagggagactagggcgtaggatctgttgggagatattcccaaacctgacttgacaaagggagaccagattgtgtctgtataagtacgagaatgccctcccgccgacccgttcttggacggcgagtttctcatcggaatcttcctgatggagaagccagaaagaaaaagaaaaaaagagattcgaaagagtttaggagaaagaggacaaaaaaagaaagagaaagaataagaaaaagagggaagagagagacagagaatcttgtgagttaaggcatatttgctttaaggcctcatctttttggtaatgcttgagggttttaatttcaaatagtcacaaaagagaaacaaaaccttggctaaacgaaaatttagaaaccaaaaaaacttcttgcaataccaatataccttcaacattgatacttttaataaaggctttcgaatgacatgcgggagaaaaaaaagagttacacgcctattcaaggccttagcccaaagtagggaactagccaactagcccatattacacaccaaaggtgaaatataggggttcttgtccatagcatttgtcaatccaaaactttcagtttaggtatttcttcccagtcccttagttttaagcattttttgtttcagtaaaatgacgatcttacccttctttcactctcctaaatcctaaattctaaacactaaactctaaaccctaaattgtaaaccaacacgattttttggtaaaaaaaataataattaaataacttgaattttgctctccaaatttttaaggataaattcgtctattcacatgaccaagaaatatttaaatttgtagtccagacagaaatactttattccacaatactcttctaaaaaatgccaatctcgtaaataactcgtcaaatataaggattttatttatttattattcgtttttgatattggagtttttcttattttggtccgacttcaactttaatttttaatttttaagcaagtatatatttggtttgcaacaaaacagggctccagtttgatttttaactttttagatttgtaatttagatatttttagaagatcaaaaccttacttgtactggatcgaaataggcatataacacaaagtaaatttccataatagataagcttgcattcaataagggtaaagcaaagacgtgttggttttagagttatcgatcctacaatctataaagcttaattacttgaaagtctcctcatactgtatttctctgttccactatgctcttattatgcatctctgctactcgtaaaacattcctctgtacagaaaactttatttttgattaatatcaacaagtaaatcaaagaaaagacatggtggttcatatcaaccaagccaaggttttaatttatttgtcggagaacatataaaaagggacaaaaggaaatgcaagttgagactcatataatcaaagacttggaaacatcttttcatctgtcaacttgactacatagagaccaatgcaggaggaggaaaagctgggtgaggtactttgaagtcgacacacatttttattattggattcttctcctctgaggtcttttcgcgcaaagataccgaatacttgatttcctgccaagttaacaaaaaagacgtacatggaaatgtgaattaaagtcagatccggtttggttctttatatttattataaaagcatgttacctcatcaaaaccaacataaagaacgtcggaaagagtcaactcaaagtcggtgccagcttcaatcacatattcagggttacatgcactcacatcacataggtcgtaagtttttaaaaggcctgtaaaatccccagatctataggtaacatacacaagggttcctgcggatatgtctttgcctatatatataagaaagattttatcaagaaaatattagaaactatataaagaaaaaaagagacttgaaactttgggaagatcatcaaaactgttacttacttgcagaaccgaataaatgtatagtgatggttgggttttcctgaggcccatcagagggagagacccagatctgagagatgctaccgtaatcgtgtccattttctgcagcagccgtagcgattgatcgtgaaagttagaacttatgatgagttccactaggtacaaaacccttggatatagagttcatatgtcaaactaagaaatcaaggcctatatgaatgattgaattgatttataggtgttttctataattaaacacacgaaaataatatacaacactgaagacttaacaattaacaaaccgatacttactagtgcaatattcaaaatcgatggcgctgcacaaagccggtaagaagaagagagatgcaaggaagaaaagcacaggctggatatgagacatcgccatggttcttcaaagcttcttggattttttgttttgattgtttgactaaaaagttaggtacatgttattcttctatatatgcaagcctgctattttataatcttcagaataagtagatgggatcgttagtgcaggatgctatagcctgtatacattatatccattattttaatctcccacattatcagcgagaatcttaagatattagtacatgatcaatgtcaattctttatcccacattataagagcgagaatcttaaaatattagtatgaatgtatgatcaattgtcaattctttatcccacattataagcgagaatcttaaatattagtatgatcataattgattatttattatatcttaactaccaagttttctcattcacaatcacgtccgtctcgaagataattattgtaaacacattttttttcttttttttataatttaaaatctgcagatttgaaaagaacgtaaagttaacatttaacggctagcaaagtcagcctatatatctcaaggagatgtcttgactcttgatgttgtatcttagcaagaaaaagtattagcgtaaggttgcttaaccagttgtctaatgtttagcacaccaccggttctttataccttgcagagtttatgattagtttcggaagctaagaaatatgatttcatcaccaaaaatgaaaaataaaaattgatcaagtgaaaaaccatggagaatgatagcattcatttagttttagcttagtcaccaagattggggaattgcaaagtgtaagttgtgaatttatagagctatcatataattagtaaaatcatccaactggttaccaaaacaaatcgcataatcatccaactttgttgtaattatttgaaagtctcctcatatttccgttctattctgcgttttattatgcgtatccgctactcgtaaaacatttcctctgtaaaaaactttatttttgatcaatatcaaccagaaaattcaaggaaaggcatgttggttcatattaatcaggccaaaattacaacaaagcaatatctatagcgatatcggttcaaggatttgatttatttgttggacaacacataaaaaaggaaaaatgcaagcgagaaagagtcatataatgaaagagttggaaacatcttttcatcagccaacgtgactaaatagagacaaatgcagaagctgaggcaggtactttgaagtcgatacacatttttattattggatcctcctcctctgcggttttttgacgcaaagatacggaatacttgattccctgccaagttaaaaagaagaattaatgagaaacaaagaacatcatgaacccaaaagcattacttgagaaaacattggtcctaggacttcttaaggaaacttcaaattcatatacaaagagtattaaaaatagttacctcatcaaaaccaacataaagaacgtctttaagactgaagtcaaacacgtcgccagcttcaatctcagaatcaatgttacatgccaaactcacatcacataggtcgtaagtttttaaaaggcctgtaaaatccccagatctataggctacatatacaagggttcccgcggatatttctttcgctgtatatacacacgaagaattttatcaaaaaatatattagaaactatataaagaaaataaaaagagagttgaaatttggaaaaatcatcaaaagattcaaaactattacttactcgcagtaccaaatacatttatagtgagggttgggttttcctgaggcccaacccgaaagacctcgatccaagagacgacaccataatcatgtccattttctgcaggtaaaaaacacttagatctatacatctttctaagaaagaaaaaaatccacttatttatttgaattcatatgtcaaactaattggttttataggggttttctataattaaacacacgaaaaaaaatatagaacattgaagacttaacaaatcgatacttactggtgcaatattcaaaatcgttggcgctgcacaaagccagtaagaagaagagtgatgcgaggaagaaaagcacaggctggacatgagacatcgccatggttcttcaaagcttcttggatattttttttttttgtttgactaacaagtttggtacatcatgttatgcttttatgcaagcctgctattttataatctacataataagtagatgggatcgtaagtgcaaaaattatatccatatattttaatctcccacataataagcgagaatcttaaaatattagtatgatcatcatcaattttttattaccttacctaccaatttttctcattcacaatcacgtggattttatctgggagagaccgatccgtctagaagaactgtattattataaaatctgcagatttgaaaagaacgtaaagttaacattttaacggctagcaaagtcggcctatatatctcaaggaaatgtcttgactcttgatgttgtatcttagcaagaaaaagtgttagcgtaagggtgcataaccagttatctaatgtttagcacaccttcaatttcactgtatttgtggaccggttctttataccttgcagtgtatactttatgatagtttcggaagcaacaaaatgagatatttctctgttctcaccaaaaatgaaaaaaaaaacggctaagtgaaataaccatgcagaatgatagcattcattttgttttagtcacctagattaattgttaatttgtagagctttatgattggtaaaatcatataaaataggataatcatccaactttgttgtaattatttgaaagtctcctcatatttctctgttctctctgcttttattatgctcatgggctactagtaaaacatttcctatgtaaaaaactttatttttgattaatatcaaccagtaaatcgaagaaaagacatgctcgattgcttgttcatatcgctatcgatatcggtccaagattttaatttatttgttggacaacacaaaaagggaaaaggaaaagcaaagttgcgagagagactcatataatcaaaagagacttggaaacatcttttcatcagccaacttgactaaatagagacaaatgcaggagctggggcaggtactttgaagtcgacacacatttttattattggatcctcctcctctaaggtctttcggcgcaaagataccgagtacttgatttcctgccaagtaatgtgaatcaagtcagaccggtttgattatttatatttaatttcactaatagtataatatacataaaatgtttttatatttatcactaagatatacaacacatgataaaatggaaaagaagtagagttaatgagaaatatataacatcatgaaaccaaaaacattacttttgaagttaactttgtaagcatggaattgtagttaaactcaaaataacaatatcaaagtgaaatcttaaatatcaacagaattattatagtataccctaaataacttataagaaatataaaataaaattaaacgtgttgagaaaaaggaagtataaaaaatttctaatagaagatgtgatgttaaagcataaagccaagtcttgaaaaaataaaaataaaaatgaaaatgaaaaataaataaaccaatgtgaaccggttgtactagttttaggggttttgccggtcaattacggttatttaattagtccaaccttgggtttgaaacattggtcctaggattaaggaaaattcacattcattcatgctttttattttcctatgctaagagtagaaatgtagttacctcatcataaccaacataaagaacgtcggaaagagttaactcaaagttggtgccagcttcaatctcagcttcattgttacatgcactcacatcacaaaggttgtaagtttttaaaaggccggtaaattccccatctctaaaggctacgtacacaagggttcccgcggggatgtttttgcctatatatataaaggattttatcaagaaaatattcaaaactagagaaaaaaagagagagttgaaactagatcataaaattaattgttacttacttgcagaaccgaataaatttatagtgatggttgggttttcgtgaggcccaacagatggagagaccacaatgctagtgacggttccgtaatcgtttccattttctgcaacagtcgcatatattaattgtggaagctataacttacgagtccccggtaggttaaaaaaaattggaatccaattcaaatgtcaaagagttcaaatattggtttactaaaagaaacaaaaaacagagccatgagcaagccagaatctatgaaatcaaggtctatctgaatttataattcatttataaactaataaacacacaaaaatcatatagaaaagtaactgaagacttaacaaatagatacttactggcgcagtattcgaaatctatggcgccacgcaaagccggtaagaagaagagtgatacgaggaggagtagcataggctggacatgagacatcgccatggatcttcaaagctctttaaaaagattttttttcttcttcaagtttgactaaacaagtttgtaatacatgttatgtttctatgcaagtctgctattttataatctacagaataagtagataggatcataactagcatatgatgctctggaccagggcctgcataaattatatatatccatatatattaaaccccacgtttttgtacacgagaaggttataatattagtgtttaatgtcaattatttactaccttacctaccgcctttgttcattcacaatcacgtggattcatttcggagagaccgatccgtctcgaagaactatattatttataaacacattaaatttgattttaaacttttttttttttgacaaaaccacatgttctataacgacaacacgaattgactaccttaccgaaaaaaaataattttggggccttgattgaatcttttccaataattttggggccttgattgtttatggtagttttaaaatataaaacatggtaggaaattcgtctttagagttaattcattaaaaatcaaaatttcatactaaatacgaattacatttacataagttgtaacggatctcacatttatttatcaattaactagagtaggatcgctacatcacatcggcattggctaatcatccgaatttagctccaacaagtccataaatagatccaacaagagacaagagacagacgagcaagcacacaaagctgaaacctctaagaagaagccatggtcgcgtccaacttcggattttcttctgcaatatacacatctccacaggaaaatacactgccagaggccaaaatgcaagtgcccccaccactcctaatacttcattgaagtagggaaacatcactgccactcccgttgtgatcaacacgtacatcgttctcaaacacatcctcattgggttcaatctcaccgtctctcctcgcaacaatggcagtttgaatccgtagaatctggcgataaacttattttccggatatttcttggttagcgatctctccgcagccgcgaaaattggttgactgtatacctaaaatgtcattctatattttagaaatgtatggaagattttagatctcgattgtttgtttgctttagaacatgttacataacaacttaaaacctcttttggtattttacacaatttattttgtgaatcataaacgcaaacgttaaaatgacacatagtaaccaaaaatattttgtctaaaatactagaatggtagtttgttttctaaaatgtgaacgaaaacataaaaatcaacgagcatgttggttagatgggcaaggggtttctgagatacctgatatccaccaactaaatgaagaacaatgcaagcgttggcgaaatcgacgagccagaatggctcatagaagccgaaaccggtcaagagatttcccggggtggaatctccaaaggccgcgtacccaaaacatccacaacagaagaagaagaatgtttggatgaataccgcaaccgtcgaggctttcttcatcgtttgcttctctgccggtggtgatctcaatgtgtcctgtccttaattttcatttaacacacgtaaaaaaaaggtttcttgatctctaagagtagtgctatttaatgtgttaattaatcttacttggcgtcattatgcatgaaggtaaaattatttacctgaatctcaagaagtatgattgagaaaggatatgaaaaggcaatgttcccaagagcttggaacactatccataccttttcacctctgttttctgctggtattccccttatacttccctcaatttttcgattctcttcatttcaaaaacaaagttatttgattgtcttcccccatctcaaaataattttatactcaaaatcaaaattgacaaagaaaaagtaatatctatacctatgattttgccaagggcgaggccgatgccaatgaacgagtaagtaaaagacataatagcggcgacaagagagagccataccatgttgtggaaattaggtatttgtgacataaatatctgagtcaaaccaaacaaaaccatgaagtagttgttgttgtctccatatgaacatgttgcattgtgtccatttctatgataacaattcgatttcataattgctctgtaatgaaatgaaaaacaaaaaactctacgtatcaatattggaaaataaaaaattcctaggaaatagaacaacagttgaaatatgtttacatatgttattacctactgcatgtagctataacaatggtataagcaatgccacaaccaaaaagggaaatgtatacaacgactccacatacaatttcattcttcttccctgcaaatcaaaattacccatatgaataaatttaaattacaactaaaataaaaatttagttttccggaccaaattagtttgttatttcttattgcatgtatttaaactcgtgattttgaaaacttttccattaggtggcaagatagtacgctagttgaacttatcggaaatattagttttgaagttgacctaaatacaatttaacggcttgagagtaagaattgagtcggaggggaccgttgttaggatcagggaaacggtagcaatcggaaagaagaaaagcagagagaagtgtgaccccggcgaaggctataagggcggccggaccagcgatccagccgagctccgccgtggcccaagccaacgacaacactccagctcctatcactcctgttattatatgtgccaccgccgtccataacgttcctttacaagaaaacacaacgtaataattatttgattgattactaatgattatggattatatgattactaacagatttacctgttcttgcagtaactgaatcatgaagttgaagctcggttggtgttataactcgagactcgtcatcttctttaatgtccattttttgtgtggacgaagatgaagttatttggtaatgtgtatgtttgtttctatttatgcgggtacacgatgtgaattcattttatcttaccgaggaatgaaaccttgtctaagtgaattggaagacagatggttgactactactattattgtaaatttacgtgtaccaatttataaaactcgtgttcatatgaataatataagatattttagtcgatggtcacatctaccttaagtcatttgattggaatggttgatggtccatttttttattgcttagaatacgaaaagaataatgtgcttatctcattacttttaattttgtccatcacctttaactttatatttttaaaccaaaaagaaaaacttttgtaatgacatattttaaaaggaaaattttcttttattagtaatgtgtaattggaaatcccatctcagcataatgtatacattaagcatttttctggcaacaaagaaaattaagaagaaaaaaaaattaaggaaaataagtactactcaattcaatttcatcccacgaaatatgaaattgtatgattttatatgtgctcgtctatgtacgcttattgatcaactttaacaggatttgacaaggccacgtctagtatacattaattcaaacttttagattttttcttttacccaacttttaaaaagttaatacatatgaatatagatacatttttctgcaaagtaaacaagagaagtatgcagtttcgctcgttgtcgatcaccatacattaattcaaacgtacgttcaaatatgaatatagatgcatttatccatcaccaacgttcacattcctaatacatggccatatgacctgagagaaaatttaaactaagtactcaagaaagaaagctctaaaacaatagaaccgaatattataattcaaaagacttgttttgttaagagcactcccagtggtgattcttaaacgtttcttagctaaaaatccttaagaaatatgcaataaataaatcaataatgtgatataaactaagaaatgcaccttaattagcttagagttttttgtgaggttaaggtgcgctgacgtgtcaaattctcattggtaattttttttttgttatgatgtatgtttacaatcaagtttaaatctaatcgttattcaagtttttgcgttgtatttttttttctttttcgtttctgttataatgtatgtttacaaatttcatatttattttaattataaagtttaatcaaatacataatttcaaaaaaaaaactttaatttttaagaaactcacttaaaatttttaccattggacaataataatactaaggacttatcaataattcttaactttcaaattatcaaaatttaatattaaaaatgttaacgactccaattaagagtctaaccaatgggcatgctcttactacctatatgaacatattcgagagacaaattacagagaagaagtgggacaaaacattttttgggaattttctcatgcgcacacatatatatctattaatctatatgagcatgttcagattttggcccctagatgacatgccaaaagaaagaatcaaccctagccaccgaatagaagaaacctaaatcacaaatatcaatgttataataggagacatatatctattaatctatatgaacatgttcagatttcggcctgagatttttttttggtttaatacatgaaaattgcttctataaacaaacatggacggatccaatactttatttaggttagagcatatgaatatacaaaatatatgggctagacgcatttaaatgaactaacactaattctttaaagggaaaacaatagttgggaagactagaccacataggtcttgctttacgtttgcctctacgaaagggcgataattgtttttttaagagcgataaatgtttgctcaagaagacgacaagtagtggtgatacaaaagcaagagtaacattatcgtctgaaaataatggcaaacataaatgctgttttgcttttttcgatttgttttatatgtttctatatttttgatagaataatttggttatcaaattattattcaaaccatgaacaaaaccaaagaaaaaaaaaacagaaacaacaggaaaaagaatactattgattaattttcctgtaagacaaacaagataagtattctttgatcgttatcgatcacccaattcacatttcttatacatggccaacaatggtatctgaattgaacaactcctaacgccatttcctattggtgagagaaattttataagtgaggcatatacatgtcttatttacctatagacagttttcaaaaaattcaacacttgtgttgtttttcaaattcacaaaatgttgtggtgaagttctatataataggggtaaaattgacaataatataagtagtacacacaatattataatcttatgaaatagttactagttttttttggtagggtaaaatagttactagttagtaactgaattttattgtttatttttgtcaatttcctaaataaaattagggttgataagaaatttagaaattggttattttaaaaatccccaaactaaaaatgaaaaagaaaacaattcctcattttcctttcccactaagcatgcctgtcttcttccataagtacttgtgattacttactaggataaaattaagaaaagctagttatatggattcattctctcaaattagggataaatacttgaattcattctctcaaattaaaaccaaggtacacagataagatatatggattcaaagattttaaagtttagtacaaaacaatgaagggcattctcaatgccacaaaaaaaagtagtaggtcaacattagatccatgcatgagagtttagagacaaaaactagttagcattttggtgaaagcgattttatggttcatcgaaggttcatcctctagagatgagaggatagtcatggtcaaaagatatggtgaagttgaaaacgaaaacttctacacaaaatagcacaacattaacgatggtaacattaacgatggtcggaagtcgatgacagtaacttgacaaagattattttcatatatgagaaaagggaaaaacataattttagggttattatctatctcttagatttacgagttttcgtgaaactaaaataaacaaggtttcctctttcaattttaggtttctacaaaaaaaaagtttgatttttgactataaataagttatgatatttatttgtttacagtgagtaatcaagaatgactaggcaggttccaaatgaaaactgtcaatagttgaagtgagttttgtttatgagaaaattgatcgtgtttgagaaaatatggattcgatccacaaaagattagagttgatattcttcccgaaatttgacgtgtaaaaaagataaatttaagttgtgaaagttttgaaagttttaacttttttttttggcgttatactttaccaatatcaagactgaatttcattgtttaggaaaatatacaacttctaatgcataaaaagttagttttatgtaaatacaaatatttattatatttttttaatgtctaaacctaaataggtaagataaagaaaaataaaattatttggttataattttagaaaacccccactattcccacttcccacagttaaagcatcccgccgtcttcaatttgtttaagggtttctaactttcgacgaaaaaggttggatcttttttgtttaaagaagttaatttttttttttactgtgagtaatcaatcacagcatggggaggcaggttccgagtgaaagtttatctctgagcgaaggttgtgaagtcgaaatctcttacaaaaacaatggcaatgaaagcgtttggtacaaagccattctcgaagcaaaacccaattctatattcaaagaagaactctctgttcgtttgcttaaggatgacttctcgactcctcttaacgaactcagacacaaagtcttgattagacccattccgccaacaaatgtacaagcttgcatcgatatcgagataggcaccttcgtcgacgctgactacaaagatgcgtggtgggctggttttgttgtcaaagtgattgatgatgacaagttttgggtttgttttgattcaccacctgatatcattcagtttgatagaaaccatttgaggcctactcttgaatgggtcgatgagaagatttattcttggtggatcattggatcaacacgaaattcagaggtagttgtttctcaattttgtatctttcttgcttattattatggaaagttttgatttttcttatgttttggttactctgtttgtgaaagactttaactttactgttagttcttgaagcggttggctgaggagcctatgtttagtcctggaacaattgtggaattgtgctctaagagagatgaaggggaagtcgtttgggttcctgcattggtttataaagagtttaaagagaatgatgagtatagatatattgtcaaggataagcctttgatcggaaggagttataagtcaagacccagcaaaactgtggacttgcgtagtcttaggcctataccgcctcctattcgggttaaagagtatcgattggatgagtacattgaggtgtatcatgatggtataggatggcgtcaaggacgagttgtgaaaagtgaaggaggagtgatgggatctctctttcagaattggtgtacattgcttttagaggctacaaagaagcaattaatgttcaaacaatcggatcttaggcctttgagggtgtgggaagatggcgtttggaaggtacttcacgttttcttttcactactttcagttaacactaggtttttgtcaataaggagtaatactcgtgaattgtttgcaagaatcttcagcaaaaaacatgctccattgactgcatttctttgatgtgtaatgatggtttgcatttgaaagtctctgtattattattatcatcctgttgtggtttctgatctgtgttaaatgtttgcagacaagggaatcatcgttaactcaggggtcaggagataagacaggtgattctgtgatgaatgctaagttggtaacattctccaaatcccttttcagtttctgtatcatgaatgttgatctcataatgttttccagcaaatgaatctgatccacctgtaactccacatccgggcataactataacaccgttaaaacaaacagaggttgaaactcaaagaaagacattccccaagaagacacttccaaggaatcagaatggttcaggaaacgattcaacactagagaatgtaaagttacttcttcacttttaacattataattctcactttctctatagtttgttagctcatagctgatagcttattatcttattccttttgactgttatatatctattgaaatgatagtttacctttgtttgttcttaacttcaatgcaggaaaatagcaatcgaaagaggaaaagagaagaaaacctttgttctggttctagtgttgaggaaaccaacattctctttgagaagaagttaccagtttggaagatacttgaatcaatggaggtatttaagacaatcccacaaagtcctcatttccgccccttggcagagattagagaagattcccgtgaaatgttggcggttggtatgatgcttaccttttcatgtttacttgagcaagtcaaagctctgcaacacgacgaggccagaagctcatttataagcctcagtaattcctttgccgagttagagaaacacgggttcaatgcacaagtagctcagttgcggatcaataagttgttgactcttagaggtatgcaatcaaggaaaatggatgaactcaaaggcgccaagaaagtgactgcagagaaagagagcgtaaaggttgagaacgagcgcaagattctcgagctgcagaggctgaatgaggagatggccaaagagatagctcagagtatgtcatgtgaaggaaagattctccaacagcttgataatatgaagcttgagtttcaggcaactgcatcagctccatggtaaaaaaaattagtgaccactaatctaatctctattttgcacttagattatatgtagctgaaaggacttcgttggcccttttggatgatgaatagatgtttagttttaaatctgtaaaaaaagtttgctttttacattttctagggaagtgatcttgcgtttgattcgattttcatctctctttaggcctaaatgggctttccgttcaacataagcccaatttccgtatacgattggcctacctagctagaataatttacacacaaaaaaaaactacaaaaaatcgtaacgaaaacttcaataagagaagtagataacacatggcaatatccaaaatgcgcaaatatatatgatgaattatcctcataacgaataattcaatatggcagtcaatacatggtaatatatgccatatatatcaaacatttaatgcaccgattttaatccatgaattaatcccatttccatatttattaaaagtttggattcatttttctttatccttgcttatttaatccagatgtgcaaatatatatataaatgatttatcctcatttccatatttgttccaattttagattcataattttcttaattctctccgatttcaatctttgtaagaaattcactagctttaaaaacgttaccaaagaaagaaaatttccaacattctgtaattaaatctgcatcacatttaattccaccgctccctctcgctcccttatataataggacagtgtatcttctctctttatcagatcacaactaaaacaaaaaatcctatacctactaaagacactaatcttccttttatttgtttgagttagcccaaatgacgatgactgtcgagaagaggatcgaagctgacgttacggtgagccatgaaggtgtggaacgggcttacgtaactttcctcgccggaaacaaagactactggatgcttgtagttggtctagccaaaggtcttcgtaaagtgaaatcagcttatccactcgttgtggcgactctccctgacgtgcctgaggaacatcgtcaaatcttagtggatcagggatgcatcatccgtgacatcgaaccggtctatcctccggagaacacgaccggttattctatggcttattacgttatcaactactccaaacttcgtatttgggaggtaaatatcttacttaatataaactgagtgtataaatataatattaccgtattatattttgtcaatattattaccatataccttgagtgatacgtgggtttaagcatgataacgcctattgtcactaacattgcaaaaaccatatataaattatgcttcaaaaaaaaaaaaagtctatgtatatatattacaccatttattgtcacagatatttaacgagttattaacatataaatgcagtttgtggagtatgagaagatgatatatctagatggagacatacaagtgtttaagaacattgatcatcttttcgatactcctcgtggctacttgtacgcagtcaaagactgcttttgtgaggtgtcttggtccaaaactcctcaatacaagatcggttattgccaacagtcacctgaaaaggtaacttggcctgttgaaagtttaggtgctccaccgccggtatatttcaacgccggtatgttggtttttggaccaaatcttgtcacttacgaggatctccttcgtgttgttcaaatcaccactccaacttattttgccgagcaggtacgattttttacggattttctatcatttgatttgactttattatattttgttacggactctgataatattgtttatttttgttaggactttctgaatatatacttcagagacatttacaagccaatcccttcgacctacaacctcgtaatggctatgctttggcgtcatcccgaacacattgaccttgaccaaatcagtgttgttcactattgtgctaatgttcgttttttaaactttttttctacagatatgtaaatacatattcttattactaaaaccatttgtatctaaaatcaattttatagggttcgaagccttggaaattcgatgaagctgaagagcatatggatcgagaagacataaaaatgttggtgaagaagtggtgggagatttacgaagattcgagtttagactacaagaatttcgtcgagactgagtccaagctgaatccggtcactgcaaccttggcttccaagaaacttgttggcgatgtcctaacaagccttgccccttccgccgcataaccaatccttttatgtggaggctgtttgcaacttttattttcgttttgttattgttttagtgaaaggttaagctatatatataaaattttatcataatttatatatagcaacctcgtttaagttttatgtttgtgagattagatgtgagtggtcttgtgtttaagtattttgtcagtgtcgacctcgactaccctttatgtctatcttttataatcaataataagaatttggctttaactctgttctattcgttctttcttttttaataatcaacttaattacattctttgattcgaaaataaatttgatatatcaacaaatggtagttaatgaatgatgatcaatattaagggatataacaagaatttgacttctcgcaaagcacagccttccaccaaatcagagttttaaatttcactactatgtacccgcaatcataacaacagctttgcattatgatcacgcattctatcaatgaaattaatttgttaaaataaaaaataaaaaaaaattgacttcttttttttggttaaacggtaagaaatatatgcacatgtccaaatttaatcacaaaaaaccccaaacttaactttattttatattttcaccccaaattgtcttttatatatttaaacgtcttcttccattcgtagtaactgcgactgtgattaccgagaagcttgctcttacttatctcttgggtttctcatgaacaaaagtaaagtaagtttcttttttcaattttagttttttctacaaaaaagtttggattttttctttaaagaagttagggtttatccgtttttttctgtgagtaatcaatctagcatgtggaggcatgtttccagtgaatggcaatcactgagtgaaggttgtgaagttgaaatcttttataaaaacaatggcactgacggcgtttggtacaaagccattatcgagtcaaaaccgctaagtgaagaactctgtgttcggttgtttaaagatttctctttgactcctagcgaactaaaagacaatgacaaagatttctcttttgactcctcttagcgaacttaaagatttctcttttctattgttttggatactttgggtgtgaaagaataatgaaagactttaacttttttgttagttcttgtggcggttagctaaagcgcctatgtttagtcctggaacaacggtggaagtgagttctaagataaataacaaagaagtcgtttgggttcctgcagtggttattaaagagtttaaggaagatgatgagtataagtatattgtcagggtttatgataagtccttcagctgcaagggtaataaggctgcaagactcaacaaaaccgttgatttgtgtagtcttaggcctacaccgccttctatttcggttgaagagtatcaattaaaggaatacgtagaggtgtttcatgatggtatgggatggcgtcaaggacgagtgatgaaaattcaagaacgagtgatgttaagtcaaggacgagtgatggtaagtcaaggacgagtgatgggaaatctctctcagaaatgttatatagtgctgttagaggctacaaagaagcaaatatcattcaaacagtcagatcttaggcctttgcaggtgtgggaagatggtgtttggaaggtatttaacgttttctttgcactggtttcagtcaacactagattattgtcgataatgactaatttgtgtgaactgtttgcaagcattttgaaaatatgagactgccgtttcagctttagaacttcagcaaatgtttgctcctttgactgcatttcttagatgttgaatgatggtttgcactgggagtctttgtgttattatcttcctgttgtggtttttgatctctgttagatgttgcagacaagggaatcgtcgttaactcagggatcaggagatgagaccagtgattctgtgaggaatggtaagtttgtaacactctccaaaatctaacagattctcttaatccattttcaatttctgtatgacaattgatcttataatgtcactgttttccagcaaatgaatctgatccaccggtaactccacgtccgggcataactacaccaccgttgaaacaaatagaggctgaaactcaaagaaagacacttccgaggaatcagaatgcttcagtgaacgattcaacacgagagaatgtaaagttaattcttcactttaacgttattattcgcactttcttggtagtttgttaggtggtggctaatcatcttaatcctctttttttattgtttgaatgatagtgaacctttgaactttttatgcaggaaaatagtgaagatattaatcgaaaaaggaaaagagaagaaagcctttgttctgatgctagtgttgaggacacaacaatgactttgccatttgaaaagaagttgtcaatttggaagacacttgaatcagtggagacagtcccacaaagtcctcatttcagcccgttggttgagactagagaagattgccgtgaaatgtctgcggttgggatgatgctcacctttccttgtttacttgaggaagtcaaatctctgcaacacgacaattccataagctcattgataagcctcagtaataacttttgcgagctagagaaacacgggttcaatgtaaaggcacctcagtcacggatcagtaagctgttgtctcttagaggtaagcaatcaatgaaaatggatgaactcaaaggtgctgagaaagtgactgcagaaaaagagagcataaagattgagaacgaacgcaagattctagagctgcagaggctgaatgaggaggtagataaagagatagctcagagtaagtcatgtgcagcgaagattgtccaacaacttgaagatgtggaacttcagtttcaaacaactgcatcggctccatggtaaaaaaaagtttagtgacttctaatctaatctctattttgcacttagacataatatgtaattgaaaagacttcgttgccttctccccttttgatgatgaatggattgttattagtctggttttttttgtcccaagaggtttaaaacttgtgaccgttaggaaacactaaattttgtccaaaagcatatgttacacttataaatgtgtatacattaaccaataccaacaaatatcaacatccatttcattgttttggaatacaacaactttaaaagcttcaaatttctaaaacttagattggttattttccaaaaaaacaagaaaacccaaaactaaataaaaataggaaacaaattcgacattttagcttttcatcggtactagtgtgaattgactaattaggaagaaactaaagaagagaagcttgttctttctttatctctttggtttctgggtttctgaagaagaaacttctttcagtttttgtgtttctacaaaaaggttggatttttatttgtttactgtgagtaatcaagcatggtgaggcgtgctgggagtgaaagaccttccatggaggaaggttgtgaattcgaaatctataataaaaaggatccgagatcttatcatcttacgtttagaagtcgaaatatcttagaagacgtttggtacaaagccatcgtcgaggcaaaacctccaaagagtcccaaatctaaacgcagtgtactctgtgttcggttgcttaaggacgacttctcgagtactcttgaagacctacacctacaaagtcttgtgtcgacccgttccgccaaaacatttgttagatagcattcctatcaagataggctccatcgtcgaagctgattataaagatgcgtgggtcactggttttgtggtcaaagagattgatgttggcaagtgtttggtgtgctttgattcaatacctgatgttattctgtttgagagaaagcttttgaggcctcatcttcagtggctcgatgatagtggatatacattttgggatatggtatcgaaacattatcgaaaggtaattggattttgtctgaaatcagtaatgttatcgaaagttttgtgtttttttctaatgttttggatactttggtagtgaaagcataatgaaagactttaactttactgttagttcttgagacggttggctgaagagcctatgtttagtcctggaacaatggtggaagtgagttctaagataaatgaaggtgaagtcgtttgggttccttcaatggttattaaagagtttaaagaggatgatgagtataaatatattgtcaaggataagtcctttagctgcgagggaaaaaaggcaagacccaacaaaaccgttgatttgtctagtcttaggcctataccagtatcagttgacgagtatcagttggaggaaaacgtagaggtgtttcttgatggtatggggtggcgtcatggacgagtgatgggaagtcaagagcgagcgataggaacactctctcagaaatggtattttgtgcgtttggaatctacaaagaagcaattaacgttcaagcagtcggatcttaggcctttgaaggtgtgggaagatggcgtttggaaggtatttaacagtttattttcacttatttctgactgcatttcttagatgtgtaatgatggtttgcatttagagtccttgtattgttatctcactgttgtggtttttgattttggttaggtgttgcagacaagggaattgtcgtttactcagggatcaggagataagaccggtgattctgtgaggaatggtaagttggtaacactcttatgtatcatgaaaattgatcttataatgtcacttgtttctagcaaatgaatctgatccacctttaactccacctccgggcataattacaccaccgttgaaacaaatagaggctggaactcaaagaaaggcactctccaagaagacacttccaaggaatcagaatggctcgggaaacgattcaacgctagagaatgtaaagttaattcttcacttttaacattatcaagttatcattctcactttcttggtagtttgttagttggtggcttattcttaattctcttgactgttatttatctattgaatgattgttcaccatttgcgattttgaatttctatgcaggaaaatagcgaagataacaatcgaaagaggaaaagagaagaaaaccttggttgtgttgctagtgttgagcaagacaaaccaaaggatacaacaatggttttaccctttgagaagaagttacgaatttgggagacactagaatcaatggaggtgtttaaaacagtcccacagagtcctcatttcagcccattattggtggagagtagagaagactcccgtgaaatgtctgcggttggtatgatgcttaccttttttggtttacttgatgaagtcaaagctctgcaacacaacgatcccataagcttttttataagcctcactaattcttttgccgagttagagaaacacgggttcaatgtaaaagcacctcagtcacggatcaataagctgttgtctctcagagatagacaatcaaagaaaacagaggaactcaaagatgccgagaaagtgaccgcagagaaagagagcgtaaaagctgagaacaaacgcaagattcttgagctgcaaaggctaaatgaagagatggacaaagagatagctcaaagtaagtcatgtgcagcaaagattgtccaacagctcgatgatgtgaagcttgagtttctggcaacagcatcagctccatggtaaaaaagatggtttaatctatatggatgatgaatgatgtttagctttgacttagcttagttaacttgaaaaaacaagaaccaaccacttgtgtctgagtacttttaagtgaagagataaaaacaaaacaactttagaaaaagtaggcgaagtataagagtatagcagagctgtccattacattgaaacatacgtcacatgttctcatcctctaccaaaagccaccacaaacactaacttttgtcaattgtcaatcaatatattcaatacccttttttttgtttattcccactaaattataatttttgctttataaaaaaaaatatcaaactctatattttctcgatctcttctcttcctcttatttctccaagatcccagacgaaatggctcaggtttgtttttttctcatttgattttaaagtttgaatatgattgatctcttcctcctaaattggttttacttttatagaaagtggtgctgaaggttttaaccatgactgatgataagacgaagcagaaagccatagaagctgcagctgatatcttcggtgattatttcttcctactacttcttcttttctttaactactttttgattgaatttcaattcttgtttctgtttattattgtacttttcagatttttaggatttgaaaaaacaaaaagaaaggattaatcaagtttgctgctggtgttttcactcactaaattaccatttttagctaaagttatgtgaaacaatcggtatgaaatctagctcgattgtagtataattgcgtcagaatcttgagagcttggattatttgacctttttgacacatatagtcaacgaaatgatattctgaacattttgaaagcccgtattttatgggccggaaaaagcaggtttagtttgggcttagttaaggctgactcggtaaattcgaaaacgtattatggaatgtgttatagcaagtgttccatttgctttagatttaaaacgacgaatgtatgaccaaagatgatacaatgtagtagttcatatgctaagaggattttgttaagcaggagttgattccatagcagcggatatgaaggatcaaaaattgacggtgatcggtttgatggatgcggttgcggtggtgaagaagttgaagaaggttggtaaagtcgatttgatatcggttggaccggcaaaagaagagaagaaagaagagaagaaggaagagaagaaagaggaaaagaaagaggagaagaaggaagagcagaaagaagaagaacctaagaaataagtgactcgaattgctattaaaaccctaaatttttgtcatattgatttcacaattagaacgctgaatcattgaataatttaagatgtaaaattaattgttcaatacagattgtaataaaagcgaagtatttgaaacttttattcttgtgggaacacaaccaaactagtacaagtttactatattaagcacaaaacagcaaaacctattaagaacaacaactgcaataagtactataaagtataaacgcaaatctatatatactaaacgaaaaaacaaaaacgtgatgactattacataacgtactaccgtttgacatatgtaaaacagtaaaagagatgttccatattaaatgtgaaacttttaacaaattcatcgcaattgatgtatacataagttcgtattcacaatactcgaatctcgatcaagatttaattaaacattggattaatttcttactcataaatacatactgtgaatttctttgaagacatctccttctactgtttcgtgaaatgttaacaagattgattatatggagatgtaacttaaattataaatggatgaataatatcggagataataaaatgcaaagttatcagcatatcactcatggacggaaaaaatccaagttttaattagtaaccaaatcgtttaaatgatttttgaggaaaatggaacaacaatgacttctcaaccacaaataatagcaacaatgacattaacgattatttgtaaccttctttttttagcagtaattagtaactattagctacctttcagttatagaatatacattatattccggattgagcatatactaatatatttttgattactgtctatggattaattcactagactttgaaaatatacaaactttacggtttcgataagaaacaagattcgcgtaaagaaatgttacaagttataaaagagtttcttttaggttagggctatctctgtataattaagtaacgtaacgtaagtatcctatctttattttctcagtatttctctaaccctttttattaacctcatgtatatgtaatatgacgtcctttaacaacaacaaaatatgacgagctggtgattcatcattggtcgcctaaaaaagaaaataacaatttataaaattcataatttgaggttcccatttatccggtttattagatgctatttttgaaattctacacagaacacgacccggtttgatggcacttgtgctgagtagcgaaccggttctactccttagtcctaaatatggttccgtgtaagtgtttctaaactttaaacaacattcgaaggaacccactcctataagacttatggattttgcagttgaatccttgtacttaaaacattttaatttgaataccaaaacttataagaaattatgtagaacccttttaaatgatttcgtaacgatagctacatgttacatattaatttaagttgacaaaaaatatgacaattagtggttgaattgtaaatatatataacatgtagtttttttataaattatctaaagattaatggtcattgaatcattgatcgtgcatcaaagatactacaaaaagaagaaaatcaaatatataaagaaagaaggcgagtcattttatgacaacgagaaacagaacatcactaccaaacatctccagctcagtttcttcaaataaaaacagttaatctctctaaaacaattttttgttttctctctctcttaaataaccagagagttcagaatcattttgattctctttgtaatctttagttgttgtacctaacatcatggctgaagaggaaccgaagaaggtgacagagaccgtgtcggaaccaactccaacaccggaagttccggtggagaaacctgctgctgctgcagatgttgctcctcaggagaagcctgtggctccacctcccgttcttccatctccggcaccggcagaggagaagcaagaagactctaaggctattgttcccgtcgtccctagtaatttgcttactatcttgtttttcaacagaaagattattactaactcaagtttggttcaatgattattaaaaacttctgccaaaatatgtttctattaatcaactgattagcgtcgtcaaatatacctgattttcttaaagattattactgattacatttccgattaaaaacagaattttataccttttctttaatatagaaaaataaacaagtttcaaaattctgtaattatgtaagttttaaggttaaaaaagaagaactcaaagatttttgttcttctctaatgtgttgttattaatttttctttattaatacttaataaaaaatttattttgtggcagaagaagtagaggaagagaagaaagaaggatcagttaatcgaggtaattaacgtaatagattcatgactaatactaatattatctgaaagtaaaggatcatgggtgtaatataaataattagtatttttgtcataccggggaacaattaattaggtggtttgtgtgtcgtgttatcatgggatgtgtctaaaactgaaagatggtttaataatattcactaattttgggtgaaggttgttatatggacatgtgtgtttatcattgtctcttatttttcccacaaactctgattagtgattgtatttgcttaataattttgggagtgaagatgctgttctggctagagttgagacagagaagaggatgtcacttatcaaagcttgggaagaggctgagaaatgcaaagtggagaacaagtaacgtttttcatgttaacatttatccataaatgtctattaacccgatttagtaatattttgcaatgaaaccaagatattatcattaaggtcttgaagaatatattttgaaacagagctgagaagaagctttcttcaattggatcatgggagaacaacaagaaagcagctgtggaagctgagctcaagaaaatggaggtatgtttgaagttaatatttagttagagattttgaagcatttctgatttagctccgagctttttcaaaattgtggaatttttttttaacaacaggagcaattggagaagaagaaggcagagtatgtggagcagatgaagaacaaaatagctcaaattcacaaggaagcagaagagaagagagcgatgattgaagctaagcgtggagaagaaattctcaaagcagaggaattagcagccaagtaccgtgccactggaaccgctcccaaaaagcttttcggatgcatgtgatctctaatcatctcgatggggaaacaaatgaaatatggtatttgatgtaatgacgttctttagtttgcttaatgtgggtttaatatggcaacatagaaagttataaggtcaacatcttatattgattgggctgcgtttgttaatttgatttgtatttgtacatcttttcattgaaaggctttctcttagctttatgaattggtaagtacaataatacatatttgttctttatgtcgtaatttatgatcgcatcccccggcccctatcataaatgtagtagtacgtaagtggtccgatatgtaaaacgagaacaaggtcccataatttgaaatgtttgcatcataaaatgttatgctcaaccaaatcaatgtagcataagataaaatcaaatcaatgttttagctacgaacgagtcacaatagtatagcgaacaatttatccgtggatcaaagttggcccaaaagggcccaacatttcagtagccggttaataaaatgtaaatcacggcccataaaacaaaggcccaaacccaaataaagagagagatcttcgaaactagggtttcttccggagcttcactacttgagattactctcattcgctttcttttgcctctcgcattttcttcatcctttttgcctcagagctccgtggagagcagcaatcagtagccatggctgagcaggttcattttcattcctttgtgttcatttctacattctgatagatactctttacgattctcattctcttctttcttttgtagactgagaaagcttttcttaagcaacccaaggtcttccttaggtaaattcatctgaacaaatctgagaatcttattacttccatttacaaatcgattcatatgatttatgttttttttttgtgtgtttcagctcgaagatatctgggaaaggaaagagacctggtaaaggtggaaaccgtttctggaagaacattggtttgggtttcaagactcctcgtgaagccattgatggtttgttgtttttcctcatacttctgattatcatttaagcgaaagcttcaaactttgatctgaatagttgatttagtgttgtgtattaggtggttaacagtataatcaaagtttttctgttgaaaattagagattttgttgttggtgtttagctgaatatcactgagtgctgtttgctttgattaggtttgaagcaaaaccgaaaatttgagagatgttttgtaatctttgatatgtttattgtgtggaacaggagcttacattgacagtaaatgtccattcactggaaccgtttctatcagaggacgtatcttagctggtacttgccacagtgccaagatgcagagaaccatcattgttcgtaggaattaccttcactttgtgaagaagtatcaacggtaagtacattgtgatgaacctatgttcttgatagagctgcgcaaagatataacatcaatgctgataaacgattatcttaaatttttcattagatatgagaagagacattccaacatccctgcccatgtctcaccgtgtttccgtgtcaaggaaggtgaccatgtcatcattggccaatgcaggtgagtattaggttgtcttatacctttttatgattcaggtagtgccggaaaacgatttctgattgtttgtgatttatgttgcaggccgttgtcgaagacggttaggttcaatgtgctgaaggtgattccagcgggtgcatctgcctttggtaaaaaggccttcactggagtgtaagagttttgaaagtcatgggagattttggtttgattttgatttcggaatgttttaatgttttgtttaaagatcccttttgttggagactttgattatcacagacgaaatacaaatctacgcactttcgttgaacaactctactatattcaactcttgaaatttgcaaatctctcaaaatcacttggctacacagaagtttttgtagtttaagaaaaaagaagtggacttgtttatttttgtcaaatgaattcttctatctgttactatcatggttatttgtgtttttttgggcataccctactaaaccataagaacacattgcattcaaaaatctatattaaagaaaagtagaagttgggtggcagcctctttgatctatgaaagagttattttgatcataacgaaagaccaccatagatttcctaatgtacctaaaatgtagcgatcttgatgaagacaacaagacatagaaatggtaaatcagacgataacttatcgatgatcgaagctcctgaccaccgacgaatctgagcctcagactactctccagaagcggttacatatggattctttcctagtattagaaatgtatacttctttatgatcttgtaagtcttatccggttgtgttgtgttctatataccgtctatttttgtactaaatcacatttgtttgcctgtcttgaattgctctcactcactgccagttttgtgttgtttattttttcttttgttctgcgattgaatataaatattgaacgctgccaaaaaagaatacacagtgaacttgtaaatacaattatacgaagaaaggcgttacacgtttgcctatctttagcaagtggttttgtgttggtcttgagttcattgatatttagtggatggtgacaggacgtgtaaattagtatatggcgtctctaaattcttgaattagctttagttattggccacgaacctattattttatatgcacgtatctactatctagtaagtgtagattagtatattctctcatgcacttaattattgtttgagatcagcaaatgcatgaagtaggcatttaggagtgaaggactactttgcacaaaactttcttttatgtggggcgacaaatctaaattgttataactctttccgttgcgtaatgaattttaggtcttctatattaagattttcaaaggtgattaaaaccatcattgtggcacgatacgaagcacccacaaaaatatgattctttaagaaatgtggtgcacaaattctgttgtttaaaacgactttactctttgagtttcaggacgattaaaccagaacatggccttttttcttactaaaaaaacatagaattaaataagatgtgattaaaaaaacaagcttaccacatagctagattgattaggcttttctcatttcatcaaccattatagttttatttttaataattctattgtgaagccccaaaaaagcaaaaataactaatctcgtgatgtatacactagataaggtagacgaatgcaataaaatttattttatatctaccaacaaacttgtagctactagctacttttgtgatcaaacacttgaagaaagtcattcccaaatatcgtataataaataggtaatgaaaatttatggattaaaaactcaaatttctgagtaacaacaaagatattgaacaagtaaaaaatcctttataaattaaaaaaaaaaacaaacagatcgtatgctctcacaactcaatcaaaaatcatctcaaataggaaattaaatttgaaaaaaagaaaagaaattaagaagcatcatcatcatcatcatcatcatcataattcataaaatatagtaatgataaattaagaagaacactatggttttcttttgcccacgtaaacctgtaatactccatcagatcctccagccactagggtacactggtccacacctgattgcctccaacagacgctactcacgaaccgcttatccgaaccagaattcataccaactggttcaaacccatctacccaaaccggcttcccccatctcctatcgtacacaaacaccctgttgttttccgatccacaaccaaacaacgcgccgtttctccacacagataaccccacgaagttccgattattcacatgcccttcgtacgtgcgaatcacgcgcccatcctccacgctccacagcttcaaacaaccgtccgtacctgccgtcaccaccgtcccaccgtcgaggaacctcacatacgacaccgttttcgtatgaccttgtaaagtcaacgccgggtcaacgagtttccttatatcgtaaacgtaccctttccgatcagcgcatccgacggccacggctggtccaccggaaggatcgaactcgacgcaacaaacagcactccggcaaatccccgccggtcgtacaacaccgacagattcttccggcggacacctcggatcccatacttgcatagtcccgtcatccgatcccgacgcgcccaccgtcgaagcgccgccgtgacgagtgtaatctacgctccatacacgacgaccaccgtgctcgtccctttcgaataccggcgtcctcttctcaagatcgtactccatcactacgccgtcgtaatctcccgacccaataacccgaccgcccgacccgggtctccaccggagactactaagtttcgccggagtacagatgtaatattcgcaggcggtggcttgatcgacgaaggaaactccggtaccggagacagcgttgttacgtaaaagagaagggaggccgtaaaaacgaatctttcttgaaatcccggcggtagcgacgatgttatcagtgggatcgaattcaatagctccgataacgtcggaggcggaggaggaggaggaagatacgacggtggagagagaaagatcccattcgtatctagcttcttcttgttgttgtgcttgttcttgttgctgcttgtgaggatgaagagtgttcatatgaaaacagagtaatgactgttgcttctggggtttcggaccaatcgaaaaccaatcccattcaaaagaattttttttattaatagtttaatacattagaatataatattcattttaatatggctttttgtttttccctcagtaaataattgggtttattactaatccacgtatgaatttttattctatgagtttatctattcctatgcaaatgtcagagaaaggtcccatgtgaattctatttcaggcaagaaagtgtgaagtttgttgtcgtggctacttatatagccaaacatggcaaattcttgtattaaattgattgacttgtagtaggcgaaaggacgttaactaaatgttgaataaaaaagatagtaacatttcgactactatcacaataaatcttcactgaccattagattgaggttgttcgtaaattacaatgatgagatgatcgtaatggtaacaccgaaacattaaaaaccaaaaacaaaacgtctatttgtaccacttactttttcctacaccaaaactaacaaagtaaatagtttcttatcaacgtttgaattttaacttactttgttgttgtttagttttacaatcgtagtaggcatttaggatttgatttgaattactttgttgttgttagaaaatgtacaactttcgacgatgtgattgaaaaagacgtagcattttcctatctggttactttcaattgcttgattcaccaaaaaaaatataaataaattatagccttcatggcttcaatgcacttatacaatctttttattttacagaatagtcaattttcttctatatcaaatcaactttcaaagctagaaagagacatatacgcttaaaattgccatatcgtatagacgaaatcgtttgataccaaatactccatatgttcctaaaagtttgatgctctagcttttgttttttgtttcataaaaattgattttctagcatttttctttatttttattgtcttataacactaagaaaaatgttaaaatgattaaacaataattgagttcttaataagcgtcaaaatccaaaacatcaaactattatgaatagagggagtactagtttatcttgattttgtcattcggatcaatagtagaaatgtttggacggattcaaaaattttcacttagatgatcattttatatccgggataataaccactcacaaataagtggtcaacatgtataaatatgccataaccattctcgatagttgtccaattcctaatgaaaatccgaatcatgtaacttatttgattctcgatattatattatttacgaatgtcgggtctaagaagcatttctattatattatttacaggtatcaaaaacagataacggttctctataaccatataaccaagaaaagataagcatagatcacggggttaaaatatcgatattgatactacgcgtccgataaagaagagccggggcagattttgagagagagagagagaggagaaaaaatcggtggtaggttttagttttatgagagaattttgtggacagcaaagtaaggacgagtcatacgtgtgttatgtaccacctttggtcattgtcctctttttcatgtctcttcgttacttctcagcctcaagtcttttataacacttgtgctccatgtttggacccacactgcttcaaagaatggattcgatttccatttaatgccatttattaatatttctccaaacaacaaaatacgtgaactacctaacatataaaatttcaccaactaaagcgcaatcttaacgtccgttacaaaagtgggcttctacactttttgaagaaacaaattaacttgttattcaagaaattggtaaacaataaacaaacaaaaatgtaggagagaggacatcgcttaagatataatatcagaaatttttttgaaggagttcattacaagttcattggtgcttctgatgtgcaactttcccatgaaaaagaaggcagagaataaagtggagatacaaaagcaacttaaaggatgacttaaaggagagactagtcattaacaaaggaatggataaattaataagtagttggaaaaaaagctaacaccaagttggtccacaaagacgatccaccgttatcagatttcccacatagatttaacatcaaattagatttgcatttatgttccccaatatttcaatcaatttttactttgtctgctttccatagccattcttcatacatataccacctcatgattccttcatctttctccgtcgtctggcacatcacgcacgtcttgtactccatacaagtcacaaatgaaagttaacaagagttcactttcatcaatgtgcacgccggaaagaatgtcaaatttttttagtttattatatcgaaaatgaaagggaacttttgtttgattacgcaatcaattttttagttttatgacatttttgggccaaatcttactttcttaacacaaagcacaagggaaaaagagttacaaatgttacattagcttattatgacgtttcccagtgacttctattcagcttttcggctttttatttacttgcgtatacaagtacaaagatcgttacagtaaaaaacaaaacaaaacagatcaatgtttttgttcagagatgtacgattagagagactttaaccgggacaaaccatagataaaaccaaaccggactctctaaccaggatgagattggaaagaattggaactagcacttgagccacggccagtgctgagtttaagagcctccaaagccttttgaatctccatgttcattgcactgtcaacacttcccgaagacagtttcctgtgagatttctggagatgaagcttcaaagaactgctgcttagacctgcgttctttccacaaaccggacacactttcattgtcggtttcctctgtctccactccattgatactttcccgtgacatttcttgtcgaggtttattaagatc

SEQ ID NO: 732 - DNA, 65958 bp, Arabidopsis thaliana
gatcatgaatctcaatcgcgtctcccagttcaacgggacgtgaccctcgtctgcgttcttgcctgcagggaaaaaaaaactttcttcagatgcaagaaaccaatattatcaaataaggtttcaactgtttgtttgcctttatatgttatagaaagtattgcctttgcaaaaatatgaaaaatgtagaacgtaccatgaagacgaagagagagactgccgttagagtcataatcatacaccataagcttttcttccttggaacacacgtaagctcttaagggagcaacgttctcgtgcttaatgtttcctacaatctccatttgatgtttaaaatccttccgggacactactatgtctttcaaccgcttaacagcgataaccttggaatcttctagaaccgccttatacgtcatcccaaaaacgcccttccctagaaactctgcagaagctatcaacaagtcttccaagttaaaagccagattacttccttcaaagaacattactttgttaatttcgctcttatcctccatgtcttcaatattcttctcttttcctaatttagaaacttccttctcacttggcatcttcttagctagtttcaacttatctggttttggttctgtctctgacttcctctgccttttcacatagcaaacgattatcacaaccgcgattacaaagaatatcacgaagcaaacgctaatcgctatcccgagaatcgcgggttcagagatatagatgccgtttttcttttgctctttgaatgaaactaccgccggaggaggggcattttcgaagactaagttgttgccggaaaaagccgagttcccgaatcttttcagagaatttgggattgatccggtgagattgttgttggaaaagttaagtctgcgtagaccggggagattaagatccggaatctcaccggagaatgagtttttagctaggttaagcgagacgagtccggtaagattagcaaatcccgcgggaatactaccgttaaaccggttactgtacagatcaagaacagtgagattcgtccacgtggcgtaatcggatggtaatgggccagagaatctgttgttcccgagactaattgctttgagtttcttaagctgcaagaaatcaattgggaacggccctcgtaggccgttggatcgaagactgaggatctgaagctccgatagacggctgatagtaccaggtgggatcactcctagaagacttgctccgggcaagtgaagggcagtgacacgtgtgccgtctatgtcgcatgtgacccctggccacgtggtgcataccgggctgcttgtgttccacgctagagaccgtgggtgaatgatgttgttgaggaaatcgagaagggcttgtctgtcaccggctagatcaccggtgacctgagaatacagagccgatgatccaaagaagagaaataaaacaaaatagaagatgaaagatcttcctctactcatcttcttactaatttctctggttatgtgatggagacttttatatctgcattagataatattattgtatgagaaaatgtagatttttaacgattttgccaagaaaaagaaaaaatcattcctgtactttcccccaatattatggtcttttcatcattttgtttataattttattttctcttgtcaaatcaagtgtatgcactctgagacatggttcgaaactaaaactacacttattcatgcctaaaatgacatttgaattagaacattccaaaagttgaagtcatcaaatgtataagccaaacagattcttcagacgtaattgcaaagaaagtgaagataaaataaaaaataacttacagttcaaatgcggaatctcattaaaggactggctgaaactttagtttaaattgagaagagagaatgtaagagatagttatgagaatttagaaagaagagaagatagaaagaccaaagaagtttggtctgcaaaactataggcaatagctattgaagaaggaagacataaaagatcattgtttaggaaagtcaaaacgctagtaaacgtttaattggcgcatatctggttcaaggagcttcagtgtttcagattatttggaacttggtttattaaaaaataagaatacaattagttggggcgtgatggtgacaaatattggatggaggattgttataacttagaaatcattaaagggaatatgagctgttgtatcattttctttctttcttttattaacattaaaaccctcatattttttagtttctcaacttttaccaccaaagctagtgtgaaccctaaacaatatacgtagtttgagactttgaaaaacattgtgtattagttaatgtgtaaaggtttttagaagataaaatagtcgatttttcatatatccaattttacaacgcaaattttttttcctgttgccaagagtttttaaggacataagcgaaataaaaaagggaaaaatatcaaaaaaatcacgaacttttaaatttgggacgatttaatcttgaacttcacggaagacaaataaatcgtaaagtttttgttgactttcgaaataaatgagaaagtgtttgttgacttgccatttgagtcatgtcgttaaataggttcaaaaaaaaaattacaacgttaatgactcgtttatttgctctgttagaacaaaacaacgtcgtttattgcacagaccaaacaacgtcgttttgtcttgaaacaaatttaaaccttatatccccaaatcgatttcattatctcgaaatcacagacccaccttgacctcaaaatcgcagataataaaatcgaattggagattcagggtttaaatttgttttaacagacaaaacgacgttcttttgtctctcaataaacgacgtcgttttgttctaacagagcatatacacgagacattaacgccgtaaaataattctgttaacctatttaacgacatgactcaaatgggaagtcaacaaaagctttgtcatttatttcgaaagtcaacaaaaactttacgatttatttgtcttccgtgaagttcaagattaaatcgtcccaaatttgaaagttcgtgatttttttgacaattttcccgtataaaaaaattctattagtattttataataaatatcatataagaatatcttttagtgcttaaatatattttaataaataaaaacagaactagaagtcaaaattaaacgataaattattctgttattggtcaaatatatattgaaacttgatatataaaatgggatattcaatattgacataactattttcagttttaaacatgtataaaaaaagaactttggcaaaaatttattaaaacgaagttgctaaaggagaagaatcaatgtagtggaacaacaacatgctcatgagaaaaaataaacacaaaattaaatgatcaaaattttaataagaaagatggatgttttttttttttggtaaaagaagatgggtggattaattttgatttaatgacgatcatttaaggtcaagaacaaaaaaacataacaagcaatcttacatataaacaacataacattaaatatctaataaatatgcctatgtaaattttataagaaagtgaatgccgtaggcgagtgtttctaattctatcaaataggcacggctcttagatatattatgcatgaatttgaatattcacatataacaatttaaacatgaaccacgatgcgaaatgtcttaacgctaaaattgcaatgcttttccaacataaaaattaggggagaaagcagaaaactttattaagataaggaccttttatgctatatgagcctatatatgagagtatatttaaagtctatatatggtatgcacatgcaactgcatgaataatttgtatatctagtgattaatataatatattaaactaaaaccatatcttatgtgtttttggcaatgtaacttcacatgatctgcgagcatcttacaatcattgacgtaaagtttttgccttgattaatagttgttgttatattttactaatatatgttgtttgctgtgctgttgtgcatatactattatagctgcatgtgcggccaaggaacgatgacgaaccatgataaatgggaaaatgattgtttacaacttaatttattttctccattacaaacaaatttatagctttttctattcccaattgcttaacatagccgtctcacaattagagaaagcgaaaacattaattatcccaatacaataatgaatatattcaaacgccgaagggaaattgtcaagagttgttaaggttttaaaaaccttaaacttcaatacaaccttcacagttcacacccttagaaaatggtccagttttggcccaaatatttaacaacatttgggttacgagtatttgccctttacaaatggatcaacaatctccctggatcaatatttagtggccggtttcatgaatcaacatattctttttttttttttgtctaaagaatcaacatattctaaatcaccaaaacactttggtcaacaattttcgacaatatatggaaattaggttggattatcatgcgacttttttctgattaattttatgtatttttaatttacgatgtaattcggactactaatttgtattatgataactttacattttccatactactcaagtccaagtaaaatactattgtatatatatctttggattttacataaattaatggggaggcctaataaaatatactcggagtatatcatttgactttgaaatttatcgagtcaaatcaatgattgtatttttggtaaaaacaattattatgaagactttgaaagtttttaatgattttaatttcaaaaattagtaaatgctggtctggttatccatccattggaagagaaaataagaccttttcaaagctagttgataaaaaaagttctcggtcctatccctcatcttataaagaaattattaatacgtttagggattcaattcacagaagatttaaaaacaaatggaaaataggatattaccataataattatggttcaacaacaatttcgatttctaatttgaataatggaaatttagatcaaaaatagttccgactcatagataaattgaaatgtgccaaatgtcacgtaaaccagcaagaggacaaagtcaacaccacaagagacgacgacgagcacagtgtgaggttatgatatataccctctgcgagactgcgactgctattactgatttgatcccaagttttttttttttttttgaaatttattttttctttatacacaattacatagtggtaagagattctagatggcttcttaatgtttgagatttatatctagtttaagtaggaaagctatattatttgaagaaagaaaaaaacaaccaatcaaagtcatgcaatgtgtgtgagagacattataacatacatagataagatataaaaattaaagcaaacaaaagtcatattttacttcttttataaaaaaagaagttaagcaataacaaacaaacacataaccacaaagaagacaaaacatctttaaccaaaaacatgaccaacatgactcttcgcaagcatgttatatactttcttttcttcataagctgctctcttagcaaaccctccgatgcatccagaggtggcatagccatctattggggccaaaacggaaacgaaggtaacctctctgccacgtgtgccaccggccggtatgcttacgtcaacgtcgcctttcttgtgaaattcggaaatggccaaacaccggagctcaaccttgccggccactgcaaccctgcggcgaacacttgcacccattttggctctcaggtcaaagattgtcagtctcgtggcatcaaggttggttcgttcattcacatacatccgatcctttaggtctagatggttttttttccgagatagaaaataaatagcttttgtttttatctactcaaattttgattctataatttagttagctactttgaaatgacatttgttttgatacttatgtcaaaattgttataaggttatgttgtctctcggcggcgggattggaaactactcgattgggtcgagggaggacgcaaaagttatcgctgattatctgtggaacaacttcttgggaggaaaatcatcatcacgtcccttaggtgatgctgttctagatggtatcgatttcaatatcgagcttggctctcctcaacactgggatgatctcgccaggtagtagtataaatgtataattaagaaaacattttgaataaatgacaaatgttgtcgtgactgaaaaagactagttatcaaaagaagatgttgaacaccaccaaacgatttgggtgactaatttatctattttagttccggtccaaaaagataacgaaattcgaactttatatagaaaagttttgtttaggtgtttaaattccttctttgtgttgactttttttttttgtgaaaataacaaactaaacttcaaaaaaaaaaatgtgtacaggactctctcaaagtttagccacagaggaagaaaaatatatctaacaggagctcctcaatgtccatttccagacagattaatgggaagtgctctcaacactaaacgttttgactatgtttggattcaattctacaataatccaccgtgttcatacagttcaggtaatactcaaaacctcttcgattcatggaacaagtggaccacttcaatcgcagcccaaaaattcttcttgggtctaccggcagctcctgaagctgccggaagtggctatatcccaccagatgtactgacttcacagattcttccgactttaaagaagtctaggaagtatggaggtgtaatgctttggtctaaattctgggatgataaaaatggatacagttcatctatattggctagtgtgtgaaaagaatcgttatggccattgtatgtgtatcaattctctcgtatgtgtatcaattctctcgtctttggtttctgaagaattgttgtgtgtgtgtggtgttagtagtctaatttaaattgtttgtatcaatatacttaatcaactttgctttttcaatatttttttttaataaattatggattcgcttttagtatgaactgatatagatgtagctagctgcatgcaagatttgtttttttttttacatgaaaggtttttttagagatacgatatctactttggaactatatttgaaattgaaaattatcggaagcgcaaagaaacgagatgaatcatgattcagaagaaaaataaacatattgtaagcacatagaagacttctgtccacatcagaaggatgaaaaaagatttttgactaatactccttctgtatattatatttgatgttttaagttttggcaaaccgatattatttattaactatttaaaacataagatttaactaattgtaaaattaatatgcagaatataaactgtcaaaaccaataaaaaaaaatctattttaaaataactttttgtaataaaagatcaagtaataaacagagagaatatatactatatatatatatatatatcgtgttcaaaaaaaaaaaatcattatatatatttagacaaaggattagtctaaaatatctaatctaattgagctatgaacggtttaacatgcatgcactagttcatttatttgttatttgcttcataaacaaggattgatccaaataatcccttcaaaatgagtatagtcgtcaaataactcattcaatcgatttttctaatggatctaaaatgatgtaccattttggctagccaaataaaaatagtttgatgatttcatttaatttgttgccatcatttaaacttttgaatatgaaaagagtatgtagagtaatagtaatggggaacgcataaacattagttgatttgtgctgatttatgttgatttatgcgacactatattatcttacgtaccatgaacacacatttcacaaattatagatcatatattggtgtgaaaaataaagttaattgttacatcttcgactatagctggagttttcatcctattaaatattaataaaaaaatacaaaaaggcacaaaacaggtgccgccatatccaatatatccaacatcgtcaattattcagagccgaccatttacaaaaacgaagaccttttgtgaaaatctagttcaaccataaaaacacgtgccacaatctcattcttcagagttctcccaccgaaccatctctctaaatgcgttcaaattatataagtgagtgatatataaagattactaaaccacatggtataccgattttttagcctcattctcttttgttacaagattctactatgtcttcatttcatttttattttccttctgttggtctcttctcattcttttgcttcttcttagttagcttggccactgaaccgcacatcggtttgggttcaaagctaaaagctagtgaaccgaaccgggcatgggtttctgctaacggtacttttgcaatcgggtttactcggtttaagccaaccgaccgattcttactgagcatttggttcgcacaacttcctggtgatccaaccatcgtctggtctcccaacaggtacacataatcctttgatatttagttattgaagcaatctatattagtagtaaatatatacaaattttatgttaagctcaaataatttctttagtaccaacgtttgatttccctatgatcagaaattttccacattatttttactcaaaaatataaatatctaaaatatagaaactccccagtcacaaaagaagccgtgttggagctagaagccacgggaaacctcgtactctccgaccaaaacactgtcgtctggacctcaaacacgtcaaaccatggtgttgaatcagcggttatgtccgaatctggaaacttcctcctccttggaacagaagttactgctggtccaaccatttggcaaagcttttcgcaaccttccgacactctcctcccaaaccaacccttaaccgtttccttagaactaacctctaacccttcaccgtcgcgccatggccattactccctgaaaatgctgcagcaacacacttcacttagcctcggcctaacctacaacatcaatcttgaccctcacgcaaactactcgtactggtccggaccagatatatctaatgttacaggagatgttaccgcagttcttgacgataccggaagcttcaagatcgtttatggagaatcctcaataggagcagtgtacgtctacaagaacccggtagatgataaccggaattacaacaacagtagtaatttagggttaacaaaaaatccggttctgcggagattggtattagagaacaacggtaatctccggttataccgatgggacaacgacatgaacggttcaagccaatgggtccctgaatgggcagctgtatcaaacccgtgtgacatagctgggatttgcggtaacggagtttgcaatttggaccgaaccaagaaaaacgctgactgtttatgtttgcccggttcggtcaaacttcctgatcaagaaaacgctaaactctgttcagacaactcatctttggtccaagaatgtgaaagcaacattaatcgtaacggtagcttcaagatctcgacggtccaagagaccaactactatttttcagaacgttctgtcatcgaaaatatcagcgatatcagcaacgtgaggaaatgcggtgagatgtgtttgtcagattgcaagtgtgtagcttcagtttatggtttagatgatgagaagccttattgttggattttaaagagtctgaattttggcgggtttcgagatcctggctcaacccttttcgtgaagactagagctaatgaatcttatccctcaaattcgaataataatgattctaaatcgcgtaagagccacggattaagacaaaaggttctggtgattcctatagttgtggggatgcttgtgcttgtggcactacttgggatgttgttatactataatttagataggaagagaacactaaagagagccgcaaagaactctcttatcctttgtgactctcctgtgagtttcacttaccgcgatctccagaactgtaccaacaacttctcccaacttcttggatcaggtcagaatcaacaatcatcatataacaagttttaacttagaagtgtttcaaatcttattttctttgttttatgatgtggtaggtggatttgggacagtatacaaaggaacagtagcgggtgaaacgctagtcgcggtgaagagattagacagagcattatctcatggcgagagagagttcatcactgaagtcaataccattggttcaatgcatcacatgaaccttgttcgcttgtgtggttactgctcggaagactcacaccggtatgacttagaagacttttacaaaacattttactctgttttcaagcaaacagatttgaataaatgtttttttggtgacattacaggcttctagtttatgagtacatgataaatgggtcgttagacaaatggatattctcttcagaacagacagctaatctacttgattggcgaacacgttttgaaatagcggttgcgactgcacaaggaatcgcatattttcatgagcagtgtcgaaacaggattatacattgcgacattaaacctgaaaacatcttgttggatgataatttttgtcctaaggtatcagattttgggctagccaagatgatggggagagagcattcgcatgtggttacgatgattagagggacgagagggtatctagcgcccgaatgggtgagtaaccgcccgatcacggtgaaggccgatgtgtatagttatggaatgcttcttctagagatcgtaggtggtaggagaaatcttgatatgtcctatgacgctgaggatttcttttaccctggatgggcctacaaggtaaatttagacgatttctaaaatataaagaaagggcttaaattagttataaacataaagattataacgtcctaacgagtttttgaaaataaatgaataggaactaacgaatgggacatctttgaaagctgtggataaaaggctacaaggagtagcagaggaagaagaagtagtgaaggctcttaaagtggctttctggtgcatacaagacgaagtatcgatgaggccgtcgatgggtgaggtggttaagcttttagaaggcacttcggatgagataaatctgccaccgatgccacagacgattctagaacttatagaggaaggattggaggatgtgtatagagcgatgaggagagagttcaataatcagcttagctctttgactgttaatacaatcacaacctctcagagttatcgttcctcctctcggtctcatgctacttgtagttattcttcaatgtctcctaggtagttttcttttcttttttgcatcattttattgtttgagatcatttctctatttctaggactaatcaaaaatatgatatttatgtatgtttaagtctcttaccactaaaccaaattaaaaagttagaagctcatgtatgtttgatggacttttattcagaccagctctgtacttaacacatatcatagattggaccaacttacatgaacttattgggtttacggaaaaaatgagaagaaattaatactcgtgacttgtaaatgttttaaaaattagaagttccatacttagagaaggcaaacgattctcttatcttaatcatcggatcttgctctagcggtatctatcccgctaaagacggacttgggacagtcaaatcctatttcattttgaatcatcaacttccatgagagcgtttctagcgctggacgtcttgaaagatagtacaatagccaacacaaaacgaaattaatttattttcatctcctatctacttttaaaaacttttaactttttttttataataaattttaaatatttataaaataaatttaaattttaaaacactgaataatacatttgattatgagtatgattggaagaaaaagaaaaaaagagagtattgattgataaacagtgtcgaaatttgctcttctatcccaaagcaattgtggtagagttgagtggttaaaggttctcctgtggatcaagaacattgttccaatcttctgtagattgattttttaaaatttcattttaagctacaaagtagcttaaactagagatcaggaatcttactgtttttaatctacaaatatttttgttcggatcttctatcacaatttgcaatgctaactctgaatatccttgcacacaggagttttgaattcagtttttcacctaaggtagagaaaggtctagtagaccgttgaccaaaaaaacaaagaaactaacatacagtatattgtttaatcgaatcaccccagatatttctaatttaagaaaaattacaaaattagtattggtagtctactctaaaattctttaggtctattaatacgcctacattaggaagagaaaatgtcagaaggaatatcagaatgtacccataatgcatactaaaaatcctataaagttaagtgcctatggcctaattttctcaaatattttaatatttatatgataagaaattcttgtatttagtagggaaatacattttttttttgtctacacctaatccgttagccctgccagtatgaggtatagcaatatgtggaccttgccactagactataaacccttctcagtgaaaaaccattaaaacattttcttttatatatcctagttaatttttgttttctttaaactagggttttcgaggactaactatgtaggataagtatagttcatgaacaactcactcactagatttctaaatagatctgatgtgatatcatttcgagtgaaaaagtgaaatttttctaatggatattaaatctaaaggaagcgaatttccataatgttacgtaatttttatgactaggtcaatactacgagtaatttgttttctaaacttttacctttttaatacatattttatgacaaatggacgtaattaactaactaatacggtgagcgaaagaaaaggcagctgacgaaattgaaaagaaagaaaacgagtgagagattgatttatttaatgcacaagtttagtaggtgatcttttaatattttaacgcatgttgatatgaaagttggaaaaaataaaccatgttggcatggaaaattcaataaaagtaacatagttgtattacaaagtgacagtttacagaaattcctgtgaaatgaaataccaagttttttccgattaattgacgcttaagaaaggacaagttttcagcaatgcgttggcgtagtattgttattcattccttaattactcttacagctagattttggtataaggtttttgttttctcgtatagtgaattagcttacttatttatacatccataacaagagcaagcgaaatgtttaattatgaatatttatcgccgaccagtttggctcacaaaacgttgattgcaaattttaaaacataagtataaataagaaaactaatttcaaaacttaagtataaaaaacagttaaaactaaagtaatataatttgatttgaaatttcttgatttagttagcatgatctattttgaattttttttgagtggaattgtagactatgcaaagagagacaacttttatatgtatatggagatacacactgttattgagataaactttttttggggtatggaatacacactgttataatagtaagctttatttatttatctctacaactaaaattaaatattattaggtacaggaggaaaagtgaaactacaatgtaaaggaattcgagtcaaacgggtaaagaaataaccaactaggtcatacaaaatagcaaaaaccactagggcatatatactttaaattcctcaatatgtgttctacaatttacatcaaaatttgaataggggtgacaactaccctccctagtcactacctaagtccccaaatgactgcaacatttattattatttcaaaactaccacatattacaatgagtcaaatatttaagatagagaacttttttttactaatttctttttaatttaattaactattaactaataagatatatatatttggttaaataacacataatcttagctaaatatatatgcttttgaatgtattgatgaacttcatatgtcattttactataataacatctaattgtaaatgaagaatataaaaatattaatgggactcactttctaaagtgtgataacttgaaatctctacaaacatatatagtatttttgaaatttaaggaggtatttcattacaatattttaagtgtgaactatttgtggtataccaattaccaagcaacccacataattaacactaataatcataaatccataatttggaacgtggaagaacatcgtttcatgtgaatccgcgtttgtcctacacgcgcttccttgtactgtacatcaaaccgatcaaagtcagaacgtaataatagttttttatatcgacattaccggttcactcacgtggacttgccatgcaagtcaaaccttatatataactctcattatcgagtactaatccatatcttaattcattacattcatttttccctctatcttttcttttatcttaaacacaaataataagaatctaagatactttgatcttttaatcaagaaaataaacacaaactcctagggttttttgtggtggaagattttttcgtttttatactaaaaataatgcagtttgtgaattttttcccactattggccctcgtagtcataagcttagccggaaaggctacggtagaggctgcgacgggattgaaccctccggtgaagcttgtctggcattattacaaacttactaacacttgtgatgatgcagagacttatattagataccaagttgaaaagttttataagaatgatagtagcattgccccaaagctgcttcgtctcctctactccgattgtatggttaatgtaagtaaaagcaactagaacatcaacattacattcatttctttttcatagccattgatcgatgtaaaatgtgtatgtagggatgtgatggttcgattcttttgcaaggaccaaactcagagaggacagctccacagaatcgagggcttggaggttttgtgataatcgataaaataaagcaagttcttgaatcacgttgtcctggtgtcgtttcttgcgctgatatcctcaaccttgccactagagatgctgttcacatggtaaacatattcatatacttgaatgttcttactaacgtagatttatcgatttatttgaactttattgtttggtgttgttttgataaattcggtgtaataatgattaggccggagcaccgtcttatcctgtgtttacggggagaagggacggtgggacattaaatgcagacgccgtagatctgccgtcaccgtccatctcagtcgatgagtcattggcatatttcaagtccaaaggtcttgacgttttggatatgactactcttctaggtatctcatcatcgtcaatttttttttctatttattttttcctttagaaacaagcatctttcaatccacaaccatacgtatttaaatcaaaataagtttgtaattataagagtatacaccaaatgaattgttgcgttgctttttggccgttgcgtttgaactctgcaaaagtattttataaaaatctgaaaatgttaaaatattaataaataaaaacaactgagattgtagttcaattgtctacctatgtttagttactgtaaacacatttaactactttaaggattacaaatatttgaattaattctcatcgtatgcaatactttaaataatataaaatttacaagatagtttcacatcctagaagaatatccaaaaaatagactagtaatccagaaaggaaaatataatctacaagcaaagtggagctaaatagtcttgggtgaatataacaacctctaataattgtgtaattgaacaggagcacactcaatggggaagacacattgtagctacgtagtggacagactatacaacttcaagaacacagggaaaccagatccgaccatgaacacgacattggtgtcacaacttcgatatctttgtcctccaagaacacaaaagggccaaaccgatccactggtttacctaaatccagactcaggctcgagcaacagattcacaagctcatactactctcgtgtcttgtctcataacgctgttttacgggtggaccaagagttgctcaacaacgatgactcgaaggagatcacgcaagagtttgcttccggttttgaagatttcagaaagtcttttgctttggcaatgtcgagaatgggatctatcaatgttttgacgggaacagctggagagattcgtcgagactgcagagttaccaacgctaatgacggggcctaaactatattataaattttatattatgtttgtccaaaaaaaaaaaaatttatattatgtaatttttgtgtgtgtgtgtttataatataagtataaattattttgataacaaaatattatcaataagactcggaaataaagaagagaaattgcattctatgacaaattgacaaaacattaaaaatttataaagcaacacaatttacacaaagactatttgaaatgcattatcatatgtgtaaaaaacaacaacactcttaataaaatgtgaccaaattaaccaaccaacaaaactacttgttacaaataacattttattgttacatcgaaacatataaatattgactaatctggctaacattgaaattggtaaaatgaaatggttgaataattgaaaaatgagattattcaggaatacacattgaatgcaaagattacgcatttcatttctggtagtagatctataatcaaaaaagtgtttgtgattgtttcaaaagaaatgaaataaaagatacggtagagctagaagagttattgtatgaggtttacccaatactaaaagcagaagcgcataatagattgatatgaacatcataagctgtcccgcaataaaacatgttgttgcgatactttcttcccggtctttgttttccttcgtccaaactcggagaagaaagagataagagggtcctatagaaaatatggtcagaaattcataataaagtccgaccacaatgaccgaatttattatcttcatgtataaggatactagattacctagtataaaagattgaaaaaccatcacaaacctcccttttttcttttctatttcaatttttggattatgatatgatgattttgcaacgtcagaagtgttggttactttgacaaaaacgcatcgtttcaaagatttttttggcgtagccggaaagaacacgtcatcaccattaagcaaaatcccaaagagatagtatttgctacttcggcttcgccttgagggtctcctcctcagctttttggtccccggattgctcatggccgtccccgggttcttctcttccatggcgcttctccgtaatctctctctctctctgaatttcaccttttcaatttgattctgaacttttgataaattgaatttgaacaaatacttgcagggcattgtcctgtatcgaacacagaggacggaggaggaagcttcttccatgtcgctcctcgccgaacttttcgtcctcacctcctcaacactagttctgggtactttccattaccaataattctgttgtgtgtgattcaaagttgagatttttttctgcttttcaaagtaaattggatttaagtgttgttggtgttgaatacttgatgcattagattactgtcttgtagcaaaatgataaagatgccaatgtttttggaagagactcatcatggcacatgatttatcagattttgaatggacttgtatgcatattactaggtgtggatttcttaagtgttatagtgactatattacaagaaaatacctgcggaggaataggactcaagctatagcagagtatttgggttcagcttcagatcctaagaagccaactgggaagtcaagttatcatccttcagaagatatcagagcatatgtgccagagaagaatcctggagattctaggctttcacctcctgaaactgctagaaccatcattgaggtattattatatatggcatcttccagtcaacatttcattagtaaaacaatcctaggactgatgtcttaatgtaaattatagttatatgttagtgtgaagagttctacttgctaccttattgtaggtttcttcattatttatctatcagaaattccagtttgactctacctgtttgtttttccggagttggttttgcggatctgacatttcccgtagtcttgttcaggtgaacaaaaaaggaaccctgatgctctcaggtttacttggtattggagttcatgagaatattctctggccggatataccttatgtcacagatcagcatggaagtatgaattcttatttttgtttttgctttgtatttattcagttggcttatagctatctataatttaattgaattacccttatgatctgcagatatatattttcaagtaaaggaaaatgaggacataatgcagactgttgttacatctgataataattatgtggtatgttgtctttttcagatatattgtcttgttacatacataacctttatagaccatttattaaagaatgtgatacattaagtcattttaagcctagctttcttctggaacggcagctaaagctcctttcttattactcttgctttttcctttttttgctaattttccaatcttctgaatctaaacgtgcataagcatgcttcaatagtagtcatataggttggtgccactgctttattttatatccttgtgtatatgtctatatgtttttctttagtttaaatgattctgctgcatggtgttttctttacagttgcttttgttcttttctctattcacttgtatggagatataactgtgataagtgacatttgcaatgcagcaagtaatagtaggttttgatacgatggagatgatcaaggacatggagctgagcagtccatctggtattggttttgggattgaagaaatcgaagatggtgaaagtgaagttgaggatgaaaacaagggcgatgaggatgaaggagaagacaaagatgacgaggtttgaaaagctttcgtggtcttattgaggaacttcacatggaaaaaacctgtcttatgcttagcatgcttcacaatatactgtgttcttgactccaggaatgggttgctgttctagaagatggagatgacgaggataactatgtctcagactctgatgaatcacttggagactgggcaaacttggaaacgatgcgatattgccatcctatgtattttgccaggaggatggccgaggttacttgcagtccaaaaattgatttgtgatttatcaaatatccaccatgtgaagactataaaacttagtttctttattgaaatttaggttgcttcaactgatcctgtaaattggatggatcagccgtccgctggccttgctatccaagggctcttgagtcctgtcattgtggaagatcactcagatatccaaaaacatatctctggttgtatatctacaggcactgacaaaaacaaggagagagaaaactcagaagagatatttgaaggcattggtgagaatgaatctgagatattgcatgttgaaaattcgagaaatgctatacagtactacaagctggagataataagaatccagctcatcacggcacaggggcatcaggttacgataaagcctctccctttttaatatatactctttaaaaggctctatggaagttttagctcatgcatttggttggttgtgtatttttgcttttgaacagactgaagtggaagtggaagacgtcaggaaagcacaacctgatgttattgcttgtgcatcagatggtatactgactcgtctagaagaagatggcgataaactaactgaagctctcagatctctgtgttggagaaataatgggattcaagcagaggtaaagaaactggaactttacgttacattactggaatttcaaaacgaagttgttgtatagctttcacgactatactgtgacaatcatgattatatccatatggtgttacaatgtaggaagtgaagctcattgggatagattcacttggtttcgaccttaggatttgctcaggaatgcaaattgagacattacggtttgcattctcgataagggtatgtcgattttcgttttctatcttcttagactctgattagtgaacaatgataatacatacgatatcacttagattaatgcggcctgataactctgtgttgcaggcaacatcagaacacaacgctgagggacagttgagagaattattattcgcttctacaccttccaagccgcagaaaccaaaacaaacgaatcaaaaggaatcttagagtcttaataatgtagctacaagaaacatattcaaactgcaatttctcgtgtatcaatgaaagtgccctcaccagtcagacatgaactaacactcctgctaacgttaaagatcgtttgtggtcagacaagcaatttcaaggttggcttattggagattggtgtgtgtgtgtgtgtgtggggggggggggggggggtctcatgttgtttcattgttttccaattaattcttgacactgtttatacataaatatatgatcttcaagtctaagggttaatagacttattaattcttcaagtctctgggttaatatagtttatacaatttatacagaagaccttattaattcttcaagtctctgggttaagagagcattgaaatttatcccaatttatacataaatatatgatctgtccaaatagttttacataaatctcatctctttatcgtaactcttatttttgtattttgtcactaataacttttttacattcataaaacccacttcaaaagattgtatcttagtttagttgtttaattacatttgtattcataaagtgagaatgagagactctcacacacctagaaaaaggaaataccgagacaaggactatatcgtaattataaggttagctattaacgaaaataaaatcagacaacggctaattagttactaatcacagtaattaaacaactaaactcaaagaaaaaaggaaaccctaaatttgatgtaagcagagagcgcaagtattattatataatgcaatagagactctctcattctcagtttctctcagattctctaatttccttgtgtctcacgatttgctctcagaagaacttgagttttcgattctatcaaaaattcacaatgactagtatctatcacgatgatgacgatcatctcacggcttcaggtaaagacctgtggtcgaatttctgtgtactggttgatgcggcggttatgttatatgaagaagaagaagaagaacaacgtcgtaagattgtctctgaagaagaagaagaattccagaagagaatcttttgtctcttcccgagaaaaacaagatcgtctttggtgaagagacaacaaaatcttattagggtttctacttcttcatcgcttatcgatcttaaccagttccctaccgattctgagatcgaagacccacaaaaccatcttcaagggctatcctcttcatgtttcattgccgctaattccgagacaaaaacattacaaaaccctagttcagaaccttgttcttcactcggactctttggtcacaagacggctgagtaccaaaagacggagacgaaagacccaccaaaccctaatttcccatgtactatgtctttgtgcctaatggagaacacaagccgcaagagacgtgctgtggaacaaaggaagcgtagtggtggagtcaagaaagcaaatgttgctcctttttcacaaacggcgagagagacacctgagtggcttgtcaaggtgatgacaaacatgaaagaagccaaagacgctaaattgatctttgagaagactctgttcgtgactgatgtaaacccaacaaagaaccgtctctcaatgcctttcaacaacttactccgaaacgatttcctgacgtctgtggagtccataatcataaacgaagacatcaacaacaataacaagattggagtgggagcgattctcgtggatcaacggtgtaaaaagtggggtgtgatgttaaagagatgggagatgaagaaggaatcaggtaaaggaagctggagttacaatttgatttgtgggtggaacgacatcgttgaggctaacagattgaaagaaggcgacaacattactctttggtcgtttaggtgctgtggaatcctctgctttgccatggaacagagtagctcttcccttgctctctgtctctgctaagtttcttgtgtcggttgagactataacttgattgatcaacacgcacagcgatctaatttcaggagattctggacttcttttttgtctaagagtttgattaagaaaattagtgttccttattagtaacttgttccatatattgtttcagatcattataaccgtatgtactatagtatgaaaacttagcatttttgacatgaatcttgtttgttgtttggtctactttagttactgcattgttacctttcgattccttgtaatatatctccaagtcttattttgtctaatgaaattgatccaatcaataaaagtgtttttaatacattcattagaaatgctcgatacaatcaaaacctgtgttttgttctactcagtaagaatctgattttgaaactcaagtatgaagagcaaaatgatcaaatcaggaaccaaatttgttgccaagacaggttttgctacaattgcttcttcagccacttgaataagtacaccgtacttggacgttgattagctcgattttctcagccttaatagcaaacacaacgtttcgcttccgcacatctataagatctcgttttcttgtctaggatcttgtcagtttatgattaatgtagaaattctgaaactacaatacaaaaatacaaatcctaggtgaattatagtttcgaaaatccatattaaaaaaaaaaatccatatagattatttaaaatacaccaatcaagtgttggttattttcggattttgaaaaaaccgttaggcaatttgaaagcaaaaacaaaaaaaaaatgatctctataatcatacactcattcgaatttctcctcaaatttgttaaactttcagaaaactgaatcgaacacaagcagggattgttacagcttgtagtacacgtcaagtaataaagtcaacgcatttcctcaatcaagagagcaacagagaaagtcaacacgtttagttttaggcttttagctctacattattatcagaccaagtctataatcactcagagaataaaatggtaaaatggtcggagttgccaccggagattctccacttgatctcccttaaaatcgacaatccctttgatctgatccactttcggtcagtttgttccttttggcgatcctctagtctcctcaaattcagacacatgacatcacttagatgtcctcttccccttgatcccggcggttgtggtgatgattgccatatcttgagcagccgtgtctaccttctcaagtgtcctaatcgtgaccgtccccaatattggtaataaaatctgtttcttgtattgattcttgaatcttgatgatacatagatgataattttctcctgccaggatgtttaaactacaagctaaagagaatggagaagttgttctacatagtttgttcttaagaagaaactcctctgcgtatggatgcttgtatccaagtctatctattgatttgctcaattgtcaaatctttgagctagcgcaagaacatgtggcttgttacagcgaatggtttgaattatttgaatgcatttcaaaatgtgaagaacgtatcggatttatgggtctaaacagagagaaaaacgaatatatgattctagggaagctctcattcaatggtctcgcaatgtataggtcagtcgataaccgttggactgagctcgagataacacccgattcattttttgaagggatagttccatttaaaggcaagttttacgcgatagatcgcaccggaaaaacaacagtggtagatccaacactagaagtgaatacatttcagcggtcaagaccttgtgataagacaaggaaacgttgggtaaggagacgaccaacatttttatatcttgtatttcatgcaacttggaacaaaactaaaatttacaagtctttttatttcattcgttatctccaacagcttttaatgacaggggacaaactcattctcgtagagatgtgcacaaagagccgatacgattttcacataccaaatatccgtgagaaaaagatatggttcgaaatatcagagttaaacgaggaaagaaacgattgggatcaagtggaagatatggacggtcgtgtgttgttcttggagcattattgtaccttctcatgcttggctactgaaattccagggtttagggctaactctataatcttcatggacttgtggggaggatctaactcatatgaacttgaaagcattctcgtgtatgaattcaatgagaaaggcgtaagatctttaagagataaattggagtatatagagctgtttccatttccccctggttgggtaatctccaacggataattatatgacattcactaaaacatgcatgccttttattatttttgttttgttttgtatatactatgattttccttttgtatttgaccaaagtttggctgctaattatagttccatttgttattattgaaactagctagaccaaagcatcccctaggtgaaccagtcgtctatcatataccggagatacgttcggaacacacatacataaatggtagtgatctagcagaatgtctacttctctgaaattaaagtttttattttggccgtaactcctgtttcttgttttctcattttgtttgcaaatttagaattttttgaattttcttaggcaatttgttttgtatcttaaattttcaagttgcattgcattagccatgaggggtcatttttgggccggcaactagaagatgccagctttaaggactcagtgactcacacaactctaaaagaaacagcaattatcaagtcatatgggtccacggccattcatattacagcttcatatattatcaaaacctattcaccttttcacctatttttgtcgttcactcctttataaattgttaggaaggaagaataaatactgtctccctatgaatatccttcttctctactttttttttctgcttgcatcatccatacaaggttaatgagaaattatatcatcgaaattagaccattataaactttcaaacaaatatctgaagtaatttcatatgcaatttgtttttgtaaaactcaaaatacccatcttattagtatcctaataaatttaagataaacatatctgatataaattcaagtccttttcatctaacgctttcacagatttcctacatttgagatcaaatactcaattatttagtatttatcattatttaatttctgtattgaagctattgaataaattaaccagttaagctattagtttgtccgattacagaggatattcccaaagctatatctttgaatatgtatggatcatgtacgtgttaaaagcaaaataagatcaattagtctagcatataattgaaggatataataattgaatatatcttcaatgagatttgatcagttacataatttacatcaaccgattagaccaatctaatagatgataaattactttaataggaaaaccttaaattacctatctacaaaacgtttgccggtgtgtatcttatttttattacttttggcattatcaatctgctttaggtcaaacctaagttttgtccgctctaaagacaaaactcatgtacagcgcatgtagacaggaaccaaaaactattatatttatgattaactcactaagatataatatattcatataactggacaaataaagaaaaatcaattcggtgacagctaaaatcctaattcaaacaatcaaccaaaaacgtacctaacgacacaatctatgcgaagaagttttgtgaaccaacttggtttcttcctctttcctatttctttgtgtaatttaccccaaaaaatgcggattactcgttttgtgtactcgattccttaaaaacagttttgttgtatttttccatcccacaatttggctatacacctaattaattagcccataattctgttatagataacttgttggcaaatgatttttaattatattatatacccgagccaaaaaaaaaaaaaaaaaaacagatatcaaaaacatcgccaactcagattccaaaaatttaaacgttatgaaaagatagaatccatataagagaaatagacgtgaaattttttgaatttatgaatagaaaaacaataaggtggtaaaaacaaaattgtaaaaccatatttctaggaataaatacattaccttgtgaaaacgaaaaattagatttttggatactggataaccaaagtccaaaacttaaagtacattgctttgcgatatcagtcttatgtaggaattatttctgtaggttcagttcaagtagcctcccaataatacgccatctaaagcatccatgctggttaaattgctgcaataatgactaactttgcatgctatgtccatctccattgtcaacttttttctatgtggcatgatgcaaattatcttttttgcacttaagtaatttttggagatgtctgatagacacggatatggagaactgtttataaaaaagtgcatgcggatctaaaatctatttgtcgcattgtaattggtaaatatacttcgtagctgaatttactcccaaacaaacatattgtattgttcttccttccagtaaaacttgactatatttctaaaacattaacaaaaaacgaataaataacaaaaaagctcatcatttatatgataaaaaaaaacgttatatttattatgaaaagatttaaaagcttatcatttatgtaattatatttaacaaagaaaaaaaattagaaaaattatcaaacaaaccaagactcaaagttatttatttatttttcttttgcaaaataatattttatgcatttgttaaatgttaaaaaacccaaaaaaaacttcaactaatttttatttggacgtttaatacccaattgtttttggttggaaagtaaatacacgaagtaataaaaccgtgcaatttaatacacaaacaagtaattgttgttattttcatactcacgatctcacaataaaaattaatatcatattatcataaactaaaatattaataaaattaatttttattcaaaattataaaattaatatcatattatcaaaaaaaaaatagttaattgagatggtaaggataaattgcaattttatttttgttgtgagatcgtgagtatgaaaataacaacaattaattatttgtgtattaaattgtacgattttattatttcgtgtatttatcttccaacaaaaaataattgggtattaaacgtccaaataaaaattaattgagatcttttttgggttttttccctttgttaaataccatattaacttcattttcataaatatattttaaaaatttccttgttttttggccgtttcgtataatgtggtccaccacctattgaccaatgcttaaaaaaactaaataattgtgacaaaaaataataaaaagaacaaaaaattacttgagattgtcaatgacgtgaaccatgactagttgatcaacaagaagacggccacgttgaaagctttgaattacagctatacatttaacaaatacatacactatcatgtttccgtaactgtacttacgtgaacacttatttatagtacaaagacgtgttttgttttcgcccaaaccaactcgctttttttctattttctcctaattcgtcttcgcttctttccctaccaaaacacaattcttatctctacaagaataagagaagatctgtagattttaaacaccatttctgatttctacggctgcaaaatttcaaaatcgtcaggttagtgttttattccatttctccatttttttgtttttggattcgtagttaacaaagttcattacatcacaaacaacatttttgtgaatcctttcttgagaacatgcataggctacatgcgattcttgattttcttttatatgaccttagggttcttattacgaactaataaatttattaattgatttttcttttcttttttttttctcctcgttctttctttcttaaacccaaattgattccagaaaccaaaaattaccttactaaaccccaaatgccaatttagctgtgaaccaatgtgatgtaaaatttacaaagattcctggtttactaatactagtacatgtatgtgatttttatatgttcaaaccggttttcacaagcgatggaacatgaacaatagcgtttaaacgcgtaaatattcataagcgttgttggccggtcgagccataactttgaagtggacccgatgagttgatgggcacatagcaccacaccatccatttaagatcttttgctattttgtttttttcttctaaagtttttttcttgtacagccaaaaagaaaggaaaaagaaatatatatatatatatataattttatttctgttgttaataggagtttttgtttcgttaattaaaaccaatttagttagctttttatatatttaatttcctaattatgggagtcttgattttacctacgactttttgaaacagcgatgttttagattggtttagctttgatcattgacgtggaacatcgcaataaagggtttattaatgcagttctaaaattacagttttgttggttttctaaaattatagtttctcttaaacaaatattcaaagaatttactccactcaaagtcagaaaccaaaaggaaagcttaaaattcgaaaacgaaaaaaatagagaaaactgtatttattctattctttgtgctttcttgtttttctatttatgattgttgtttgatttgaggagaattctcaaaggcgcccaaatgcacactagtatttataggttttaagtgcaattgttttggataaacaaacaatagtggccttcttttttctttctagccgataacatgcatcattttccaataaatatagggtaagtgactaagtatagtctaattctatacagctgggaaaccagcttagtggcaacaccactagactttgcaaaatgtatattaggtatgatgtttaaatgtggagaatttaggtcagatttatttaattatcggcctaattaaaccactagattttattagtttatgattttagaaaatataaatcccaaattcattttccaaaccatgttatagagcaattgcgaagggaataggtaaaattctaatgaatcaagaactcgctagaagtccttttactgtgaataatatatattttgttttccttcgcatatgctttcaacaatctaaaaaaattatatattgacttcaagggctatactcatcaatcttttgtgttaatgatgaatcaatgatacaagtcaagttagaatattaattaactatagattaaaaagaaaattcaattttataggtgtcaattaatacgtaaacaatttggatgttacagaggaaattaaaaagaagaaaaaaatggaggagaaaccaaactatgtgatacaagtagaagaagagcttccaactttactgagaaaagccacaacagaagaaatggttggctttgacaattacaaagagaatggtcatccttttcctcactcaatcagtcgttttcatccatcgcatgcctccacgactactttggtatgttacatattttatttatcactttccacactcgcaaaaattaggttataaacttattatataactaattccgagacaattatgttacatatatttatatgtacagaatggtcaagaaacatcaagatcaatagacacaatggaagctcatcatcataactacaatgagacaacaccatggactcatcaaagaaaaccatcaatttcaatgccaacttcaccaaatgttctcatgatctccgacccgacaacatctttgtcttccgaaaaccacaagaacagtgggtcgactggcaaatccgtcaagtttctctctcagccgatgaccaaagtctcatctctctacatagaaagcggtaatggtgatgatgatcgtcgtcaaagccatgataatcatcatcatcatcttcatcgacaacatcagagtggtcatcatcaaaatcaaaatcaggctgcgaacaagcttaaagacaacaggtacaactcgttcaagacttggtcggggaaacttgagagacaattcacaagaaaaccagcttctgttgaaccggaggcaccaaaccggaataaccaaaatttgaataccaatgaagccatgcctgtggaccgttactatgacgccttagaaggtcctgaattagagaccctacgggtacgtacctacgttttttttgtatcttttacatttgaattgcattcatgtggtaaattgttttaatgacctttttgcgaaaatatatcattactagaagtcagaagtgacacgttttataactctcttttattaacgagtgacatgtttcaattataactctcttttgtttttcctacgtcgcagcctcaagaagagatcgttctaccaaatgataaaaagtggccgtttcttctccgttaccccatttccaccttcggtatgtgcctaggagtgagcagccaagccataatgtggaaaaccctagccactgcagagccaaccaagttcctccacgtacccctctggatcaaccagggtctatggttcatttcagtggctttgatcctcactatcgccaccatctacctcctcaagatcatccttttcttcgaagccgtacgccgcgaatactaccatccaatcagaatcaacttcttctttgctcctttcatttctttactcttccttgccctcggtgtcccaccttccataattacagatttgccgcatttcctttggtacctcctcatgtttccattcatctgtcttgagcttaagatctacggtcagtggatgtccggtggtcaacgacggctctcccgggtcgccaacccgaccaaccatctctcggtcgttgggaactttgttggggccttgcttggtgcgtccatggggcttagagaaggccctatattcttctatgctgttgggatggctcattacttggttctgttcgtgactctctaccaaaggctaccgaccaacgagactttgcctaaagatcttcatcctgtcttcttcctcttcgttgcggctccaagtgttgcttccatggcttgggctaaggtcactggctccttcgattatggctccaaagtttgttactttatcgccattttcctctatttctcattggtacgttttacatataacttagctgtatatatattccttcttcagaaaagtatttactaatacaaattttccctttctttgatttataggctgttcggatcaatttcttcaggggaatcaagtaagattaagaaaattacttttattactgtttgatttttagttattcgctagctcaactttctcacacttttttttctcatagattttcgctgtcctggtgggcgtacacctttccgatgaccggagctgcaattgctaccatcaggtacgcaacagtggttaagagcactatgactcaaatcatgtgtgtggtcctatgtgccattgcaacgttagtcgtgttcgcactgctcgtgaccaccattatccacgcctttgtcctccgagatctttttcccaatgacctcgccatagccatcagcaaccgtccgagacccaaacagaatagccaacaccggtggcttgaccaactgagaaacgtaagctcagagaacatcgagaactacttgaaattcacagactccgacagcagtcagagtaatgatgtagaagcttgcaacggcaaaactcaagagagtgattcatcataaattggagaatcacgaaaaaagttttcataacccctaatacagagtcgtatccgaagttttggttttggtttgttgtcagtgtctctgacacaagtgaggaacctagtaacgtaattgttgctgtggttctaatgatcatgtgtttaaagcagtattaagtaaacgggaggggttgtctacaatggtgaaccaatccaaacgacccagtatctcttaaaccagaactgttagcagttatcataatacttcaaagagcatgtatacttgttttgttccaataaataaaaagttttgaggggttatcactgtataaatagcatcagaattatgatacgcgatcatgttggttctactatcagctaagccctctaagagcttcagtatcacataatcatttctatttcgggaacttaatcgacaccgccatatcgataaatcaagaaggtagagaatcaaatggcataataccaagctagacagcactagtactcaagcctacatagtacaaaagggccagcaaaatcatcaccaaaccagtagctaccgaattcatactcgcgaaaagttctgataagatcagctaagctattgaagttctcatcataacgatttgacataagaacttgagatatattggaaactctcaattttaacataaacagattacagaaacagaaatcaagaacctcaagaacaaaaggcataagaatcagagcttgaactcagcaacaaactagcagtagaattccacattgtcctaggaacaaatctaaattctcaaagcaaaagagacaaaatcttcaaaaatctctagctcctgtacaaaagatttcaatgcatacatacccgaggaagaagtttcagttcagttcagtaccgttcggttcggttcgatccgtttgccatttagccgccaaagaaagagaagaagccacgtttcttaggttcttcctccaccataacagccttcatactatcttgctcaacgagtctccaagccgcctgctcaaacgccaatcccgcaagcgtaggaggcttattcagaacaagcggaaaccctcgattcgtgcttcgaataacctcagaatcttcaggaattacaccaagcaatgacaatcccaacatctcctgcacatctaacactgacatcatatcctctcctttaatcatatcagttctcactctgttcacaatcatctttatatctctgattccatcgcattctaacaaacccgtaaccctatcagcatcccttaacgctgttatatccggagttgttaccagaactgcttcattcgccggagtaatggcggttatgaatccggcatcgattcctgcaggacaatcgatgatgatgaaatccggtgaaccttccggtctagttttcaacgcatccacaagccattccaatgctttaccaccaaatcccatcggaagtttcgatctaggtttagatatacatagcaattcgaaattcgaccaacgcttatcacgtaccagagcttgatcgagacgacaatctccgtttataacctcgacgcaagtgtaattgactcgattctctaaccctaggaggagatcgaggttacggagaccaaggtcggcgtcaatggcgacaactgagaaaccgtaacgagcgagagagagaccgacatttgcggtggttgtcgtctttccaacaccgccttttccggaggtgataacgacgatacgcggcgtttctccggcgagttccggtttgcgattaaattgaagaacggatcgtattggactccgtctgctagggttattgacgaatcttggtgaagatattagagtcttttgtgagagagatgatggaaggagaagagattgatgattcgttgagaacaatctcagagacgccattgatagtgctgctgcttcttcagctgtctccacagagacagaaatgtttctgagcgttgtggcttcacagggtttacggtttatcaagaacttttgagattccggtttttaatttctccactcttaaccggtttaatatttaaccaaataatgtactggttttaacggtttatgattcatccatatcaaatgaacaatcatagctctacaagttacagaaaccaaacaaaattataccaaacacgaaccgaatctgagataccggtacaccgctttggtttcccggtttaggtattgtactctatgactatgataaatacttgctctatatagcaatgactttaatttatctcccagcgttggtcattagctgagagaacacttgggtgctactgattatgcctgaagttccatctccatagtctctctctatgttcgagccattagacagaccttgccgagccgttctcgggtcggtaacatctccataatcttcttcaggaatgttcaatggtccggattcttgaagctgaagcacatgttctaagttccatagaacatcgccaattgtcggtctatctacaccgtaatccgcacagcatttctctgcggtttcagcgaatttcttcaacgagcacggtttgatttcatctgcgatattcggatcaacgatctgatcaagcatccctttcctttgccactctattgcccattctgctaaatttacttgctccctaacaagcaacggatcaacagcgggtctagcgcaaagaacttcaaaaagaacaacaccaaatgaataaacatcggacttatccgtgagctgttgtcttctgaagtattcaggatcaagatatccaaagcttccttttacaccggtgctcacatgtgtctcatcaatacaaggaccggatcttgagagtccaaagtctgcaactttggctacatagttgttatctagtaagatattggtggatttgatatcccggtggatgattccttgcgaagaaccggtgtgaaggtaatgaagtcctctggctgcaccaatgcagacctcaagccgttgtttccaagataaaggcgggttggtggatccgtataagtgacttttgagtggtcctttatccatgtactcataaacaagaatcatctcagactgttcttcgcaatacccaacaagtgaaactagatggcgatgacggatcttagagagaatggttatctcagagagaaactctggtaagccctgtcttgaaccaggagagcctctcttcacagctactttggtgttgtctttaagagaccctctaaaaaccatcccgaatccgccaactccgataactaaacttctatcaaagttattggttccggattgtaactccgcgaacgagattctcagagtatggtagccactagaactaacagttctttcagttgttctactattggaactgcctctaaacctcctcaaaggtgtccatcccgtgctctctgaactcctcgtcttgttgttcttgcgcctgcacaagcacaaaacgctcaagaagaacagcgacaagaacacaaaacctcccaaaaccgagccaaccacgatccagacaacattcctctttccagataccacttcagaactcacagggctcaaaatcctcatgatctcaactccattcaatagagcattaactctcgccggattactaagatcagacggtccaacactaatcctcaacattccagaacgatcagactccgcaacaaaatcaatgtacaacggagacgcaagcacatggaaagtaagcgtggagagatcaacatccttaaacgcaagatactcattgataaagacattgaaatagagctgattaagcgacgaactaacgatatcgcagaaatgcaaacgaaccaaatgaagaactcgtttctcatcaacctgaaacccccaactaatgttaaaccttgcctgcaactcctgattatctcgatccatctcctgagcagtcatataaacattatccggagcaatctctctcgtggcaccaccgttttgataattcggagaatgagtagtccaagcacgtctagcagcagctctcaagagaagatagttgtcatcaacaacccaagtcctccacaacgtatcattaaacggcgtcaatttcgaaccaccaacgttgattctatgaacagtctcaagaacttgagatgacaagttactaaagatttgagcagagttaggaatcacaagcttcgttccttgatccattatataatccttaggtgctgaaaacacttcaaccgcattaacaaacccaaatccagaagctttaaagggcaaaaacgaaatctctaaaacagggtcatcgattttgagtatgaattctttaacaacgacggagctagtactgaaactgttaatcacagagaacccattaatcaaaactcgaaatttagcagaccttaagttaaatctcgaagctttaaaaggcgcgaaatggagacggataaagtgagtgcctttggtagtgacttggaatttgtatgatcctccgacggggaaaacacgagctgtgttgtacaaaacgggtgaatctggagatgggttcgtgtcagaaatcgagatggatcgatcggtggagagaaaactcgagccaggttctgaagagtcgctgagaaaagaacgggttgtgaagaaagatgtattggtgttagaaccggaattgatgagataattatcagttggagtgaaagcagcgaaagagagatgaagaagagggcagaagaagaagagaagggtttgggttagatttattggaaacgccattagagtgaagcttttttggggaaggtttgagaaaggttttggtttgatgatattaaagagaagaagagatggagaaactagaaagtgggtttttgctgtcacttctctgtattcgtatttttttcccactaaaggtaagtgaaagagaaagtgtttgtgaaatcattaggcagcgaagtttgtcaacagcaatgggaaaccaaaggaagcttaaacctgattttgtttgtgattcggtggcaatcattttcaaaaagttttgctttctattaaatatagttgattttcactgatttggtaattcttagttaatcatttgtgtacgctatgagtagggatgtttgattcatttttgaattagatagaaacagttttgagatataatttgtggtgttacggattaactcatcgtaggtggtgtgattattatggtattaattgcgtaactaacaaggtttggaccgacacattattacaaaaaataaattaattagtgtattgtaggcaaggtttaatatttcactcattaattccaatagacctaaacgatactaatttaataattagaaggaaatataaggaagcatctgtcaccaaattagaagtactcttcttcttctttttttcttcttttttctgagtgtatgtaaaattttattcatacaacaaaccttgttatagtgaatgcatcctttttaaaaaagttatagaaaaaaaattagaagtactctttttatgggcatccatgatccatcattttatcaaagtctagattaacttctttttcttgataaacaagaagacaataaaatacatgaaaacactaaaaagaagagaattccaccaaacgaagctaatcataatttttttttactatttttcttttttcatactattcattatattttcttcttatatatttcgtcttcctatgttatgttactttctttatcgattttatttatttcttatttgttatttttttcgtatcaagaaatagattacaaaaatagaaaatagagtaaagttttagaaaaaaaatattgttaaattttattttaaacttttatcatattcattatgtggtatattaatatgcttctcgtcaatttgatatctcaataaatttgtttagccgaataaggaaacaaaaaaaataagtttccaaaagtataatatgggacttcaaacattaattggtgtatctaaaaagtgcaatggctcttctattcacagtggtatcaccaaatccactgtcccccacaatctcatcgctccacgtgtctccttcccgccaccacttatcatcatcaataaccatacgccgtaacaaatcgccgccggtaacactcactccacatcgtcttgtttcatctcgacgccggcgcgtgaaggtctactcacaactacgattccctctaatctccccagacgatcactggtcacaatgggctgctctcttcgccgccggagctttcggtgtctggtaaatcacctcaatcctctctgttgaaactagggttttgtatactgatgaaattaccgacttcattaggtcggagaagacgaaaattggaagtatggtgagtggtgcgttgacaagtacgttacttgggctcgccgctagcaatttaaggttaattccgtttgaaacgccgtcgtatggcttcttcatggagtttctcttgccgcatacgattccattgttgttgtttagagctgatctccgtcgtattatccgatctactggatcattgcttcttgcattcttaattggatctggtaaagatttagtcttttgcttaaaggcaagtttttggattgggattagtttggattcatgcttaagactaacaaaagtttatgtctttgagtggttttagttaaaaagattgattgtgaagtgacattgttattgatgatgtgttgagtggtttattaatttgtgagttggtttgttgtagttgcgacgattgttggaacagtggtggcttttatgttggtaccgatgagatcgcttggtccggataactggaaaatagcagctgctcttatggggagttacattggtggatgtaagtttgtctggagccccttcattgcttctttggcttgtttacagacagaggtactcaatgtttatcttctttagccgaaaagattctagctttgcttgattttcgtttatcgaaaaaagaggaaaatcttgctaaattggcttgtaagatgtttatcacaacttgggaatggattcttcaagaggaatgagaataaaattgttggttcttgttttttgttctgcagcccttaattttgttgcgatatcggaggctctacagatatctccatctgttatagcagcgggtgtagctgtggataatgtcatatgtgctcttcacttcatggttttgtttgcgttggcctcaaagataccccctgagaccgcctcagcatcttcccctggtaaacttccatcttgatcacattttgtatatataaggtatgtaagtatgttgcaatgtgagaggattactaaagaacttatggcgaatagtcggaccaactaaggatttggtgactctagggctacttggttagttgtcaaattgatttgagtgaatgttggtaaagatagttattattaatacatataatgtgcctatcaaattaagacttgataataagttttcaatacttttgagttttgacattattacataacgtttctcatcttctaactgcatttgcatccacatataaacactactattcaagtttttgtgatctttggcagatgctgacatgactaaggatgacaagctcgaggacaagaacagagtggtttcaacttcaattgcactatcagtttccttcctgatatgcaaagctgcaattacgttgacgacgctatttaagatacaaggagttatgcttcctgcagtaacagccatcaccattgtcttggcaacatccttccctgatttcttcaactctctggcaccttctgctgaaaccatctctctcattctcatgcaggtatctctttctttacactttatccattatttagaaccaattagacatgtcattggcaaaatgggctatgtctgacccgttttgagcccttattctcattgttaaagcccatccctgattaagcccgaggacttcagaccatggtttgtttttgaatcttttttgttcaggtatttttcacaattctaggagccacagggagtgtatggaatgtaatcaacactgccccaagtatcttcttatttgctgctattcaagtaatggttcatctagcagtgactttggttctaggaaaactattctgtatcgacatgaagctattacttcttgcatcaaatgctaacatcggaggcccaaccactgcgtgtgccatggcaaccgcaaaaggatggacttctcttgtcgtccccgggattctctctggtgtttttggggtctccatagcaacttttctaggcattggatgtggagtttttgtcctcaaacgattatagatttctaaacagttctaatgattggaggattctgaagctagacttcttgtaaattgctaattgttctcaacaaattttaaatctttttgttttccaaattatcagtgttttcatacaaaacaagcatttatctcataaacaataaccattttacattggtttgcgagctttacttgttcaaatataaaataaaatttgtctgtagatttttttttagttgactaatactaatatacatctagtggtacggttgattgtactattgtaccgctctttcaatacaagtcaaccgtacttgagatcgtaatttaaaagtcaactgtactttcccatatcaatctcaaaagtcaactctaccatattaataagattctattgattccaaatattttgtaaccaaaagtagtgctagattcatccttctttgtttgatttatcctatgaaacttagattagcatggttggaaatttatgcgtttacttgcaactttcgattccaaaaacaaaatatgcaatgtacctatcacatgcatgacttagatttgaggtccgaacaaagtctttagtatgtgttcgacacacctgctctttccataatattgatatggagagcccaatttagccaataaaagacatggatagtgtaatatgatatttttttaatgcggagataaagtatatattagctaagaataagtaaagatgtagtacaacaagtaccaatttgtaaatgcatgaatcatgccttatagaatgttctcaaatctcattatctcaactctctacgcacgaaaccctaactaatattttataatttaattaaatttaaaatagttagtaagatactttgatttgattggaagttggaaccatcttgtacttctcgtttttatccattttatatctatatagatatttacacaatcatataaacgtttttcaacgagattcactcttacttaaacgtaacatacatttgaatttgataacatttcttgcttttctatttggcagtatttgttgtagagtagaaatatataataattatcaaaccattgctctcaactcacaagtattctattcgcaaatatgtgtgacacttttagaccaaggggcatatctaagaaactatcatgtacgtttttaagagtttcgtacaaattcacgtctataaactcgtgatttttcttttattaaaagtaaaatgaagatttcacagaaatgaattagtaagaccattctaaatgtaattggtataaaatatctttttatgttgatatattagtgtgaattggttaaacaaacaatatattgtgcaattgcatccaaataatgcatcccaacacagatcgaaatataattgtcccaaatatattgtagagttcatgaagaactaaatctatatatagaaactgaatacaaaatctgattaaaagaacgctttcaattgcataaactgatccatgtttggctaaacatgtatcccatatggttttcttatacaaattgttggccatacatgtatgatatatgagttatgtatatgtaattatacattacattgtgaaagttctctgccagcaaataatttttgggagaaaagatataaaataaaagcaggggaagcattctcacgtcttagacatgtataatataacacgttacatattaattaaacaattacgttattgccctgataatccgctataaataacaaatccaaaaagctttccacacataaaacacacacttacataagtatattgtggataataacataaaagacaaaatggggaatatgagaagcttagtgaagatgttaatggtggttctgtttcttggatggattttcgtttggattatgatttcaactaatcgtttccaaaacatatggacccccaaactcgccaagtatctcaaaactacttattttggtcctcaaggtattaacttctctatttattctcgcattaaaattttgattccttcatctttgagtattcctttatcatgtacgtgtaggcatgaatcttgtgctactcacggttccaatgatgttcattgcggttctgagctgtgtttatttgcatacccaaaagcaaccctcccaaactcaaaggttccacttgttataattcaacttttattgacgatatatatttgtaaaatttgttacaaaattatcacaattttgtttgtataagtgcagagaatggaaggtaaaagggagaatggggagggtgatgatggttatgaacccattggggatagtgacagccacagagttgactttttctctgttgttcctggctcttttagtttgggctctctccaattatctctaccttagctatcacgtccaccttcataaccatgacaacgccaaaatgtaagcttcttaatttgtttcacttctaactttatatgctcgaatggtttgttggaatatcccacataacatctatctatataagatatgtgtctctccactcgttgatcatgattgctcacaaggttatactatgtgaaacataacatatggaacacaccaaaacctctagtgcattttttggcactaccattttttataccttgatgaattgcttcactcccaagttaccatttggagtatctaggtaccaaatccgtagggtatgggagttgatttaatattgcgtgacatgtgtagatggcaggcaaagtttagggcttttggactgaggataggttacgtaggccactactgctgggcctttttgttcttcccggtgacaagagcctctacgatcctgccacttgtcgggttaacgtcggagtcaagcataaaatatcacatttggcttggacatgtctcaaatttttgcttcctcgttcacacagtcgttttccttatctactgggccatggtcaataagttgatggaggtccgtgttacatgcatctaccttaatcttatccttaaaacaaaacaaaacaaaactttcattctttcttttattccaactgatatttgtttttacgatttcttatatatgtgaagacgtttgcatggaatgcaacatatgtgcctaatctggccggaacaatagcgatggtgattggaatagcgatttgggtgacgagtttaccatcctttagacgaaagaagtttgaaattttcttctacactcaccatctctacggtctctacatagtcttctacgcaatccacgtgggagactcatggttctgcatgatcttgccaaacatcttcctctttttcatagaccgctacttgagattcttacaatctaccaagagatccagacttgtttccgctaagattttaccttcagacaaccttgaactcactttcgccaaaacttcaggtttacaactagttcttccatttatcttgactataatagtttagggtttttctttcaacagatattccgttttcaactagaaatacaaacgcaaaacgcaaatgtaatgaaaacttcttttggtatatgtttaaggtttacattatacaccaacaagcatattgtttctacatgtgccgagcatttccaagcttcaatggcatccattcacaataacttcgagcagcaacttggagaaagatacactaagtgttgtaatcagaaaacagggaagttggactcaaaaactttacacacatctctcttcttccattgattctctcgaagtttctactgaaggtccttatggccctaactcttttgatgtctcgaggtaaaaatttcaaaagtcttatttaagttccttacttaactactttatcttaagtatatctaattgttttcttcctgatcatatataggcacgattctctaatactagtgggcggtggtagcggagttacacccttcatttccgtgatcagggaactcatatttcagagccaaaaccggagcacaaagctaccaaatgttctccttgtttgtgcctttaaaaattaccacgatcttgcatttttagacctaatcttcccttcagatatatcagtctcagacatttctaagctgaatctccgaattgaggcttatattacaagagaagacaagaagcccgagacaactgatgatcacaaacttcttcagacaaaatggttcaaaccgcagcctctagactctcctatctcacctgttcttggacccaacaacttcctttggctcggagttgtgatcttatcatcattcgtcatgtttctcttgctcatagggatcgtcacacgttactatatataccctgttgaccataacacaggatcgatctacaatttcacgtatagagtgctttgggtcatgttcctaggatgtgtgtgcattttcatctcgtcaagcataattttcttgtggcgcaagaaagaaaataaagaaggagataaggactccaagaagcaggtacagagcgtagagtttcagacacccacgtcttctccaggttcatggtttcacggccacgagagagagctcgagagcgtaccctatcaatctatagtacaagccacttcagtccacttcggctccaaacctaatctgaaaagtaagtaatctattaccacctagagtccacattatatcatcacttacataacaaaaatggtataaatgaatgtgcattcatgcatgaggctgatactttaagccttatcgttttgcagagattctatttgaggctgagggttcggaagacgttggggtgatggtttgcggaccaaaaaagatgagacatgaagttgcaaaaatatgttcatctggtttggctaagaaccttcactttgaggcaattagtttcaactggtgatctattccatgttctaactatatatgtttgcttttttttattatattcatcgtaataaccgttgatataagatggtttgcttttcaattatttttttcttcttttgttggtaaattgattattattactatgaagcttttctttgaaataaattttagtatgtctatttagttagaaatcttaagaagaataaactgaaactaaaataaaaagaagtaaccagaaatagctgatggagcttaccgaagatcctgatggagcaaagcagtatcaaggtaagtgagcttgaaccaaagtgcagatctattgctggagtcctctgatgaaaccatctctctgattcaaatgtagttatatatctcttctcgtacatttttagtaaccagaaagagttttgagccaaagcctgaagcctccctggatcgggaccatcttgtatcctttccaagctttccttgaaccacatggaaaagtttctcaatccttttgacgaattttgctactactagactaaaggccagttggttaagtacatgtatctctatctttaaatttatccagtagaaccagttaggaatgtatcattggccaaatgggctaggcccttaacgttttgaatcctaatatcctttttccaatgttaaaacacatcgctgactaattaagctcgaggactgccgactgtggatcatggtttggctggctacacttggcttaagacgggttagctcgaggactacgggtaattagcccgtcctaggccaggatctttcagcacatgataatatccctaaacaccactaagcctcatctaaacgggcaatggctgcaaattaattagttattttaaacaatggttggaggattctcaagccacactccttgtaattgtaaaatgttgttgtctcattagtttatattttttttgtttccaaaagccaagtgtattcacacgtacgatacagttgttttaatgcataaatctcattaatagacaataaccacttccgtaggttgagatttaaatatataaaaagttgtcgactactatgtatattatatactaatcggtatgtgtttttatataattagaaatataactaatcaagctagattgtactactgtactgctctttcaatataagtccactgtacttgagagttcgatcgaattgaaaatgtcaactgtacttacccttttcgatcttgaaggtcaactctattagataaagaagattctgttggtacattaagaaaactgtttctttgatttcttatcctgtaaaacataaattgatgtggctgaaaatgtgtatgtttaaatgcaactttcgattccaaaaaaatacttggatctgtgttccgaaataagccattaatctgagttagacaacctgctcattccatcaaacagatatggataacacaattttgctataaaaaacaatgctataaaaaatcgatgttagccgaaaacgatgtgctctctatttaatttctataatagaaaagcttttgcccaaaaaaaataaagtatactataacataattagtactttttttagtgtaaagataaattattagctaagaataagtttgtcctcaaagaaaaaagaagaagctaggaataagtaaagatgtagtacaggaaatgccaatttaacaacgcatgaatcatgcctttttgggcctctctctttgtagaatgtttctaaatctcaattcaaacgcatgaaaccctagttaaatatttttttattaaaaaacctagctaattttcttaaagtttgtttcaacatcaaatattccataatttactggttggtcataaaaaggctaaccatgtgggaaagtcaatccaataccaacgtgcatacatggcaaaagaaacaactattattaattaattcgagcaaaaaaataattaaataattaaaatcttaataattaagtattaaaataataataaaatttggtagaagactatggatgtatggaagtttggtttgcatcaagataaaatactaaagagaagtagaattattagaaatttgtatgctatttcttaaccttgaacttgatgtacaaacatttttttgaaaaaaacaatataaaaaaaatagattcggtaaagaaacctggtcaatcgaaagatgtttcaagcatttttctgattaactccaaccaatcttgaaagctagaatgaatattgtttttgaaaaaacgcttctttttatttataattttttaattaatataaatgatttatttatcaattttacccgtacaacgtattcgttacgaaccaatttctaactatcaaaatatctaacacaatttgtttaacaccaacagttgtgtagatcattcaatcactcaccaaaaactctaattctttttagcattctagatcttgaatctgcaaaacaactaatcggaaaatctaattctgaatctttgatctttcatttcctttgatgatatcatttcttttcagtcgcattagataacaatagacacgatatcaaatatgttcgaagtgcccaagctgcggatttaactaaaaaatctttctctatttttaaaggagtttggttgaccaagtgtttaggaacgttgtatcatatcttttgatttacaaatgtaaagaggttgtttttgggtccatagatgttttctaagagaccctttataactccttcttacaatattcttaacgattatttttttttttgaattacttaatatctcaagatgagatatgatttagaaaattctgcaaatggatgacatatagtggaatgattggaaaattttgagttgaacaaaacaaagttgaacatcattcaactcatccctctgtaaaatagtagatgaaagagttgaacaatttttttttataatttgtttattttttcaatttttggctgaatgggttgaatcaattttccaatatattcatttcaaatggtaaaaggtgagatgaatagtcattcaacattttcatttcaacctcttattatgttatcctgaactcagtatgtagatagatacttttcagattttttcacctatctttgcatctgctttgtaaaattgtcatctagaagagatggtggaaagtcactaggctagattgtgctatctttaggtccgagattctagcctcgttttctcctccccaaaattttaaaatttaaacctcaatacaatgaataaaaagataaattatgtgtacaatgactttggaaaaacataaaaaaaaaaaagacaatatggagttaaaagaaaaaaacttaaagtatctacatactcccacaatagtgtatagatatgcatacgaaacttcatatggaaaaggaaatattttgttaactagagatacttcaggctcactatccaactaatctaatgtattcgttgaatagtttactgtccaaattttctaacagatctaaaatgtgataccagtaactgaccaaccgaaaataaaaagttttccagtaaaaacgaaaaaaaaaaaaataatatacaccatgtccctaaactttttatccttaggaaaatggttagaaatctacatattcagaaacaaaatatacaaatacgatcaaatgcagaaagctttcaatttcataaaccgatgacccgatcaatgtttggctaattatttttctaaataaattttgatacaattcgcgggccacaaatttatgatatatgcgttatgtattttatattgtgtatatattctgctggcaattgggagataatctatatatataatagctaaccaggtttatgtgtttaggtttatgtgcttgctcacgactgttttttttcaataaaaaaacatcaacatccaacggtcaaaacataggcaggggaatccacaaacaaatcttagagcaactacattacataatagaaagaagatgtctttaacaatattaaaatattaaatttacaaaatattaataatcaaatatgaaggatatttaaattagagacatcctctcaaaaatgtctctatttagacatttaagacaatgtgtctttactttaaagacattcaaaaattaaaataatatttattttgaatatattatattttaagtgtaagaagacactcaacttatttgtgcaatggagttgctcttagcatacaacatttatataagactacgacattacccctcccttcagctataaatagcaaatcaagaaacttttccgcaattatacatcaatacattgtggataaatatataaacgagaaaaaatgggaaatatgagaagcttagtgaagacgttaatggtggttctatttcttggatggattttggtttggattatgatttcaactaatctttttaaaagcaaatggaccccgaaactctccaagtatctcaatactacttattttggccctcaaggtattaatttctcgatttaattatctcacattttaatattttgattcctttattttgagtattcaagaattatatcttgtatgtctaggcacgaatcttgtgcttctcacggttcccatgatgttcattgcggttctaagttgtgtttatttgcatatccagaagaaaccaacccaacctcaaaggtacaacttgttatacttttatttttattgacaacatgtaaatatttgcaataaattatcacaatcctatttatatgaatgcagagaatggaagctaaaaaggataatggggagggtgattatggtgatgaacccattggggatagtgacagccacggagttaactttttctctattgtttgttgctcttttggcttggtccctctacaattatctctaccttagctatcacgtccaccttcataacgacgacaacgcaaaaatgtaagcttctatttgttttctacttccatttgaaaatgatttatcaaaatatcacatggagataattcaacactatgttttatataaaagatatgaacatctcacttattactagatttgaattcgataagtcatcattttcacatggttacgctatagcggatgaaatagaccaaaaacaacggcgcattttttgcactgccattattagtatatcccatccatgcatagtaccaaaatatttacatccttaaaaaagaaacagatatttaaatccataggagaatttgattgaacattgattcaaatggtgcagatggcaggcaaagtttagggctttcggcctgagaataggatatgtgggcaacatctgttgggcctttttgttcttcccggtgacaagagcctctacgattctgccacttgtcgggttaacgtcagagtcaagtataaaatatcacatttggcttggacatgtctcaaatttttgcttcctcgttcacacagtcgttttccttatctactgggccatgatcaataagttgatggaggtccgtgttacatgcatctaccttaatcttatccttaaaacaaaacaaaacaaaactttcattctttcttttattccaactgatatttgtttttacgttttcttatatatgtgaagacgtttgcatggaatccaacatatgtgcctaatctggccggaacaatagcgatggtgattggaatagcgatgtgggtgacgagtttaccatcctttagacgaaagaagtttgagattttcttctacactcaccatctctacggtctctatatagtcttctacgtaatccacgtgggagactcgtggttctgcatgatcttgccaaacatctttctcttttttatagaccgatacttgagattcttacaatccaccaagagatccagacttgtgtctgctaggatcttaccttcagacaacctcgaactcactttctccaaaaccccaggtttataactagttcatccatttacgttgacattcaaatgttttgggtttataatctgaaagagaaatataatataaaattggattttaattaattatatactttgaatagtatttgcattttaatttgaactagagtgccacgttcaagagagagatgcatgcttcatgattgttgtaaccatttgttttactaactatagggctacattataccccaacaagcatattgtttctacatgtgccaagcatttcgaagattcaatggcatccatttactataacttcgagcagcaacttagagaaagatacattaagtgttgtaatcagaagacagggaagttggactcaaaagctttacacacatctctcttcttccattgattctctcgaagtttctactgagggtccgtatggccctaactcttttgatgtctcaaggtacaaaactcaaaggtgttatttcagtttcatacttaattactttatcttaagttagtctaattatattgtctccatcattttcgtcttatataggcataactctctaatactagtgagcggtggaagcggaattacacccttcatttcggttatcagagaactcatatctcagagccaaaacaagagcacaaagctaccagatgttcttcttgtttgttcttttaaacattaccatgatcttgcgtttttagacctaatcttcccactggatatgtcagcctctgacatttctaggctgaatctccgaattgaggcctatattacaagagaagacaagaagcccgagacaactgatgaccacagacttcttcaaacaaaatggtttaaaccgcagcctctagactctcctatctcacctgttcttggaccaaacaacttcctctggctcggagttgtgatcttatcatcattcgtcatgtttctcttgctcatagggatcgtcacacgttactatatataccctgttgaccataatacaggatccatctacaatttctcatatagagggctttgggacatgtttctaggaagtgcgtgcattttcatctcttccagtgtagttttcttatggcgcaagaaacagaacaaagaaggggataaggagttcaagaatcaggtacaaagcgtagagtttcagacacccacttcttctccaggttcatggttccacggccacgagagagagctcgagagtgttccctatcaatctatagtacaagccacttcagtccacttcggctccaaacctaatctgaaaagtaagtaatctattaccactatattcgacatgatagcatcacttacattacataaatggtgtaagtgaaattacatatgcatgaatctgatactttaaccttgtcgctttgcagagattctacttgaggctgagggttcagaagacgttggggtgatggtttgcggaccaagaaagatgagacatgaagttgcaaagatatgttcatctggtttggctaagaaccttcactttgaggcaattagtttcaactggtgatgtattccatgttctaactatgtgtgtttatattcatcgtaataacttttgatgttttagatggtttgctgtttgattttctatttttaatacaatttaaaatggaatgttaatgtatatgttatcctgcaccttcattattatcaatttctaatcatcattaatcctattgagcccattatagacttagtgagtgttttttctttgttaactttttttgcttttctctttcttcatttttctttcatattcattacttccttctgtttcatatcgtaagatatttaattttgggaaaaaattacataaatgtttacgtgtttgatttaaagtctatttgaccactaatctataccactttaaacttatatagtaaattaagtgaaatataattagattgcaattagatgaaataaaaatactgtaatgcgttaaaacatcttataaaattaaaacagatccaagtagtatagcaaaggtcacttttattctatagcacaagtccattttttaaccggtctatgtttagacttgtttgataaacataattattactagatgaggatactaggacttggagtagcgtaaacgagtagttcactatcatgctcatacttagccatgtcggtttcaggtagtgtaacccttgcctcaaccccttcactgtcctttgagtccattaacacgacctgcgtcttatcaactgaatctggggcaacccaaaccggcttcccccatccaaaattcgcctcgtaaaacgacattctgcaccagctagacacagcatatgtctccatctcaggacttatctcacacaacgaactcagcatcgcgcttgcgattctctctttggcttcaacgctactctttgcgtcttccgaatcgtttctgataagctcattcagctcctgtttagttttctgcagcttagacaccgtttcttcgatttccatcttactctctgagctttccttaagtaatggtaaaaagaagaagtttccaattgccttgtgcggcaagagagaggaagaaactctaggtcgcaagtccattgtctgtgttattgcaaattctttcaccttacccgactttgaatgccctgcttttgtcatgcatcttaacagcagcgccgtgatggactcaatacgggtagcttgtggtacacgtttgccacttgaagctctgtttttaagcttttcaatcatcaaagaaccaaagacaaacctctttgtcttagattttgtttcgtgtaccagtaatggaggaaactcgatagaaatatcagcaggagggtagaaatcggcccccacaaattcaggatcaactgtgtccgcatacccttttgaagcctttgtccagctgcaaacaaacgttgacaacgaggccgcatcgcatatcttgtgcgacacgctaactgcaaccgcaaatcctttgtctttaaagaagatgaccttgacgtgcaacaacggccatgtttctggatctgcatggtccggagagacaatgaacttttgaatcaaatcagcatctgatgggtttctcagaaaatccgagagaaatatttcagcccgtgcctcagtaaacaaagctccctcatcgttgcaatggacagtaactccatctttgatttgtccagcgagtggataaaaaagagacagagtctgagagagtgagcttttgagcctctggatgtcttcttggtttgagtgatcatcgtaaaagaaaatggcggaaacgtaagttgaaggaagaaactggtcgaagagagaaagagaaagggtttggagatgattaggtgaagcgggtttgattacttctttgcttaagagttctagcttcattttctcacttcgtctttttcaacaaaatattctaaataggtttgagagttgcacatatgggcactttgtgtatgcaaatatatagacatagatatatgaatctgacacgacatataggtcgacgatatcaacactatgttacagtgtactgttttagttagtggttaaatgatctggtaaatagtcaatgtttcgtacagaagcagtgactttttaagagcacaaacgaaaaatattgggcgtcttaatatatactgtacttatgttggtagctcaaaggacgagttgggcaccgctattttaaagaatttctttggaacttccgcctaatttattttacgatttgttgaatgttgaaattaaaaggttattacaagatgcttggtccgcaatatgcatgtacgtacattatatttctaaaaaggttttaagaaattcatgtagatagcattaagaaatttcaaataataatatctctttatttacgcatagtttttaaaatcaccaccactttcttaaatacaaattacctaccatatcctaaatgtaaagtataatgcctattaatatcactttatttacgcaaagtctcgtgggaattcgatttcattttcacccgttcccttcagattattaggggaaagcaaaagtcgatcctaccagattatgacgaattcaagccgtaaaaattgtgatagatggatttaccaaaacgatacgtagactgtatattttacatagcaatgtttatctacgaatgctatgcaaatttgttacataatgcattaatgttgtgtagattttacctaaaaaagtgtgcatttagctagctactagtataatggataaatacatataaagctcataaaacatgtacttatacaaaaatatcattataaaaacatggttgaggtataaccgtactttttgaagagcttggcgggaaatccaagtttgaggtttgtgaatgcaagaaacaccattatccaccttgattatatgtatgtgaccgtaatgaaagaaatcgagtcatacataataattcaaattcaaatggattcaccaacaaaagtacacaaacaatgatacaaaaaaaaaaaagtaactaccagaatacaaataaacatacaacataaataaaataactatccaaccatcattgaagtgaatcaattccatggattgggatagtcattctcaaatgggtatagtttcaatgagcaaagaaacaatgtgctccttcaagagcttggggttggtgtaagcatcttggtacctatagaatacatcgatgactcgcgaaaggttaagaactcgcatcaaaagagggaaaggaaacacgtgaggcctcattagctcttggttcaagtccttccatgcatctgaaacaatgtttcccatcacttccacagctctttccttggaaacaccaaattgctgcatataacaatcaatgccagtcgctacatgctcccgtttgtgttcaaactgcaattacaaataccaaatgtattcaacttgagaaatacgtatatatagtactaggactccaaaaacttgacgtgttcttacttcgtagcttgaaatgtcatctgtgaatcgacttattatctcagaagctaccctaattttaggatgtgagcttaaccattcaaaagcatcaagttttgcgacatctgtcattctcacgaatgtcatcgctatcaaggcataataacctgaagacaagattgcattctctttatactcatcaaatgtagcaatgtaatcctttttcaaccattttgcttcttgcatatatccatttgctgttttttgcaactgattgtgaagcgtacaagttagttttggatatatagagaaataatatgcttaaagttgattcttttggtcttaactgatttcttaagatggaaaccgcaccctgaccttccttctttctcaagttcctcgtcgagtttatcatagaattctaccgtcacattgtaaatgaacttcatgctatcgggtatcggtatctcatcaggaacaacgggaagccacctacgttagagagaagtcaaaaccatcaaaaaaaaaatcaaccttaccctttataatactccctaaattatatgttacaaatgctatactcatccattgcatcagtgaaaagctcaagttcctccattgtgccatatgcatcatacatatcatcaagcgctgtgaataagattagtgccatagtggttataactcgtgcttgagaatattgaggctcgaaatatgttccaagtgaccacaagtatgcctctgttatcctatgccttgtgtatgttactttagatttaaactccatttcatggtgccacctggaatgtaatgaaaagaatttcaacaatttatgcaagacaatatgtttatatatgttgagtggccatgatattatttgttaccttgtgacgcaagcaagctcttcgcggtgtaatatttgcagcaaattaaaatctatctttgcgaactcaagtaatgttgggtcgcacgactcttcctcctcgtagtatgagatatattgtcttgtttctatcctagagatgcctttatggtatggatgttttagagcattcttgatgcgaattgcgagatgagggctagaccgagacgaaatttcttctaaatgagaacgtgagaaagcgagagcttcgtcaataatgtcttctccgtgagtgccccattgtgcagcttcgtacaaacttaacatcccgtatgcatctgtcaccaagtgtcctttgaacttcccattttcgtccttgaacttctcaaacacatcttgagacgtaaaaataaaaattttggattaaataaaaaaccatgcaaaatgtgtagtgttgttcataattcatatattataagtatttttaccggcagaaagtttaaagccgaattgcctgaaaacttggaaaattattccaaccgtgtacaaatcgcatccctcttgtcttaccatctgaggaaaatcaagacaatcaaatgacttatccaattgttctacgatatctttctcaaagtgataggagacaccaaggcgacatagagcatcgatgaatttgatgttctctatcggattcgctttggaagacataaaagcttccttcaccgcctcctttagcgtactatgcttctctttgaacgtctcagttccctatatcgcaatggaatatatagtcacagagtaggctactaatattaaatactacatgacatgattcaatatgaaaaggatatacgtacgaggtcagactttgagaaagaagttaatggatcttcccagatatttgctggaaaatcagctagtggacggttgacttcactccccatgctaaaaatttctggtagaagtggttttctccaaaattaatcacttgtggttccacaaagctttgccgatacagctaagttccatacatatatatatagaattatagaaatattcgagaaaagaaaaaaaaaacattgcaataaagagtacaagatttttaggcgtgggactaatttccaccgtataaacagattagtggtctttctttcttggttttggtattacctatggatatcttaccgattagtatatttaggggaaaataacatttttaacctttaaattgttattggataacactttaaacttcgaaaaaatctcactaacagtataaaccatcgagataattttactaacctttaaacttgcaaacaaacttttcgggtttagatttctagattacttccatgttaaaactaacattatatccaaaaaaaaagaatcatcgacgtttcggtgttcgagttttttggtttaggtttctaggcctcattcgagtattttatatatttaagtcaggtttgggtatccaaaatattataaaaacaaataagaaattgtttaaattcgaaaaaactttagtttaagttttgataaatataactaatagtttggatattttggttattttgagtatttcagttattttgatttaaaaataactgatattttttattcataattgtatattgtatcattggattacatcaagtataaaataattaattttttatatatataattacgtttcggatatttcagatatttattagctcaaacttttatgaaactatgcatgtattacataccaagtacgtaatacaatcggtctccttttgcatgtgaacatagccaacagccctactgatgaaccttgaaaatatgtgtgtccatgcttcatgatttctctttgtccttgatgtaaacacctaatatatgggcattcggacaggttcctaatttttttggcaatacttctccacaaccttagatttatgaaattcatatgtcatcaagtactcaactcgttgaacacactctaaggcgacaaattgatggtaccatgagagaacgacccctccatcgacaactagtgaaggctaaaccaaaccattaggcacaatgtacaacaaaaaattcacggggttttcgtttgcatatttacatacattggattcttttaaaggtttattaacataaaggtgtacaacgactgatatcataagatcaaaacgaagaaattaaacaaaattaatcacatatagttcaaaaagcttgccaaaacgatggtacgtactactctaacatatagaactaaaggactcttttctgtatgaaaactaaaggagtctgtcacaatctagtcatgggataattatccccagtaaacctagtaattggtcgttctttttctccaacatatatttagtaggacgtaatatgacgcatcgtttgctatgagagttggtcgatgttctcggccacgggacgacattttttagagggtaaaattggaactttgcttgaaccaaaagacaaaacttggagattaataagagcatcatggtgataaatggaagctctttcataagattttctttgattaaattgaaaaaaaataatcaaaactgattaaaagaagagctggttctcttcagagagttttgagaatgagagagagagagaatctgacatgtgtcaacgtgtaattggttgcttaatattaacaaaagaagaaataaataaattgagttatatttttttctttacattacacggaatcgtcagttaatctcccattcccactccaaaatcaatcaattttaatcgcgattaatttaaattagaatcgtagtcggttttgtatatatcatggtccagtgaaaaacatagttgtcttgagatagatatgcttatgaggaatattttagccggtaagaacatctccaacaataggatccaaaaatgagaattcaaataagttttataattttaataatgaaaaataaataatttagacacttgaattagatttatagtattgcccaataataaaatccaaatatagagtctaaaaatttatatgtttgaaaaaatgtgtcaaaatgttttacatcacttgacacacaaactacataatttcatacacacaaatacacaaactataaaatttcaggaaactacataaagcaatgcttcgaaagcaagatataaagccaacacgtccagtctattgtctacgcgtatatattattgcccgcaaaaataaatattgggccatacgttcgaaatgagctatttcagagacatgaaccagtggttcagaaccacggttctcttgggaggtttggtacaattttactggtagaggtgctaatgccaacatcatttcagaaccatgtgagttttcaaataaatatcaaaactccttcattttgaggaactggttttgccggcgagacaattattttcctccatcgaactgttttttatattaagccattagcttcttcttttcttttttttctaacgtctgctttattgattaagaagaacaatgatcctcatggaggatgtttacaatgtattgaggtacatagaagaaagattcaaaagtagcatgatttggaaatggagcttttgcaattctatctgccgctttgttgttatgtcttcgcgtccaatggaattctgtacttaagaacttctgcttccatgcattgatctcacgaacccaattatggactttgaagttgcgcttttctccgttaactagttgtatagctgtgtgattgtccccttcgaagataatgtatctatgaccttttaaccatgcttgttgcatcgtcattactagcgcttgaagttccacttccagagttgtgaagcatctctgtccaatactgtgtcccgctgatagaaacgtaccattggaatagcgcatgatccatgctgcttgagaggggttgtcggtcgagtgaaacttacagtcaaagttacattttacatatccactcttcggtttttgccagtttgatagtaacggtcgtgttctcgtggtcgtaatgctgtttctcggattgtctaaccagcagtccacccattctctcgcttcttgctctgccttgatgatatcttcctgccagttcccatccttgtgttgataaactaggaggtttctgctcttccaaattctccacagtagccaaagaggtaattgtcggtctatctcagagaggtaatgattgttgtaacactcaatgatggctctgaatttttccgtgaacgttccaaatgggttaaagttactcctttgtagtccaacattgtgcctccatatgtcacgaacatagttacagtcgaagaatagatgttcaattgactcttccgctatgccacatcgtttacattgtgaattggtgatgatattccttctcgcaagaatggtacctgctgccaacgcattagacaagattctccacatgaagtgttggatttttggagctgtcttcattttccatatggccgctttgaactcgtgtagtcccggaggtggaatgatattcgtttcgtttcctggaaggtgagttgcgagccaatatccagatttcacagtataaaatcccgaatcgttgtagtgccatcctagtaagtccggtgaatttgtagggctaagtttgatgttgaggattgtgtgaatgtcttcaggtatcactgtttctctcaaccgatcaagattccatccgttcctttgttcgttcatcaagtcgcacacaaggtagtgattttccggtgttcccgccaatcgatttggtggtctcggtggatgcaacggtagccatgggtctagccaagcacttgtgttttgaccatttccaattagatacttcaaaccattcttcagtagttctcttccttccagcaatgatttccaaataaaagaagccttgtatcctggtccagcgttcaaaatattggtgttgggaaaataccttgcctttagtagctttgagaggagactgtttggtgattgaagtatcctccatacttgtttccctaacagtgctaaattgaacttctcaatatctttaaatccaagacccccttcattttttggtaagctcatcctcttccaggaaatccaatgcattgctcttctatcacggcttttactccaccaatattgtgccaatataccatttatttcatcgcacgttccttttggtaacttgaaaacgttcatcgtgtagaccggtaaggcaattgctatagttttgagcagtatttctttgccaccttctgaaagaaacttgtgtgaccaattttgtgttctctgcttgactttgtccacgacataactgaagatctcctttttcctgcttccaatttgttcaggcaatccgagatacttcccacctccaccatcattatggatattaagtatgcgacgcaatcttgttttcacatgttgctttactctcgattcaaaagtgattgccgatttgttcagattcaccgcttgacctgagacctgctcgtactcgtgaagaatactcataatagtattgcatgacttttggtgtgcatgacaaaagaatagagcatcatctgcgaacagcaaatgattaatgacaggtcctgtagtacttattttcatccctttcaatctattcaaatcttctgccttggtgagtaggttactcagaacttctgcacacagtataaagaggtatggtgataacggatcaccttggcggattcctcgctctggctttatcattcctctaggagaaccattcactagaactgagaagctgactgattccacacattgcattacccaatttatccaaatcgagtcaaaccccatattctgcattgtttctcgtagaaaggcccactccaatctgtcataagcctttgtgatgtccgtcttaaccgtcatataggaattagcccaacgtttccttttttcagtgagtgaagcatctcatttgcaatgatgacattgtccataatgttcctccctcctataaaagctgcttgattttctgaaattatagatggcaggtggtgtttcaagcgttcgacaaggattttggagattattttgtagctcacattgcataaagcaattggcctaaagtctactatcgctgaagagacatctttctatggaatgaggcagatgttggtgtggttcattgattcgcgcatgttaccctctcggaaaaaacgttggatttcaacaatgactgcatctttcacatctggccaaaattgttggtaaaatgctgcagtgattccatctagtccaggcgctctatccggcccaatatcaaacacagccttttgaatttcttcttcattcaccattctttggaggtccatattcatttgatttgtcactttcccctgtagaccttggaagacgcttgtgttatctctaaattcatctcttgtggacttgaacagatttgtaaagtactcttctgcagcttcaccaatttcatcatctcctctatatatgtttccagcatcatctgtcactgctaaaactctgtttctagcaagtctttgctttgttgcaccatagaagtatttagtgtttctgtctcccaacttgacccaattcttcctgcttttgattttccagaattgttcttcatccttataagcttgattcaggcctagagtgatttcatgaatttcctctgtagatcgatttccatatgtataagcgtcgttaaggtctcttttgagcattgcaatccgaattgaagcattgagacgattacgacgtttccacgcggccatttgctttctactttgacgaatcctggaatttagcgtcatgctagtgttgtcagcttcccaactctccaagatcatgtctctgaatccttctttgtgaaacaggcgactgtcatatcgaaattggtttcttctctggtcaaccgtgttgcaaaaattggtaaccaatggtcggtgatctgatccttcaaaatccagaaattttgtctgtgcagaaggaaataatgtcatccagtctgaattcgccatggtacgatcaagacagcaccaaatgttatgtgagtaacgctttcctgtccaggagaacttgttgccaatgaactttaaatcatggacgtcacaattggttatcatgcggttgaagtcttcaaatgatcgattaggtcgtcgtggtcctccatttttctcttcattgtttttgatttcgttgaagtcgcctaacgttagccaaggatcacttctggatgaagagattctttctagggattcccatacttcatttcgcatactaggatttggatgaccatacaccaccgacaaatagaaactgattccattgaattcaacttgcgtatctacaaggtttgctgaaagtgaaagaactgaaactgaaacagaagttttccaaagaacagcaattccaccactcataccatgtggtggaactgttacaaagttagaataaccaagatctgaagttatttccttgattttctcatccctttgttttgttttcagtaggcatatcatgtccgggagatacctcctttgtatctccttgaggcgtcgaactgtaaggtctatgccgagaccttgacagttccagcagattgtaatcatggagcaagtggtggtatagggcccaccgcgcctctgcacttggtgttcctgccggaggaacagcttccttcacctgcttcctttgtcacgattccttcagtctccttcacctcagattgaactagatcatcatctcgcttgcgtttacctctctccatagcaattgcagactgacgctcacgagatgcatccatgttggacgaatcaggctggatgattgcagagaagcgtcggtaggatggattccctggaatgtctcctgtagcattctcaaagataggaataggattaaatagctcactcatattcctttcctctttgaaaattgagtaggctccatggggttcatcaagttcatcaccggttggtagttcattgcgcaggggagtgttgtcctccatagcttctgcattctcaggaatttcaacatttggtactatttcgcagcatccccgttctcttcatcatcagcaatctccctaatgatcactccatgattttgattgattgcaggagggagagcagcatcctcattgtcatcatctgagagatcctcgccaccaccattctgaataaggcaggctcctgaatcgtgagtaagcatcccacatacctcgcaaaatccccttagtctttcaaaccggaatcgtaagagagtattcacgttggcctcaaattgaaaatttcgctggaaccgaagaggatcttcgatgttccagttaacctgaacccgaacataatccacacgagccgctgtctctagaccgaagtcaacctccatcaagtttccaagagccctcccaacatgtgcaatgacttcacgagtgagatagtgataagggatgccccttatctgtatccaaaaaggtatgaaattgatgagcggttgatttgtagggaaccaccgctggagtatcaacatacggtcattgaacgcccatggtcctcgccgcatcaccgtatccaaggattcttcagatgggaagataaattgaaattgattccccgaaattagccgtccatggaccagccctgactgaccccagattctcggcattgaagccacaatcgatcgaatgttttgtctccttggcatcaccggccgtcccatcaaaatgaaacggttctctgcaaccgcttgtgccacgatctctgccggaagagcaaatggagcgtcgtctacattagctaaaaatcaataaactaggtaaattccaggcgagatattttttatttttaatccaaaaaattacataagagatggacattaatttatcattggttcctccctctgtctttcttcacagcgtgtgtcgcccatctactattattttccattgactctaaagagttcatctggatcattagtgactcataagctcttgtggatagatagaatgtaatattttgtgttgtggattgttagttgagtagagatagtaaattttgatttctagaatcatttttagctatcaattaaagatcatgaaaaatttcttacctgaacatccgtgcagtgagcaaagctctttaaaaaataaggctttaaactcaagcgcttagatttgtgtggatgcatgtgaa

SEQ ID NO: 733 - DNA, 15871 bp, Arabidopsis thaliana
ggagtagcaaaaggattaggtcacatacatacacaaaacctcgcacatggaaacatcaaatcttctaacgtcttcatgaactcggaaggatatgggtgtatatcggaagccggtttacctctgttaaccaacccggttgtgagggcagattcatcagccagatcggtactacgttaccgtgcgccagaagtaaccgacacgaggagatctacgccagaatcagacatatacagttttggaatattgatgctggagactctaaccggaagatcgattatggatgatagaaaggaagggatagatctagtggtatgggtgaatgacgttatttcaaaacaatggacaggtgaagtgtttgatttggagcttgtgaaaactcctaacgttgaagcaaagttgcttcagatgttgcagttaggaacaagttgtacggctatggttccggcaaagagaccggatatggtgaaagtggttgagactttggaagagattgagagagactgattaataaattgtagaatttttattttacgggttttggcatttatgatttataattatgtcagtggcagatatataaattttagctccatttctttacatttagataatttacaaactaaaacggtgtttagcatttagatgtagcataggaggacttaattactcaatcattaatataattccgtaagttttataatcttgaacatttaaacattgactctattgatagaatttatttgtaggttttgaaatggttttgttgaagtttggattttatcttttataatgttgaaaaatgaaaacaaatgtggtttcgtattattgaaacaaatatattatgaattttaacaacacaaaatctaagattatgaaggtaaaatagtacaaattggtataattacgaatttacatggccgtgataaattctaaaattagtatgcaactaccgaaaacaaaaaggaacaattatgtttttggattaatggcaataatagggagaataatgtgtccaagctggacacaagaagctaaaaaacagcctaataacctctcttttcgactacacacaatttgaaacaatagcagttttttcacattcacaagtttcgatttccatttccaaaagcatcaattattgtggggcaaaaatgagttgttccgagatatgcgggtcgaccataaagtagaaaataattgttcaataaaatgccaaaagaatctctcattattctcattacctcatctatcgctctgcctagcttttcttttgatttcttctttttcattttcctctcttctttgttcttccctctctaaaatccttctcccaaaaatcaaggagttgagagagggaagaactttaacaaaagaatttaagaactgaagaaggaggaataaacatcgaaatgtcgggctcgaggcttttcttcggagtttctacaattgtatcgataattttcgccattttgttgccgatggcacatgctcaatccgcagctcctgctccggctccaacaagcgacggtgagttgatataattatcatcaatggttaactacagaggtttcttgaaaattttcagatgtgtgaatatcttaaatgtctctatacatgcatgctcacaaaattatctagttaatctatgccttttgtcataagatataataaaagagtagttaattagttatctcttaaccaatgaatatgtagttctactctctaatgctttagataaaacaatgccatgtccataagattcggatttctctagtaattaactggaaatgttatatcaaataaccataaagctgtaacgtaaaattgctgatttctttattagatattacaattatatctgttcggatggttaattatggaacaacatattgcaggaacaacgatagaccaaggcatagcatatgtccttatgttggtggctttggtcctcacatatctcatccattgatcctcttgttaatttaattttggtctctatttagtttaattatatttttgcatcttgattataactaaatagagaccagaaaagtttatctgtctgtggtagagaaattaaagaggttttctaatttttgaaggatacatttttgaagttcatttgtataaagtcgatgtgcgttcaactgttggaaatatatttcatcgaattacatttcattatcacatctttcttattcatattcattactaccttacagaacattttttttaataccgacaagatgcattatactggattttaatccaaattgcgacacatcaataacgataatacaaaccactatgctactggtcagatgatatttttaaaatttgacaattttaaatagaaacttaaaactataaaaccattgtaaaaagttatggaatcgcttagtgaaaatctaacataggccgatgattaattgtatagctaaaagaagactcaaatttgcaatataagaactcgaatgtgttacaacaacataaggcaaaaagtaaaaaccatggactataagctagataacaaggatcatacctacgagtacaaatccatttatttcaacatagacctgaaaataagccttctgtaataagacaattgataaacatgattagaaaaaaaactcggatatttgaataggaaattgattagctattatgaaaactctctctttaatcaagaggtcatgtaaaaagttccgtccctcccttaagtagataactaagaatagaacccaccaaatcctccatatggatgatttggatcatagctttcaaacggggattccaaagggacggtggacggagagtttgatgctgagtgagaagccgagccagatgctggaaaattgtagttgatactagttcctagatcactagagaagctcgtagatccaaaatattcgatgttttgatctcgcatttgaagcatataggcattgttattctctagatttggggtagatgacaatggatagtgaaggttgtgatgcaaatgtgcttggtgattgtagttgtctacactttcctttaccatgtcaagatttccgtgttcttgggtctggttcggttcgaggttttgtatcggcattgttgtaccgacatttgcagcttgagagcaagaatgtattcctcggtaactgatctcaaggagcatctgattttcatcagatctttggacttgtttagtggcttcacatccttgagactttctatacgtgcatctatagtatcctctgtacccaaaaatagacatacagtattagttgaactttcttttctcgtataccattaagatttttacatacatgtttttttgaaaaaactataaaattttataaagcgaaaattgtcgtaaatgtgatcaaacagagcactatgccttgtatgaagggctaaaatgacaaaaaaaaattattttcctaaatagttatttattagtttaaatgacgagactaaccttggaaatttggctccgagaatatccttctggccgtactttctccaactgaatccatcgtccagcgttctatcaacaccagctccaggggcaattctgacttttgaactccaccttggcattgacttcttcgaactatagtacattttcaaataactatgagtttatgagaaataaaacaaaaatacgttaggacagtttatagatatgaatgtacctcttgatgacaagtggttcttgatcggaatcatcgctcttggggcttcctccaccctgagaaacttggtcaagttcgccggagtagttcatgatggtgagagacttgtggtaagattgaagaatctttttggctaaatgttcacgtgtttcttgagatgaagctgatccaaactggtgtgcatagtctcttccttctatcattagctcgttgatctcgttcttcatcttctcccactctccactactatggttcttctccattacgttcaaagagtggagaataagattaaagtggtgtaaatagtttaaagtattgttactatgtttatttttgcatggcttctggaaactgagaaagaggagaatttaaagaggatgtgtgagagagatagtttgactttttgactgaagaacgaagaaagctgatgtggtttgtgagaagtgagaccagtctttggtcaatgaatttggaaagtccaacatgctgaccagttctctgcttctcgatcctttttatttttgatttattggattttgaattacatgatctggttttgttttaatattagggtcacaatcatttaacttacattcgtaatattaatttgttaataactattcattcttattaggatatgattttctattgtaaattttaattttgctataaaattctaatattgagtttagaaattccaagagacaaatatggtcattatgttggaatattcattttgttttggatcaagtttaattatcgatccatttatggaaccaaattcaatacaagatagcatttctagagtttctataaaagtgtttaagataactgtagacaataaggagtgacaattgatcacctagtgtcaataatcaatatataacccataatcgacgtttagacaatctaggcgtttaaaaagtttatgagactaaacaatatacattagaaaaatatagtataacatatgaaatttcataatatatataataaataaattcgtcatatataaatcttaaaatagattcaaaatcaaactctaacaaaaaaaaaatagaaatgccaaagcaaaagctagaaacataacactaaatgcagatgtaaaagctaacgacaatgcaaataataataatgctaaatacaaacgcaaactctaataaacgcaaactacatagaaattccagcggggcaaaattatttgccatttcatattagaataaatatacttttcgagaacatatgaaaataaattttaactttttttttgttcttacttcaaaagaaaattttaggtatacacctttttgtatgaaaatatttttagatatggctttgccttgggcttgaacacttatgcggtacggttatgcctattcttttgtactgcctcttgttggaactcatttttacatatgtggttccggtcaatttttcggcgactttttcggtgatgtctgttaccgaaatgaccggattatgaagtctttggatttcttgtaatcagcactataagatagtgtagttacatgtaaaaattaaagttattatgaatgaataattgagatctaaagtggttagcttgaaagcttacaataacagatattgatatttgtccaacataggaagtttgaagatatctcctctagtatataaagtattatccatttaacatgtttcattagttattggtaagggacactatagtgtaggagatgcaagtcttttatgcaacaacacacgagcgccgccgccgccgccgtgccgtgccgagccgggcttgggcttgggctcttggggaataaggcccacatagtttttggtccaaaaacgaaagcccatatcgtttgcataattaagatatattcggaatattaaaagcatatccgaatattccttatttgaattaattcgaatttaagtggttgtgataatggctctgctaatcacgccaacgtcttggacttgcgcatcactctgaatcacgcgatctccgccttgatttgcgtatcgcatatctcacctctccctcgatttgcgaatcgcatatctcacctctctcctataaaaggaacacctcttcctctcattctcttcactcgtttttcgctacaagataaacgaaactctcttcctctctctctttcttttcaaagtaagtcaagagtatatcgtttatttcaagttcgcagattccgctatcgagtgttgcgataccggtcttatagtgattgtatcctgcgatctgctgctcataaaaccgtcacactgagggagctagtttggattacggaaaaatatcaaattttgccttcactcgttttcgaaaaccgtctttcctaatcattttataaagatttttgatttattgcaaatcaagatttcgcggtcttacacctctactctaaatgcaaaactttaaaccaaaacgtttgagatttgacataaacgctaaaaaactaacttaaaaaatatttttaaacacaaaacaaacaaaaaaacgttgatacaaaatacaaacggtagtaccctaccgcactctaaatataaacgctaacctgaaaaaaagatgtcacataacatgttaatgatgtccattcagtgacatattgacatcacagtaattataaagaaaaaaaaatcaaagtaattggaagtgtgactaagattttgtgataataatggcttgaccattctctagtgtcagccactgaaaattctttttatcaaaaattacgtgctaaaaggatacacctaaatattaaattcacatttagtaatataggttttcttcagtattcaccatgactaagataattcaactttgaggatattaattagaaccatagatacatataaaccaatcatgatctatttgaatacggcagaaaatttatgattagacaagggcaacgaagtcgttgccgtgtaatcgacttcacgaaggcgagaatcaacggtgtaacattcctgttcaactcttttaagaatctttagccccgctcttaaccggttttaagcaatttaaagttcaattaaccggactcaacattggttgaatttcacaccggttcagtgttcctgcaatattgttgagtaaaatatcctaaaattagtaaattactatacaaacccgtctattgattccattttcttaggaatcactacgttcaattttgtgaagataatgcataacatatctcaaactttacatgtataacttttcagtatgagtatactaatgatataatacaacgattgcgattcactgatcgatttaacgcagctataagtaactccgctattacatacacaactatacaacggttataagagggtgtgaagtatctcgtaaagtcgggaaatcataccaagtatgcacaaatggttgagtgaggcggctcagttcggttcggtttggttttagacgatgtattgacgaaggtaatcaactctggcctgatgcttaagcttcatcaaggccttgacttcatgtttcctaaccatttctctagagatgttgagatttccagctatctctcctagagtcctgtcgccttttccatcaagaccgtacctctgtcgaataaccagactctctttcggcttcaatgaatcgagctgaaaatgaaatgtgatcatttttcagtattcacatagacaaacaagctaaaactgataaagatgagccaattgactaaccacatcgtcgagagcgagcctgagaagagcaggctgtctgctgttattagctccaacaccatcaacatctgtgattccgttgatgaattcttcttgagtaaccgaatgttttgaatttagtgacaaaaccggttttgcagccctcaatacttcacggtatctctcaggtgttatcttgagtctctcaactacctcgtcctccgttggaggtcttcccatctcaaaccatagctcagtctttgctttatatatctccactctaacctgaatggtttcaacaaagaggaaatatgtaagatctctgcaaaaacaaactatttttgaaaaagagccaaagagggtaggtaacaaaccgattcaagtccaaatgggacacgagtgaagtttgaagttgtcattgaccgtatgatggcatgtctaatccaaaacaaaccataagtcgaaagacgaaacttccttttcggctcaaagcggtcaattgctgtgataagccctctcatacccgcttgacaaaggtcttggaattttggtccgttggtaaactcatgaaagtatttgttcataacaaacaagacaagccggagattgtgctgcaacatagaaggaaaaaacacacacaataagttcaaagagttatcaccataacaaatagcctttataagcaaatgtaatggtacaaatcttttgacacactcaccttaataagtttgtttcttgcagctctacctatttcgattttcttttttacttcacccgcagtcatattgatctccccggctatttcagcttccctaggctctcttcccaagctcttttgcaatacatctttcacttcaagaagagcctacaatgttaaagccccaaacaacttgagcatgtattgcaatgaaaatccgattccagcttcctagtgaatcatcatctatctatagaatacatactaatttcaagaaaagagaagaataccttcataggttgcatcaacttgaacaaccaagcatgttcagtagaagaaagaacaggaggtatcttcatttttttccagtccaagctcactatatcattagaagctgaatagtcccgcacaagcctctcgatcttctcctcttcttgctgcctctttgttactttcttatcaacagaagcaacgactggtttctcttgaacgtttctcttcaaagcaatccgtttatcaagactcatacgtttttccttcttcacattattcctcacaaccactttcttctcctcaccactttctttcctttttctcctccgtgaaactttggctttagagccgccatcttcaacatcatcctcgactaatgtggttgttgcaggactaagcttgtatatgctttcaagtcttgcagcagcttcattgtaatctactcctaacgaacacgaaggagccgaattatgttccaaggaaagcggttttttcggggttttacaaggctttctcctcgttacttctctcttcttctcattatgcttttcagcaggaatcaaaacttgctcacgaggaggaatgatcaaagctgaattgctggaatcatcggctttaaaagcaacaatggatggctttttaagtgaagaccgatgtgtcaaaagatcgttgcccaacccgagtggagatcttgcagctgaacttgaaatagacacaactcccatcacaatcttaaggctcaaaaattgaatctttctcaaagctagctcacttgtgctgcaagcagaaacatatctcatataagtataaaaaatgtctcaggttgttgacaataacttgcatcaattttactacagaacactgatctgaatctaactttagcagatataactaacttactctaatatgaacactgagaggaaccaaaatgaaagattgaaactttcaatcaaagattcaacatttcaacatgaaactgaaaaatttaagagcgatcgggaaaacccaaaattcagattcctttgaataacagagaattcaaatgcaaagtcgaaatctttcgtgagcaacaactgatcataaattgaatgaaattttacacagaaagatctaatcaagacgaagttaatgttcgaaatcgcttttggcgtacctttgtaagtatcgcggagagaatttttttgttcgagcaagagaatcttcgttcgattttagattctggttcacgaattttaaatagaagtagagaaaaataaaaattggagtggaatacgaaaatatgtgtcgcaatgaactacgtaaattatggtgtccacagattaataacaatgtgacgccgtattttcctggaatctgtttataaacccccaaaagaatttattaatcaatttaaaccccttttctagctagacaatacgtttccgaactaccctcttccttgttattgatctgtacctagcataagtgcatcctcatcccacaactctataagcgttttttaaacattaactagtattaaaattgaagacactcttttgtcatgtgtgtctttaaaacattcgtatcacaaaaaataagaatttttaacattagatataataaaagttaagaaaaaacagagtgaataagagaaactatctattttgaaagacatattttgcttatttgagacattttacatgtcagcattaatattaaattatatttaaagatactttataaaatttactgatgtgaatggttttaatgtttctaaaaaaatacaaatctaaaattaaagacacttttcattttattactatttttttaaaagagttttatacttaaacgacactaactaataaatgatcaacatgtaaggtctaactaatttgatgggtgtgttaacttgttggctaccatcacaccatgtaaagcatccgagcttgagagattacattattaaattcattttttttgagtttaagttattaactataggttttaccactactgcttgaatacttttgggaaacatgttcattttttattattgggttgcatgatgttattaaaaatcgaatatatgttccaacatttagtgtgaactatatatttacttgattttttgtcaacttttattgtctaaattattttataattgaaaatttaaaattaatcaacacatctatcgtatttattgattagattacattttttgtcaaaatttactttagtcttttttcaatcatggtttaattcgtttttaaagaaagtttacgtaaatgtaagagtaaatctaaatgtatttagctatatgtgcaaataactcaaagataagagtaaaagatgtaaataaactaaactataagtttggaatctcaggaagatccaacggccaacaaggctttaaacaaaaaccaacggttgcgagaatgcacaagcggagatggcgagagagagacgacgtggccaatttatagtggaggagaagatatttcaaaagggtcaaggcttgtggttgtggatcaggaattatacacgtggatggtcttctcagcaacagtcggacccaaaacaaataaagtggtggctcgagaagcgtttacgtagcctattataaaccgattaacatattttttgagcttttgaaagtcaaatattgtaatcctaaaccaattgtttagataatttttatttctatttgcgtttttccggcttttggtatatcgcaagagtcggagttacatagttgaagaaatgttaatggcgttattaatttattttagatcacatcaaatttttaaatatatgaaatctatatttttaagtatttaaaacatagtaatttgcagatgtcaaaatttagtaaacacaagatcttaataaatagtttaaatcagacttgaataaccataaattatgtttagatttatattttatttaaacataatttatggtcatgatccattaacatcttaaacttttttactttttacttttgagtcctgtaagattgcctacgattggcccaacaagaagcccaaattcaaaatagtatctggaggataaaacgacaacgtctggtacgaaagtcagctattttccacaatctgccacgttccactttcctaatcgaagaacgccatgcacaaagccacgtaaagctctctctttctctctgagtctctcccagatctctctctctctctcagtctctctctaaacgcataatcttacaataaaatggtgaaactcgcgacggcgcgtgagattagaacgtacggccctcggcttgggaggagcagagccgagtacatcaacgcaggtctatacttgtttgcaaccgtggtgctcatcggcggtttcacagcgacaggattctcatgggaaccaagatccggcctcgtccttattctcttagctctcgttcttataaccgccgtgaatgttcatgatcttgtggctcatctagctggaatcgattaccggtaaatgatctcaagaagcttgcttaatttagtaacattattattagtaatcttaatagttaaatttaccataatttgtaagctcaaatgtgtctacgtgtgatatatataactttatattcaccaatgtgggggattaagaaaaacgttttagtaataagcttattgtttatgtgatttaaggttaaggttaatggagtatgatttgcaactggggctagtggaatttgcagtccctctggttcagatagcgggttcggtagtgtttttcttgggaatctttttcgtcttccatcaggtataacactttttttttttgttgacattataacacttttattgttgtaacaaagtttcctggttcatcaaatttcacatatatgctttacgtattagtctatgagagataagagaactaaattggttatgtctcggtgatatcacattaatttataacaattatagcaagtgtttgaagataaagctaagtacttgtggcatattaatatgaatatatgatattgtccataatgttagttgtggacttgtggtccatgtaaacataagtaatagagtaaaatgttgtgaataacaacttttgatgtgtgtctgactaattatatgtagtcacattccgctgtattttttttctggagtatttaggctgagacaaaacgtggatacagtggaagagagcatcatgcattaaacttgctgatagcgggtccgttactttggttgataggatcgattcacaactcatgccaaatctacgagagagcggatagtcatgttcaaattctacagcagtgtgtttacattcctttcttggttggatcccttctattcttggtttccgcagttctcaatagcctcgacatatccgggtcatctcgtagtggattgaagcttcttgtaagtacttggaaaccaaatttatcgcataaaaagtggttttcaaaatccgcttcttacggtaaataatgaattttcagggggaaagatggatttggcttgggatttccggggctatatgtttgtttgtgggaggattgctgaacgttgttaaggtttttaacttcgtccagatctctgggctccgcctcgagaaactacggggtggagctcaagaccgacttcttgaagggagagaaggatatctccctcttgttgctgaagaagaaagaataaggaaaatggaagctgatcacgaagcttctagtagagccaaaccccgggcacacacaacctccaaagccggagagggagctacagagaccgtggtggtatcatctccgacaccatacaaggatgttctcgttggacagatctgaggaagattagtcatgtttaaatgttcttttgtactccatatttgtttttagctgcggagaccacatattttgccgttcaacatatgttatgtgattcgtttcctttttggtcagtctttatgaatattgaaataggttacaatacatcaagactttagaagaagatttgtacactagaagaatattgatcttctttatgaataatgaaatagggtctttatacctatttctatttgacgatagagattgaacttgagatgatcatagaagataagagtaaaatggatgcatggtatagaaggctagaaattgagatgcagatcagccatgcacgtaccatgcattgaaccggattagagaaacttggttaaattccctgtttcacattggtttagcagagatggtcctgcctagggcaaataagattaacaatttggttgtagtcagaaactgagaaatgtaaaattgtgcgacactaaaatcagcagagaaactggactaaacattagaaaatttcataagcagaaaatcaagaatcaataaatagaatataacaaattagcatgtaacatatccatgtttgttttcaacacaattcagtagagcttaaccataggctcaacttcatatacacacaattatttatttggttgtagaaagttaactgtttgagttgttatttttcatctccgaataaaacagtcttcgtgttatggattgatcaaacagtggttgtggcgatatagttccttcgataagcagctgcgtttgttggaatcaacatttccttgaatccttcatccactaaatgtgcacccaacatttgcaaagcccactgttgattcacatagtaaaagtcatcataagaaacatgtttttataatttaacaacaaaaaaagagtttataaccgttaagaaggtagaaattgtgttagatagccaagaaaatagaaaggcttacggcaagaattctgaggctatgccaaaagcgacgaggcgaaggaaacggagagagcaagtggcccatggacgtaagggtgatggctacaagatgaaggactagagtaagagggtgagggttcatgcctccgagaatagtcatcaatccccttgttttaaaatctccacgagctaggtaattgaagcagccttgtcgcattccctctcttgcttcgtctgttgtagcaacaagcacttgtgaaaagatactcgcgagcgtgttcacggtcgctgacattggcttttgccatccaaaatcaatacaaatagaaagtaagagtcataccactagtccaacacaacttgataatagtatatatgacattctagcatacataaatatccgagtcactccatttaattaaaccaaaacccctagtaaaaaactaagtaatccataactcaccttgcggatgatgtaaaaggacttgacaagatcagagactttcttagtattgctgaggttaggcaatggtttgagaagattgcgtagaatgcaaatgtccgagagtgcaaccatcattcctgacgcgattataggatgacgcatattgaatgcatctcccaacacaatcactcctcttttatcacacaatctcgatgacatacttttcgtcgctgttgattttatctctggtaatccttcctctatgcctttcaaaaatatctcccgaagatttccagtttcaggtatctacaaaaccaaagggatcaatgatataaacaaagtcatttgagcatagtaataccacttgaaatcaaaataataccatttcaacaccatgaaaatgtttaaacacaccttaaaacttttacttagactatcaatagtttgctacgtacctgaggagccattgatttcttgaggaaggtagacatttcaccattcgatatagaaggaatactatcagcgggaacttcggcaacacaacgaacttcatcactggttatttgatatataacacaaaccaaaggtttagaaaatatcaaatgtagactatggggatcttcaagtcggctattcttcgtgacgtaacccaccatgtacgagaggacttcctcctgtgtaaataaatatatgattataatccttaaactcagtagttaagtcgagaccaatcttttttttatagtttatagcgaagaataaaagtcgacaatgtttaaaagataactatgtactcacagtattatccacgagtgaccgacgaaggttcgaataacaaccatcgcatacgacagtaagaggtgcaaaggccgttatttcttcgcctgcgctatttttgtatgtcactcctttgaccactccttcttcttcaattaaagacttcactgttccttcttctaattgaacactgccaaggttcattgcatttatattaagaagatgaaatagaaatctagtatataagagtcgtaagattattttactcataagttataaaaagtattacgaaagaaaagaagtaaaatatgtacgtacttgctaagagaagctgctttttggcgtaaacgttgtaccagccgaccattacgtaagagtctacctactggctcatgaggaaaactcttgtcatctggaaaaggcaatgtcgcgtgttttccatccttgtatattgccaaggacttcgcttcttgtgcgtctatgtcctccaaacaatcttgtacatataaaaacccaaaatcgcaaaacgtatgtttatatgcatatatgtgcttgtggcaaaaagatc

SEQ ID NO: 734 - DNA, 45878 bp, Arabidopsis thaliana
aagcaatgtgtagcaataaatttaaagatgaagtgaagagagagaccttcgaggccaagctgggctaacatgaagcgacctcccgcttgcatcagctctcccatgaatctttgtggctcttttaagtccctctctatcacatgtactcgtcgtccatcctgcatccgcattcaagttaatttcacatattgagtaactaatagggaatatatagaaaacaacatttctgtaaataatcgtcaaaactaatacttataatgcaaattatcagattttgtttttgcttgcatccatatttttctcttccttttttttgatgaagaaaaaaataaagtgttgacaacccatcttgaaatctatttttcatatatttttttaaaaatttttttttccattttatctactttttatatttttaatgtttaaaaaaaaaaaatcagcctgctaccaattcttttataaatttaatgttggacccacattttttaagaaacactttttaccatgttcattgctttaatttatttcattatattcgtaccaatgaagatcgagcactagttttgataaataacttttttattgacataacttttttcattgactatctgataacggttaaagatctatctctaaactcattacaacggttaagataattcaacctatttgaagtttgataattattacacccccctgaaccatactaattagccaatgcaacacaaaaagaagtatcgcctttgattaacgaagctacgcaaaacacataaaaaaactaccaaaattctagtgtaatcagctatgtaggattcagaacatcgacaaaatttgaactctaattaatcatctttaccgcgcgaccactgaattcagcggatcttaatttcttaccgaccaacttatgcaaaagatataccttagctaaagcataagcaagagaagcgcctgcaacacccgccccaacaatgatgacatccgttgcaccatctcttcttgcttctgcctcggcctctaaatctccggttgccgccttcttcatcttgatgaggtgaaaaaccatccatgtcagaacaaaggcgagaagcgtccataaccacgcgtaagtcattgccattaccgcttagtaataatatatatgccttgtacctggagtgaacgttaaatatataggagaaacccacaatgtcaaacaagccaaaatatgtaataaactatagttcaacagcttggcaaatcaaatgagtcagttatataggccgacatgagatcacatcacaatcaaatattgataagccacctatctaaataaagcaataattacttattctatatggtttctcattatagttattctatcttcgttgacaaaacaaaaataacacgtgttaatttgctcagcatagtctcttataattttactattcaaggatatatataactaaggtaaacatatatacatacatatatatatatatatatatatatatatattgaacaagactacaagagatgcctcatgcatccgtttatgggaagcgacacacaaacagagaatcgcataagggatgatatattttgagcatagacatttatcgactagcacaactcttaaggagatagtaccaaaacattattttgtcaatctattaatgatgaaggatcagaaatattccacaggttttatgtgtattttgtaaatcttaaaacataaaggatgacatggtttcagctacatgttgaaatcggctaaagttcataaaatacatacttgttatttgatttatttttgagttcaggttaatatataaacgcaaaagatcatagtttggattgaaaaaaacggcaaccaaatagttgtagttgaaaaatgctgttttcccattctggaaaccactcacgaaatgactataatagtacttttatattatatgataatataagaaatattattcaataataactcaaaatctaaattttctatgtttcattctgagttgtgttggattagtagaaaatattaactgcctatctttttttttgtttatttatgttcatgaaattacttaactatttacaagttttctgaaaatcaaaatcctactttaaatacttaacttctatttttggtacgttttctttttttctggaatagtttgtttgttaaatttgctaaggtttttaatatcgattttttaaaatcagaatgtttgattacataattttatttgtggaaatcttcgtatgctactactatattttgctccttccagaactttaaatggactaaaaaaggcaaaaaataataatatatatttcaaaactaacgtttctgtttaacaaaataaataaataaatactaatatctctgtcacgttctgtagagctcgatcacgaaatttaattttggaatccaacagcatatctgtcatatctgaattaattaataagaacgtgtaaagctatttttgtttttcttttggtaggaagaaagtgtcaaagttaaactattaataaatgaatagtctccgtcattgcagatcatctaatttagttttttttctttctttccatcataagtggaattacatagaactgtggacaactggacatgttataatttaaaattatatcaactttcaaagtttttagataataagatgttacaaaattttctactcaaaaacaatcaaattattgaaattattatgggttgcttggagcaaatgttagacaagaagtttaattctccgtaactcctaacataagtgtttatcaaaaatacaggtctcagaaagttgtaaactttacagtatgtcatgcagtcatatattttctcgaggaataattgacttagatttcaagacgaattgcgcataattgatcaaattaatgaaatttcttaatgattggctaattttcttgaaatgtttagagggtttcaactttcaaatttcatagagaccggtttacttatttctcgcattgaattcaagaacatatatatatatatatctcgtttaattggtagtggacacagtaattttatgcttgtaaacttttatttttttaatcaatcaaggagttctccttagtatgtcaacaaaacattgataaacttttttattttttgttgttgttattgttaaccacacattaataaaaaaagtaacttcataattaattatcctattaggagaggatattatttacaaaaacaatattaaagtaaaaatttagaagaatggagtaaacagtccaacttaacattacataaatgagaaattaaaaaaacaaaagcgagaagaaagggggaaaaagacccaaatcaaaccaaaatcatctagattggagaaagcgggctaatcttcaagttatatttaataaaaatttattgaatatcattagtttaaagttatagaaaattataaaacacaaaaaataatatatttaaaatcaactttaatacgttttcttaatatgtgtatttttcttaaaaaatcagactaaacaaaacaaagagagtatattttaaattctatctcatatatttatctagtttagtttatagtagaaacctatgtttcatggaaacagaaacagaattacggatgcgaaacatttcagaaacgtgaaacattttttttttttctaaaattagggaatagaaacgtttcggaaacatatacacacatatatatactttatacaaaaaaaaatatcaaatagtttaactaatgttctaaaatataaagattaaaaggcccaatatcaaatatttagaccatcattttcatttaatccatcaaaaatcatataaaacatctcaaatctggtttgtcgggaaaaagatcttaaaactcgaatctcccaaaattagttaaatctgaatatttctaaactatttgtttattaagttttgaaaataagaaaaaaataagatttttcgcattttcaaatcggaaatcagtttccatcgtattttcaaatacaaaattttaggaaacacgttttcgtaaatttccatcgtgtttctgagaatttctgtttccgaaacgtttctatgttacatgtatgcttgtaactctttttgtccagtaaaaagaaagaaaaaaaatgtttgtaactcattttatttggattggacagtcaattataattaataatgaaaagtatgggcttaatttggaaaatgtaatcaaggtatattagctaaacaagcaaggaaaatacttaataatcaaatatttaaataatagataatatttttatgccgcccggacatataatatatgtactgttgactatatattaattaatcatatcacagaaaatttataaaacggataaacgtgatagagtagtatgataaataaaacgaacatgatcaaatatcatagctagaaaaaggggaaaatgtcagagataaccaaatcaaaccgtatactccagtttccatattttaatacacaattaagaactaaatatggaaaaagacatatttgaaggccagtgaatgatgtcaaacatgtttcatttctctcaatttttgtaaaacctaatttaaaaaaaaaattgaacggtcgtctaatctagaggtaatgagtagatttctctatttttgttttcatctcttttaaatatcttaaaactgtagcatatatttaccagaagttatggagacttggagagtgtgaacatgtatgagttggagcgaaaattacgaacaaaatctagatgggaaagccatcttttctataatttgctatatataaatgtatggagacgagagtttctaacaataaatgtatgaacacgacaccacatatttcgtcaactatagggaccgtctgcattaagatgttgtcaatgtaaatcagtttcttcgactaatttcttttcgatatttcatcaatttattaaaattaattagctttaaaatttattgtggttgaaaaacttttgtaatagtttcttccgataggtacatcatacttcttaatctaatatcacatcatccacaaagctgaatggtaaagtgtatggtctatgtttgcatgaccttaaaagaccaatgaattaagtgtatagagagggacgagactatcacttttgtggctgcttttcatgaacacgaaaacaaaaacctcaccacagactttttttttttgataaaaacctcaccacagactccatcatctattggaacgactgcgctaagatgttatatcgatagcaacaaattttcatcagtagttatctattttagaaataaaaattaaattaatagcaatagattttcatcagtggttatctattttagaaataaaaatgaaattaatactgaaactaaaattgaaatttgaattctagatatcaaaacaataaaagtaactagaacatgatgtagtaaaataagattaaatttatttttataaacattatatttctcctaatatgtttgcacgttgcaaatactagatgacattattccaactatgtcgagtttaaattattttaaattatttataatatatatttgcttataaaaagtaacttactgtgtttaaaagtaaagattatatttaataacgaaaaatatgttgtgaaatattatggttgcattatagtagttgatagcataacatctcattagttttgccacaatttatagatatatttctttgaaaacttgtttttcttaaaatcttaaaattttaaaatttaaagatatataagaagtttaaaatatcattagactgtttttttctttcgtaaattcattcttataacttcgattttagtatacataagaataaagatatactgtgcaagaaaaccagaggtcaccaatatacacaagcattcaacagaattaaaaactcgttttattagtattacaattccttctttttacttttacgtagaacaattttcatttatatgagaataattgtagaacacaatatatgcagaatcacaaagattcgtgatttatatatgtgttatattttgcagtttaaagcaccagtgttttagagagccgttgcagccatatagcttttgctatacgcggcggcgttgactggaaacaacatttggctaactccttcagccttgagatggggaaccaacattttcatagccaactggtaattcaaataaaacatacaatttaattcaaggaaaacaaatatccaaatataataataatattgtcaaatattagtggtaagataaaaagagtattaacaaaaatgaaaaacaattctaaagaaaatatttgatataaggagggagagaattagtgacttacaccaaaaagtcgaaggctatgccaaatgcgaaggggagagggaaatggagagagtagatggccaatggaggatagagtgatagcacatagatgatagatgagagagatcggacgagggttcatgccgcctagcaaagccatcatccctgacgtgcgaaacccaccactagagaggtaatcatagcaaccttgtctcattgcctcttttgcttcgtccgtcgatgcaactagcacttgagagaatgcatttcctaacgtgttaactgtcgctgacattggcttcaccaaaaaaaaaaccatgtattctttttaaaattttgaggttgcaattttgatcaaattttcatgttttagatatatgctcaccttgcggatatcataaaaggacttgataacttgtgagattttttgcgcattgccaaggttgcttaatggctggagaagacggcgtagaatgagaatgtcagataataaaaccatcattccagatgcgattgctggatgacgcatgttgaatgcatctcccaataaaatcactcctttcttctcgctcaaagtagctgtcatcttctttgttggcatggcttttatatgttctccttcatcaatccctttcaaaaatattttgcggagttttaaaggtaccttgaaaagaaatgttcaaaaacgttaagacatatatatatgcatgtacttataacaaatttagaatgtgtatatgtattacttatctactatgtacacaaacttagtaatatagttctatattgagttggttttttaattgaataaagcccaatgtgtagtgtacctgaggagcaatagtgttcttcacgaaagtagccatttcaccatttgaaatagaaggaatgttgttggggagaacttcaaaaacacaacgaacgtcggtgctgctgatttgatacaacatggtgaaggagggtttagacattatcaactttaacttttcgggttcttcaagctgacagttctttgagataaaaccaacttggtatgacagaacctccgcctacatcagagtaagtaacatcaattatgtcattagcgtgtatagcaaaagatttatgacatatctgtttaattgagcatatatactcacattgttgtcattaagagaccggcgaaggtttgagtagcaaccgtcgcatactacagtgagaggtgccaaggctgttgtttcttcgcctgcgctatttttgtatgtcactcctttgatcactcctttttcttctatcaaagacttcaccgttccttcttccaggcgcacactaccaataaatgtttggtgcagtgtattgattagcgttataaaacaaaccattcctattgtcaagcttattatatagtagctattgtccaatgtttaaaaaatatgaggtgctaactgaagggatttttttccttatttattacttcatatatattcaattaggtttattttgtttaacctaatatattttatatttattttaaattaaatttttatttaattagaattatatttgtttcttttaattttatttgtagtcagttcgttttgtagttagttatttgagatttgagaaatctaaggactgaaaactttagtcgttgatcgctacgattaatcggtgtatccactgtcaaacgaacaacaacacttggtcgctgacttcctaacgaacatgaccataatacttacttgggaagagaagaagccttttgccgcaatcgttggacgaatcggccattgtgaaaagatcgagccgaaggatcaaaaggaaaattgttgttgtccacgggaaaagatgcgactgcttcttttccgtccttataaactgtcatgcccgtggctttttgggcatctattccctccaaacaatctatacatatatatatatatatatataatcgcaaaaatatgatcatgaaactaagacacaattatatgactttctgatttaattacataaatgaaactgaaatagagaccgaccttcaagaccaagcttagagagcatgagtcgtcctcctggttgcataaactcacccatgattctctctggttctctcaggtccctctctattacatggactcgacgcccgtcctatttataatcggaaattagcatacgaatatattcgttccaacccaaaaatattgcagccgaagtgtataatgcaaaaaaacaacaacaatcatatatagtgtatatagttcaaacctttatcagtactcatgcacaaatattatacaaaaacaacaagaatcaatttaatactaagacgcaaatctgtgaaactgtgacgccactttacataccttagcaagagcatatgcgagagccgagccgcctactccagccccaacgatgataacgtcagtagcaccgtcttctcgctcttcaaccaccgcatccgccaactgcgtcgccttcttccccctgtttgtgacgtagaacactgtccaagtcagcatgaaggcgagtagcgtccataggcaaacgttcgtaaaggccatatccttatctataagctagttcttaatatggtttatgagggaatcgaaagaggaataacaacatatatatagtgcaaagatatgtcagtttggacgtggtatcaccacatgctaaattattataataatttagaaagccataaattgatattttctgttgtccacatatttcgttatcatttatgagctgtgtaagatgacaaaaaaaaacaaacgacgattttatttttattagatacaaacagaaaatattgtccaccctagttaatgaatatgtttctattttgaacaatcgagtaaaaggcaccactcaaatatttgacatttttttacactcttaaatgatgaataactagtcaagacggtagctaacttggccatgattttgacaatggagtaacgtatttggtcggtatttcattgaagacatttttttttaaagactatctacctaattattttttaactacttatttcactaattttccatttttatagttgtggaaaaaaaaattaagttgtgaaagtaataataattattaattattttttaatagttgtgacaacaattatagagaaaaggacagattcaaattaaatttggaacggtaattagacataggtatttgtttgtcaaaaatgacttgttaaagcaaaccaaaggcaaatttgaaagaaaatagaaatttgttgcaagttttttttttttttttttttttacttaacatctttagatctataaaatccgatctatagttaattggatccctactatacaaagtaacacaacttattcaaatcatctagtgaagaagaccaagacaaattaacttaactacttacttaaaaacacattctcaattcacattttttgttacaagtgtaaaatctgcaagtaaaactaaatatagaatatacatttcgtttgtttcagttccgcaaaacgggtgctgacggcagcaacatgtggcagttaagttaggcttcaaaaggattatctggtccacaaattagattataaattaattttaatttctatggatggatatattacctttccaaatattcaataaacttttcttttgttagttatgttattcaataagtttttttttgtggggctcaaacataatcactttgctatgaatatcctcttgtacaccgtcacaaaatgatatataatatccattaaaataatttgctacaatttttagctattttctcggcagtttgcaattttgcatgcttaacaataaaaaacacatgattttttttatgtgggaaaaaaaattcaaaaaacaaaaaatattcactagaacagaatgaaatattttatatttctatatgcagttaatttgttctaaatttaaattatgtaataaactaaatttggatcgaacgaatttttgttatttttgttaaaaaaaatttttgataaaggatttaaatttaaaattatagtgcttacttcaattagatcaacaagctgaagcactattagtatcgtttgtagtgcttgaactgctcttttttgtggtttgagattattaaaaagtttcacaatgcaaatcacatatatgtaatcgagtagatatgtgtctggctaaacaagagtttggcattgcagtgtatagatcttttgaatgatatataaagttacactttgagaaaaagaaaaattaattagtatttgatgttcgatgacgagacaaccacatggctagccatctagctagtcgatctaaactaggtcattaacaaacttgatgaatgtttcatcttccttagtggatcaaaatgtttagttttttttaaaattactccatttaaataacttttgtctgaacccgtaaataacgtttctcatacctacaacgataagttcattggactccttaatcacatttaaatatagaaaaataacccaaatatcactaaaggtgggaagtgttttatctgcataaccctccctaaaggtcgacttcaaagacattttaaaggccaattaattatgtcattcattgttacgtgctgcatcttattttttatttttctataaatagatgtatagacacgagactttactctttttggatgttttctatgaatacgacaatataaacctcatcaccacatataactaaatcaattattgggacagatgcagtaagatgtatgttatcgatgtccacaactttttctggagtaatttatatatatatatatatatatatattagaatttctttgagaaaactattataataataaaaattaggtttttaacctgcggtttaccgcgggcaatcggtttatttggttcttatactaaatattttgaataaatttgatatcttaaacttataaatataaatttctaatgattagtgaagaattgtaatatatgatttggatattattgattattgatttcatgattgaatatagtgtttttagggatggaatgtgatcatattttgatttcaaaaacgatatagattttttatttttgttgaacggtttagattgaagggaattaattttattgaacggtttaaattgaatcggatcatataaagtttaggagattgttaagaccaaattacccttaatgattttgaatagcaaagaacaaaatccaaaattgaaatcaaaattgaggccaaattagacaaaatttcaatttgtacttcccttttaataataaagggattgcaactgactaaattttgaagttcaaatttaagtgttaaagaatttatcaaacaaactatggatatgaatatgatatggctaaatgtgaattgacaaaaatattaaacattattttagtatgttttcttagacatactagatggtatacccaattatgtggagtttgaaatattaaaattgattataacgtatattgttttactaaaaagtttgattacatacccaattatgtatattaatgtgaagttaaaattatataatcaatagcgaaaacgatggtgtgaactcatgattgcattatatttgataatttgaatatggcctgtttgtttgatcatttggcatttacatctaaatggatcatttggatgatgcatttgaatgatgtttgtttgattatttagtattttatctaaatgatgcatttaaatgaatatttttttgtttgatcattttgtaattcatctacattctcattctaataaaaatgactaaaatacccatgttataattttaacaaatgacaaatatttaacatcattaccaaatataattttaacgaagaaatgattttacggttttggcggaaaaaatatgattttacggttttggcgaaaaatatgataatacggttttgacaggaaaatatgattttaacgttttggtgggaaaacatgattttgtggttttgacgggaaaatacaattttacggttttggcgggaaaatagaatttacggttttggcgggaaaatacgattttacggttttggcaggaaaatacgattttacggttttggtgggaaaatatgattttacggttttgacgggaaaatacgattgtacggttttggcggaaaaatacgattttgtgattttgacgggaaaatatgattttacggttttagcggaaaaatatgattttgcggttttgtgggaaaatatgattttaacgttttgacaggaaaatatgatttttcgattttggcgggaaaatatgattttgcgactttggaggaaaatatgattttgcgattttggcgggaaaaacgaatttataattttgacgtaaaataatagtcagtgatttcacaatttttagagttttttggtataatatgtaattaaaaaaaaaaaaaatctattgaaaattaacattattaaaagaaggtatatttgtcatttgttttttggactaaatcatcttcatccaaatggttctaccaaatccatccaaatgagtttcacaaattagcctaagtttaacagatgaaacatccaaatgatttgttaatttgtaaaaaacaaacatcatttttcattttcatccagatgatccatttggatggagaaacaaacagggcctatattgatcgcatttgaccacatgaggatttagaatttatttaaaatttttagttgaaaactcattctttcataaaccttaaaattatttaatatatgatcaaactgaaaaatataataataaatttaaattatagtatatggaacaatttgatgggatactatttttcgtaaattctctctcataatttctattatagtatagttataagaaacatattacactatactctaataaaacaatatcaaattctacaaaaaaataaaatatatatcaaagccacaaattgtacacaaacattcaacacaaaacgaaatcttcttatttttattaaattttcttcttttcgtagaaatttcccctgttgttatatattaatacttttttttggttaatggttaatataaagaaaaaaaaaatgaaggattgttttctcgaggatgtattttaaacaacatgttagaatggatagattcatctgagaggatttggatttcacttttcctgagtcggatctttttaaccaatgcgttagctagtagaaggaagaaactcattaagtaatattatgtaagctaagcattacaataacatttcaacgagtttacaagcttacgtatgttgctgtttagagcatcaatgtttaaagaccagatgcggccatatagcttttgcgatatgcggctgcgtttgctggaaaaaacatttcgctaactccctcagccttgagatggggaaccaacattttcaaagccaactagtgattcacattaaacatacaattgaaaaacgcacaaattcgatcgatcatccaattaagacatttgtttatttttataacgcaaatgtaaactaactcatggtctagtagctaaaataattcatcaagaagttggaatcatggttagagttttactgcgatttaaatcatagttgaacactatatttttaataacaaaattattcgatttgtcaccagtttctaatttagtatagagtttggttctagattctccgattaaaaataaaaagtaaatgtaaatataaacgaaagttaaattaaaagagaccaaccttcaaggccaagcttagaaagcatgagtcgtcctcctggctgcataaactcacccatcattctctctggttctctcatatccctctctatcgcaagtactcggcgcccgtcctatatataatcggaaattaggcataaggttatacattatgcaaaaccaaaatattgcaatagaattctactatgaaacaataaaaacaatcatatatagtactaaacttattcctatcatttttgcaaaagtatgacgccactttacaaaccttagcaagagaatatgcgagagccgagccacctactccagccccgacgatgataacatcagcagcactgtctcttctctcctctgctgccgcatctgccaattccggcgccttcttcttcctgttggtaacgtagaacaccgtccaggtcagcacgaaggcgagtagcgtccatagacaaacgtgcgtaaaggccatatccatatctattagctagttctcaatatggtttagattactataaaaggagtaaaacatgcctataaaatgcaaagttatatcagtttggacgtggcatcaccacaataaagttatcttttctgttgtccacataactcgttttcattgttgacataaacaaatgatatttatatacatttcagatacaaacacaagacattgaccaccctaataaatgattttgttagtatatagaaggtaccgcttaaattattgacatctttgaaaatattgaatgacgattttaaatagtaaggaaattagctaaatctgaatatatcaatcaattgtttgataacagaaggtcggtccagaagttagtgtaacaacccgcctcgtgagacccgcacacgtggccactctctgccacgtggcatcctgttagctctgcagcgcatcgaccctaacccctcaccttgggctaccaaagccctgggtcaccaaagcccttgggccactaaagcccacaggtaggttattggtgcgcttggcgttcctcgaacccaagtcaattggtaacagcttgtcctttgggaaagttgttaaaggatgaggtcttgggttcgaggaacgccaagcgcaccaataacctacttgtgggctttggtggcctagggctttggtggcccaaggtgaggggttagggtcgatgcgctatagagcccgcaggatggcacatgacaaagagtggccacatgtgcgggtcccacagagcgggttattacagttagacacaagaagccatcgcttagagaatcacattataacataagaacaaaacttatagttgtggatgaaacatccaaaattcttttggaaacattggaccggcctcgagtaatgaaacgaaatgatattttaggcatactacagtttagattttttcatattatttttcacaatgtattcctccagtttctatgcggacacaaatcaaatttcgttttagctaatgctggtttctttaacgtttgaagagatgatgcatctatttttggtgcatgtttgttatgtacacgatttcacaaacaaacatacatggaaaccaaagtaacatatacttacgtattaatctatatgtagtatcaaaactcttccacggtaaagactcatgttttacatagtgcatgtgtatattacgtagctagatataggtactgaggtacactattgtttataggaaaatcacattaaaaatctagtcgtatttagtcatttcaataaatacacatggtttcttttgggtttgtatgcatatacgaacacaaagcacttatttatttgttcttttaagaaaatgtcaatttatattcaaaaagacaaagcacttattaaaagaacgagcaaatttgatacaccttttctctgtgaaaatttgaatatataaataaaagtgatgggttttacaaaagttatgggttaacaatttccttgtgaacaaatagacatttagtgcaatataaggatcccatgcttctagatggatctttagcaagaaagaccattaatgtgatgcttcgaagatgctaaacaagatcgaaagataggaccggttggcgacgtggaacaacctcgcacatcaacacgaaagcgagtagcatccataaccacaagtacagaaaaaccatatccattacggtttagtgattaattgcgtgataaattactctatgatatagtttataagttttagacaaaaaaagaaaaactgatatagtttataactgaattcagaaaagtgaagtggtatatatatagagagaattgatcagaaatagtttcagtaggcacgaacgttgtcatcgtattatatcaaagttttaaataagcaattaaaaacagatatatatatcagattaaccatgtaattttctgtttcagtttcatttacacgtttagccagagtcgtgctaatgtatatgaagaccggatgactaaaaaatgtccaatatgtataaaacgaaacttttcaaagtaaatacagtaagaaaacaaaaataaaagaacagagaaacaaaaaattagctccaataatacatgtgtgaagctaaaaaaaaagagcattacttgtaacaacaaaaataattcacacatataacattcaaaagtttatttttttgtgtttagaacttttccccgttacatactaataattataagcactgcaatacacgtttaccaaatgcacaatcacatagattcgtgctccatatatattgcgattgagagcatcaaagtttagagagtggttgcagccatatagcttttgtgatacgcggctgcatttgctggaaacaacatttggctaactccttcagctttgagattgggaaccaacattttcatggccaactagtgattcacataaaacatacataaccaaaaaaacatcaattccgaatagtaattagcatataaaaaagcgtagaaaaaaaagaaggaaacaaatctacttgatatatagagagatatattgacttacaccaaaaagcttgaggctatgccaaatgcgaaggggagagggaaatggagagagcagttggccaatggaggatagagtgatggcacaaagatgatagacgagagagagaggacgaggattcatgccgccgagcagagccatcatccctgacgtacgaaacccgccactacaaaggtaatcatagacaccctgtctcattgcctcttttgcttcatccgttgatccaattagtacttgagaaaatgcatttcccaatgtgttaaccgtcgccgacattggcttacgacaccataaaacaatcatgtattagtttcaaaacaaatcaaattttcatgtttaagattaatatgtacatatgctcaccttgcggatatcataaaaggaattgataacttctgagactttgtttgcatcgccgaggttgcttaatggctgaagaagacggcgtagaatgagaatgtccgacagtaaaaccatcattccagatgcaacaactggatgacgcatattgaatgcatctcccaatacaatcacacctttcttcttgcttaaagtagatgtcatgcgctttgccggcaccacttttatgtgtgctccctcatctatacctttcaaaaatattttgcggagttttggaggtacctgaaaaataagtgtaagagatgttaattgaatatatattgtgcatggagttatggaactcttgcacatgttagaatgtatctaggtatgacttgcacaagtaacaacaaattagttatatgtatttatatgtttagtttctttttcaatgcgtacctgaggaactatagtattcttcatgaaagtagacatttcaccatttgcaatagaaggaaaattttcggggagaacctcaaaaccacaacgaacgtcagtgctgcttatttggtataccatggtgaaagatggtttagacaatatcaagtgtagcttttcgggttcttcaagccgacaattctttgagatgtaaccaactatgtacgacataatctcagcctgtatcaagttatagcgcattaatgcttattaactaactgaataaatcagagtgaataacacaagtgcaatgccattagcgtttatatgaaaagattgtagtattttcgtttaaagaagcatccttacattgttgtcatcattaagagaccgacgaaggtttgagtagcaaccgtcgcataccacagtgagaggtgccaaggctgttgtttcttcgccttctttattcttgtatgtcactcctttgaccactcctttttcttctagtaaagacttcaccgttccttcttccaggcgcacactacgaattaacgattagtaaacaaaatccttgctattatcaagtttagtaatattttctagtataaaaaattggatgttcaataatattttccgatttacaaaatttaattagacgctaattggatatacgaagagggtctaccatctatctattttattctattgaagtatttatcatgatgttaaattgctaatagtaaaagcctaaaaagtacatataataaaatatattttctagaaaaacaattgtttcaaaaagattcactttttagattttctataaaatatttattagttattattgatgaattgtaaactttaattaaaaataattgaatatcattggtttaaagatgtagaaaaatgtaaaacacaaaaaaagacattgaaaatcaactttaatatgtttaccttaatatgtgtgtttttcctaaacaatcaaattaaaaaaaaaaaagaatatatcttatcaaactttattagcttcccttaattgccaattaaaaggttttatgtttttttcttgttacttttgtatacaaaatacttattttggagcaatattagtcgattactgtatatcagacgtattcatgattttccattgaatataataaatcaatgactatatatactaaatcaatgactataaatatttgtgaacaaagaagtatccttttgacgtacttggaaagagaaaaagcctttcgacgcagttgttggacgaatcggccattgtgaaaagatcgagcagaaggttcataagaaaaattgttgttatccactggaaaaggtgcgtctgcttcttttccatctttataaactgccaaacccgtggctttctgtgcatctatgtcttccaagcaatctatataaattataaacgcatgacatcatggaactaagacgcaatatacatttcttgattggtttacataaatgtaaaatcaaagtaaagcggacacagaccttgaaggccaagtttagaaagcatgagtcgtccgccaggttgcataaactcacccatcattctttctggttctctcatgtccctctcgatcacatgtactcgacgcccatcctatagtcggatattagcataggaaaatgattgtgtataatatttgtattcaaagccgactctgccttaaggtattttttcctatattcattcggtccctttttgactaaaatgttctcgtagacttgtaatctagtgctagaggtattataacgtggacgaaaaaagttctagagttacacatctcctaactcaattctcattagttttccttttaaagattcctaattattgcgctttaatttgttcttatatccttaggcgtttttcaattcttagagccgattttgattgtgtcatgcaaaaacaaaatattgcaatatctatcttgccaaaaaaaaaacatacataatgtgtataggttttatcctattattaatacggagattttagtacaagaaagtagttaataaaagtgtgatgcagatttaatatttggacacaaagctatgacgccactttacataccttagcaagagcatatgcgagagccgaaccacctacaccagccccgacgataatgacgtcagcagcaccgtctttttgatcctcagccaccgtatcagccaaatccgtcgccttcttcttcatgttggtaaggtagaacaccgtccacgtcagcacgaaggcgactaacgtccataaacaaacgtgcgtaaaagccatatataaccaaatctatttgttctcaatatgatttatgagtttttaaaaaaaatggcttatgagatagttgtggaaagaggagtgacatatatatagttcaaagatatgtcagtttgaacgtcgcattattaccacatgctcgttatcataatctcggctgtcaaagtttgacataaaagaaacgataagtttatatcagataacaaacagaagatattgaccaccctaattaatgagtttttgttactatatagaacaagcaaacaaaatgcaccactcaaattattgacattttgactattttaattcatttaagagtttcaaaaatctcaataatttgctaattatataaaatgtcaagaagttaactagatgttttagaagagagatgcagattcggcaggcggttcttgggaggatcttggagagcaaatgtacagggtccaaaataattttacaaatttttcttcacactttagggtctttcgtttaaaatcatctttattgtaggcttaaatatataatagtacagaacccaatattctaatgagccggccctgagagattcgatacttggaccgattacgaacaatgggaagtgcataggcgagaggcgagccgccaacttcggctccaacgatgatgacgtcagtaccatggtcttttctcatctaccgcattatccacaagtctgttattatcttgctccagatggctactagggaaaatgtccaagtcaacacgatagtttagtagcatctatcactacaattaacggcaaatccatatctataagggtttagggtttaggatttagtatttgcctgttactttagtctttatatggcttttaagagaatttacaaaagcacaaacgtgacatcatcacatacatgattatatccaaacttctgataaatcaaaaagaaaatcatagtgaataaacacatttcacaatgaatgatgtcacttcttgtttcgtgttccgtttaatgttgtttctatttttgtcaaaggtcgacgtaaaatatcgtttcgccaaaaattgttggagactaattcattttttggctgctttccatgaacaagtcaatataatcctcaccacataactttatcaatgattgtgattcggtgtccatattttcttcatatatatcttatctacacataaattcactatcgtcttaaagttttcttcttcacatttactctgtcttggaaatatagagttattgggagggaagtcaaaacaggaaagatcaagaaactaaacactgctcctaagaaactaaaataaaataaaataaaaattcctacatgcaagataattttcatagcgttagacgccgtacggtggcagacttctagtcttgttacatcaccgtcaccctctgattttctcgtcgtccagtccaccgtcttcaaagaaattattatgacttcaagacaaaacttctagtttccaaaaaagaaaagaaaagataagagctataaacgagtcagtgtacttaaataaacgagtcagcgaaagaatgtagcgttccaatatattaaataaaacaaaattatattcatatacccttatgaaaaaagcataatacttcattatttgatgctcattgctcatctcatacacaaaatcagattcataagcaaaggcgacgacgatgaagaatgactaaataagttgaaggagtcgtctccatgataaaccgtaaccaaaccctgcgacattctattgtatgtgtatcttttttttctttttttttggtcataattgtatgttttttttgtttcttggcattgtcactgaaaattataccttttcatttttgccttctaaataacccaattgtgttactttacagaaaagcccatccaacgattatttttcttcagcccattagcccattaacttcaggataaagataagagctacgttcaactctatggtcagaaaaatcagagaaagaaagaaaacagagcaattacttgaagaatccataggaagctgaagatgagaagaattcctcgtatcaaatttcctcagagacattctatctcatctggttaacatttttctttgttttatgtttttttggtttagtttattctctttcactactcttattttctttagttcttgctttattcttgttcttaacgtctccttttttgtgtgtgactttctcaggttctggaccggcgccgggatctgtttccggcgttaagaaaaatgtgacggcgagttctgatgttccggcagctccgaagaacactgctgatggagggaaagcatctctccagccgaaacgtacacctgtctccgacaaagaaatcgaatctattatggtgagagattatataacttgctaacaaataaagttagtatccttttgttgtcaaacaataacaattagtaactgaactctgagttttttttttgtacttgtgaatttttgcagttgggtggttgcatatgacatttggggagttacgaagatttgatcgaacacattggtgttcttgtcttgttcggctggtgatgtttattttgctgtttttaaatgtaaagaagtaactaataatgtagagaatatgattttataagaatgatactctttctcgttattattatttaagataaaaggcctctttcgagtttctgcattattgtcttcacaattttttattaagccactaggtaacagatgagagccaatggatatacaaaatgattcatgaagacctcttattctcatgtctctttccaactaaacataatggcaaaaggttgtgtcactgatgatgtaatttgcagttgcaactgcatcagtaatgatgcaatcttacttgtgatattgagaactctaagatgtttaaagaaaaagaaatctttgtatttgatcacacaaaatgccaaacaacgttttaagactgaagcaacagaagagcttgaagcaacgaaatacacacaagagcttcaagaccccaataaaacaaactcactgcattacttccgactcacacgatcaggtcaaaaaacaagcaagattcgtttaagaataatcagatcacaagttctcgagaccagtataaaacaatttatgtgctttgtgttttgctgccagatgactgactatagctcagtgtcacaaagacggatcattatttcagagaccattctccgtgcgaatggaatataactgaggctgtacctgtcattataatgtgtaaaagaagatgttcaaatctaataaggcttaagaatcatcgggtccttatagaaccaaaccctgttttggattgaaggttagcatttaacttaccatatcagtgcacaaatctcacataagatcgcaaggaccgttaagattttgctatggatctacaagagacgagaaagatttttgaaaaaacagaaatttcaagctgagaagtattgagaacaaacacattgcagattttggacatgtgtcatattggatcttgcaattactctaaagatctaattttggactaaaacatagttattggttgttgtataagagagcaagaacataccaggagagcgcaaatgagtgcaacaacgacacatccgatataaatggatgtagctaagaaacgaacagggtcaaacatcatactcatctgttgctcaggtcccatgaggaaagctgtgctgccaaaaaaaaagacagtgatctcttgtggtttaaaaaagaataacattgcgaaggtaaaaaatggcaagagactttgtaagatacaagacaatataatcagattcttgccaatggaaaacgactctaattgaagttacacaaagcaagcaagcttaaaatgggaacatatctatagctctatattctgatctttcatacagaaatccagaagccataaatgtcatacaaagtaaaaaaaaaaatccacgggcaggaatcttgaagaaacgctatgaaatacttcggttaactagacacgaaagcacgatgaaagtagtataatggcgtaatcatgtttctatgcaccaatatcaagaagtagaagcaaacgaccgtgccattatgggaaccagttagcatcagaaatcaaaatgactaaatctaactgagagtccatgaaagataagataaaaagagaaccattcaattctatggatgtaaataactgaatcgccatgaatgaaatctcgaaatgttagtcgaacaacaagttcttctcgccgcaatcttcaggcgacaacataccttccaatagctagaacatttccaaatgtgaagagcagtgcaaatttgatggggatcccaaatacaatcatagactgcataagaagaaacagatatatgaaattactacttctagatggtctaatactgaacaagatcatcccaatttgatcaatagaatgtgactaaacaagtaacaagagcatcaatcactaaaaacgcttatgaaatttctaatcaatcacaaatttctcattctgttcatgaaatttgatattttaccaggaacataagtagcagaccagtggctaaagacgcggcgaatccgtacattctctgcaaaatcgaagaggattgatttagtaaacagacaccaaatattaaaccatagcgaaatcgacatcggggagggacctgggtggtggagagagcacagagaccctccgatccatcttcaaggaaactatcggttgttccgtcgccgtctcctccaccggagaagatgtcgttgagcttctgcatcttgattactgctttttccgatgatcggagaaaaaaatattatgtggatgcaattatgtcaactctgggccacgttaagcccaaattcaagaagtaatggtacgacatgctgatatgtaattagtgttgtatttttattataatatagttcaattagaaagttacattattctatgaaattgactcaccatttcagcactaatgacaaaatgtccttaaaaatatattatggccactaaaatctatatgtcaaaagtttatgacataataaaatagagatacaaatatgcgtgtataatatatatataactaaaaaatgaaaaaaatgaaaaattggaaaagaaaacaaaaactatactaagccggaaaactgaacgaaatcttccagacataaagccgacaagaatcgaaaatgtttatgcatagattttgataaaatattgtaagtttgtttacaaggaaaaaaaatttcatgacaactgtgaagttcagaagttaagtagttctcatgacgaacacatagtttatttagtttatagatgtgcattgtaaaaggctgcctacatattcatagaaatggacaaataattcgtagttcatattacaataactaagagctagtcaatctggacgacgagctacgcagtttgagtgacgaactagcagtcaaacaaagtcatgcgatgagatggatggactaagcaattgaacgccaagttggacaaactgagcattcaagcaactagatggacgaacagagtagttggatgccaggttggacgaactaaactgtcaatcaacgagatagacgagcgtaatagtttagtgtcagttggacgaaataagcagtcaaacgacatgatgaaagaaaagagcagttgaacccaagttggatgaatagagcagttgtttgaagtttgggtttcttctcccatcttttttatttgtcccatctctcttaatgagatgcctctctatttataaaaaaaaactaagttggtgatagaatcatgaccgactatcatgagtcttttgggattggttggctgctaatgaagttaatcttgtttcaggttgggctaaagtgaagggtacaatccatgcccgacaaaaacgcttatgaaaataaaggcgacgagttttaagaaaactctcgaaccaaaagcctgactaacaaaagaaacggtactacgaataaattgaacacaagaccaaatttacaaaatacaacaaaactagaaatattatcaacagcttctttcttcttcaatttactggttattttttcgagattggaagttggttcatgcatctcccaaaaagtgggtgccgttagaactggactttggtcttatagttctcacgtgattttttagaaaatacaaaaattagagttttagagttacttaagtaagtgaaattaaacctaactcaaaacatgaaattttcatgagttaagatgtggtaagtttaagttacatattttaattcactttaaaaacaacttttagtttttttatattaaaataatatatatttttcttaattcaatatcaattattgcgagaaaatagttttattagctgaattttaataacatttcataaatataattatttgaatttcttatttttgttgctataactatttttgttattttcatttttgaattatccataatatttgcaagcatagattttaagaagatgaatgaaaaagagagggacatatatctcagtacctattcagatcattctcactgatttacatactctatggtatatcttaataatattataataatatctttaatataatttaattatgtaattaaattttaagttattaacacaattgaaggaatcaaaaatgcacatgtggtaaacaaatttatcctataataacttgttgatggagcagttcttagtacccagcaaggcaacaagtggaagtggtcactttctctccttgcaacttttttaagatccagaaatattatatttgtttttttttagaatttgttagttgtgataagaaaacaaaagttattaattaaaatgaaaaaaaaaattcccatttttattttaaacgacatattaacagaataaatgaattgagtgttagaaaaaacaaaacagaattgttacttattaagctggtgccaagtcgagatcgattaagaggtttatttgaaatatttcatattaatggtttattgtaaaaagaaaaataaggataaaagttgaataattgtcactttgaagggctctttcggatattggaagtcacatgaagaacttttttacctagccaacatgaagaaatattaaatggtgaggtatacagtatactgtatataaatttatcttcttgccacttggtgcatatgtcttggatttagaaaagctaaaaagaattctgaatgcaattttattattgataattgtaacgatagataaagtcaaacaattataataacactgccacttagatagaacttataagaaaccaaattgataagcaacaataaaaaagtgttgaccattattttcttaggccatatagtaatatcttgatgcttgacatttgatatttttatgtccctcccttattcttaagcatccattggcattacatgaatttgggttaagcgaatagagtagtgtagagtatcgttgaccttaagtataaaattcaatcgcaaaactttttccgacagaaatatataaccttattattaattaacgttgagtgtagtgttaactatgcttgagagtaaatacaatttgaatagaaaacattattatgtaatctttatctatttagaatatgtgcaatttgaataatataccgagcctaaaatctaggataacttttatcaataaattcaaacgcaaaataattttcgtaatttctaaaggagttagtaaaggaataattgtgagttacgttcattttagacttatcgaaggttaatatatttatgatttttatacgaggttagtaaattacagaaaatcactttcgagggaacaatatatgatttcaattttttgtcgattcatcttctgcactgaactgattttggttccaatgttgaaaaaagaataatgtcgaatcaaactgagagataataaataattgctatgatgtgagtctattatgtatatcaccatgcaatatttttctgtatatatatattacaattaatacaatgattgagtttagatatagttatgtattggattatatttcttgtaactaaccttttacttcagtttaaagccaatttgttgttaaaccaactatttttaccttttctttattgagtttgatcatgtgggactatattggtttgatgatggatgaataaacgttgtctttatactatatgataaataaatcggaccagttgctgtacatgtagtcagagactaattcacacttattaaatgtgtttttaattgccaatttgtagaaaatttgtcaatttgtaactaaagaagtagttaatacattctggttcagtgttaaagggatagttctcaaagtctccggatccaaaaagtcttcatttttttaccatctataaatagcaagatgcttatctgtgtagtaactcattagttctttttcctcttgaaaaaaagaataaaaagaagaacagaataactctataggatctaatttttttgtcaacctaaggtgcatctgagctagaagagagatagaaagaagttcacgaactcttaagtttacttaaatcatattcgattaaattcgagtctgattgaccagtaagatcacgaaaaaaggtattaacttatgtttttattttatgttatcattttctgatttttttttcttccttttaaaaagaattctgtttattttatgtaatgagtgaatgatagtcataacaaagcctagagagagagttcctacaatcttttgtataatctgtcgtttaaaaacgataagtttagctttttgtttttgcagttctaatttttagtaatcactaatcaggatttataccgaaattcgaattaatttacagaacatgcatttatataaaagttttggcaatggccagaaagagtagccagtagtgcattcaatgaaatatatgtataattaatttgtgaaacattttcatattgttcttcaccgtttaaactttatatcagtttgattacttattggcaatgtaataccttagattataggaagaagaagaagaaatgggacgaggttctctcggaaaactgatgggaggagaagagagggcttccaaagatacagatactttcaacatttttggccccttccatcttacatctattgactggtaacattttattttatttgttttgaaataaataaaatagatacttccttttaagatatatttttctttaatttgttttatagcactcaaaatagatttttatttttatttttcttatgatagacaaagatagaagtttttgttccatatctactcggactctaaaactaacatgtgcttgtttattttccttgtaataggaacaatcagtaccatcgaacctcagtggcatcaagtttggtaaatggagtgtatacattggaaggggacaggcttgaggaacgggaaggttctgaagcactagccaagccatggtgggaatttttccacttcactttactcgaaaccttgatcgacgatgacagctccatctatggtgccattttcgaatacgaactataccacctctaccaaaatacccctcatgtgaaagttccacgctatgtaattgctttccgcggcacagttttaaagggaaaaacttggaagtttgatttgaaacttgacctcaaatgcatcttcaacaccctccatcaaggtggcaggtctatgtacgccataaatgtaatccgccgtatggtggacaaacacaaccattcagctatctggcttgctggacactctttgggagccgccctagtgttgctggctggaaagaccatgaaaatttctggattcctcctcgagagttacatattcaacccacccatctcgtctattcctctagagcagctacctggtggcgatataattaaaggtttgtttcaaatcaccaagagtgtcgtcaaagccaccgtagccatggccttaaccgatctacaggtaaataaatagtcttaaattaaaaatgtttgatctacttaagagttaaaataacaagtttcattcacttgcgattacataaaaatatcaagtttcattcatttgagattccttgttggccactccaaactgagtactactatatacaagttgattttcttacaagaaactgtttgtcttaaattactacaggttccaaaagacgatccaaagacagcatcatggataccttatttatatgtgaatccagcagatccaatatgtgcaggatacatcgattacttcagacacaaaaccttcatgtctgagataggagcaagccacatcgagagaatcggtgctagaaaatcagttaggagtctattggtgggaagaagaggaaaactatcaccgtcggatttgtcatcggaacctctccaccttcttccatcagcagatatgactgtaaacaagaacaaaccgactaagtcaacgacagctcacggacttcaccaatggtgggagcgagactcgacactgagggaaaattgggaaagctgctgcatcagaccttaccatgaaggcaaattggagcaactgaccatacaataaacaataaaaaggagagtcagatataattaggcgttatgccttttatatcttatcatgtgatctttttagttacgaaccctctatcgacttgtttcccatctcttctactttttttttttgttgtcttctatttcatgttttagttttgtctctcttacccatgtttaatttctttttttttcatttaattgtcgataattaattttagttcttgttttctcgatttggttttgttttgcatttcctcttttgacattttaagatatattatgaattattgcttttttaatcactcgttgaaaagtctatcttatgtacattgagagtttaatttggaatattctccaatagcaatatatatatatatatatatatatatttatttctataatttgttagctgtaataaacaaaggagaatatttcacttaaaagaaaaatttaaagtcatactagttgtttccttatttatctgttttttttttttgtcatcgtggtttagtaattactcgtcatttgttttaagtggtcattttatattcctctatactatatgataaaccatgttggaatctagttttgatgagaatggcagcagaaatgagtaattgagtaccacttgtttaaatctagtttagatgtgaatagagcaaaagtgagtactactagtccacttaattattaatatatttttaattgccaatttgtaagaactaggaaccttgtcaaatgtatataaagatgttattgatacattctggctcttgttagtgctcacgttgatgtaaaagggataagttgttcctagggaggtctcaacacctccgatccggatcaaaaaagtcttcatatcttagaaaaagtcttcagcttttagcatctataaatcgttctttaaaaggaattcttgaaagaaagaaaaaagaacagaagaactctataatttacttactgggatctcttccttaaccagattcgattgtgttcgattctgattgacttattaagaccacggacaagggtaattttcaaaatctttcttttttctttatgttttttaataaaaagaaatccttgtatttattgtaaagagtgccatgaaaaagccaagaaaaagttcctacaatgtttttgtataatctgtcttttaaagcacataagtataatcttattctttgtgtagttttaacttttggtaattagagatcttgatcgaaattcagtttaattatgaaagtgttggcagtggccaaaaagagtgcatccattgaaattgattttattgttttcacttgtcaaattcttccctcgtaggaaaaagaagaagaagaagaatcgatggcctcagatagaaatgctttcagcgtctctggccctttccatcttacatctattgattggtatatatatattttagtatacttccttttgaaattatttttcatactataaaaatgttcaagaatttgctttcttagttaagaacttaagaccaagttcaaattttaaaaatatcagttttaaagtttaaaaaaatatatccgacaaaagaattggaataagatcattggagggaatattaaaattctttaacaaacaaacctaaaaatcttttatgatagacgatgattagtttatttttattaaaactacatgaattcatgtgctgtgcatgatttcttaggttttagttgataaccacttatgaggaaaataacgactgagaatgtcatgttcttctttattccccagtttacatgtaattgtttttcaagtttccggccgagatatgagttttacacgattcctctttattgtttatgaaaacaaaattcaagaatgatgaaatttaaaattaagatcgtttatagttgttaattttaatatttttttatgataatagttacatttctttatgtactatatactttcatttttattatatattcatacaaaaaataactttcaaattaattgtcacatgaaatgaatgttatgactttatttaaactagtattgatacttaaaaaaaaaagatatgttttcaggtgaattttatattaaccttttttctttgaatataatttaacattaaatttgaaaaaagtattaaaattactactaaaattttatttaaaataaacatcaataataaatatttcagaagagactaaattcattaaatgaattgttttcaactacattgtgttcatttccactttttctcttatcatttcgttcttattattatttgatgatcaccactcaccaccaatgtgtggtaataaaaaaaataccaatacctactagctagctactaaaagatatattggttttgttaaataggaacaattcgtaccatcgaacttcagtggcatcatgtttggtaaatggagtgtacttattggaaggggacaggcttaagaaaagggtacgtcgtcccgattcactagccacggcttggtgggaatttttccacttcactttactcgaaaccttgatcgacgacgaccgctccatatatggcgccattttcgaatacgaccactacaatctttaccaaaaaaaccctaatttgaaaccacctccacattatgttattgccttccgcggcacggttctaaagggagaaacttggatgcctgatgtgaaacttgacatccgatgcatcttagataacctccatcaaggccccaggactatccacgccatacaagctatccgcgctatgattgacaaacacagcgaatcagctatctggcttgctggacactctttgggagccgccctagtgttgctggccgggaagaccatgaaaatttctggattccttctcgagagttacatattcaacccacccatcatatctattcctctagagcagctacctggcggcgttctacttaaaggtgtgtttcgaatcaccgagagcctcgtcaaagctactgcagctactgttactatggccttaactgatcaacgggtaaatatataatctttttaacgaatttcaaatgtttgatcatttttggataacgaattcaattagctatggtggtttagtcattaagaactcatcttgttagtcgaggccacgatatcaagttttccatgttggtcaaattagaaaattattacaaaaaaaaaacaacattgttgaaaatatttccagtactagtttatagtttattttcttacgagaacctatattgatactttttttttttttgtaaatcaatacggttgtctttaactattacaggttcaagaagattccaaaacagcattgtggataccttatttatatgtgaatccagcagatccaatatgtgcaggatacattgattacttcaaacacaaaatcttcatgtctaagatcggagcaagccacatcgagagaatcggttctagaagctcatttagaaatccatggacccgaagaataggaacatcatcatcatcatcatcaccactgtctgatttgtcaatggaacctcttcaccttcttccatcagcagatatgactgtaaacaagaacaaatcggcttcgtctatggcagctcatgggcttcaccaatggtgggagcaagactccgtcctaaggaaaaattggaaaaactgtttgattaggcccgatcctggagacaaatcttgaagagtgcatcaaatgataaattagagggccatataataaggttttttgtttggttaaattgatgtatgcctcttatttatgttctgctgatcgttagtttggaacactctatctacccttttccatggcactatggttcgtttccgttcatatcttgtttttctgtcttttccatgttttggaatcattaattgaacaaaaatggattgtggttggatttcaattttattatggccggttttggtgagatatccgacctttaatggtgttatgttttgtagctttttcaatcattttgttgtcaattgcatttcgtattatatagtttaaaataaaacaaaccatcatacttaaatttaaacaaataaatatttctgattaagaatgtttttcctaaattctattttacaatgtttttttttttaaattgaactcctttagttttggtgtaaacaaattaaatataatctttattttaaatagatttgaaatataccaaaacgctttcattatcattaaatattttgttacgtaaacaatttaaaaatttattggctcggacaatcggtttcatatttaaaataacatatccagtctatacccaacatttatatcgggtcgaatttaagttttcattcaattttagataaaaatatagtattttgtgttatatattatatttttattaattttatatactaagtctaattgaatatgaatttgagttaaaaaaaatatatttggtttgattctatacctaaactcgtatatcttttcaaatcgaagattggatatggtcatatggacatggttcatccgttttaaaaaaaatatttggtttgattctatacctaaactcgtatattttttcaaatcgaagattggatatggtcatatggacatggttcatccgttttcttaaaaaaattgtatggtatacccaaaaaatgtacaactatatagtcgtatttcatttttttcaaatgtgaactgcgagtaaattatctgctgaatgagtgttaaggtatatagcgtgattgattgccaaagtcaaagaaaatatgcaccgttcatttgtgctgcgagcacagccattatatacaaattaaaccatgtgatcccttaaaaaaagagacgtggagatctctcccccgtactcatgttgcttaccatggataataggaacaaatataattttagaaaaataacttgttttttttttgtctaggttattttagtcgacgatttagtcaaaattcattacaatttaaaaaatatataagtaaatgttatataaaatttgcaaaaggaataaaagtagacgtacgtccagagaaatcgttttctttgtgtggtgtgactgactgtgtcagtgtgtgtttggtatttgtttaattctcggttgtttttattttgtttttctaaaagcatatatatgaagatgatgcatgcacgaattaaagcatatatgaagatgttgttataacatacattaccttggtgaagtatgtaagggcttaccccagacaaaaaaaaaatgtataatgtatttgctttaattcttcacatttacttttatattaattttcttaagactctataatttgtaaaaaattcaaaaaatccacaaaactatccctacaaaatatttaaaaagtgtatgaaacttattcttaagttttaatttgaagactgattttaaatcagtgtttaggaagactctagttatatatgaaatttacattggaagactttttgagtcttcccaaatgatacatttggtttcaatacgaagacgcctagaaagtctttccaaatgatatttttttcaaagattttagtagtaattattattgaaatatgttttagaaaattatcatagatttaaataacaacacattaaatgatctttccaggtactttcccaaagtatttaacagtttccatatgctttctcaatcaccttagctttatttcaactcaaatatcttcatgggaaatttaccgacaatttcctatttgttttgtattcctattcgttttgttaaaaagaaaagaggaaattgttgtggaaatttgtggctaaattccccgtggagatacacaagacatatttaatatttatcttcctcctttattttttgtatatcttgacaatttttatttctagagaaaacaacaattcctctcattgatcatataaatagatgacttagagttagaacaatcacaatgaatttttaaaactagctcaaatgtctttctcttcaggttgatcatcaacctgtgtttgtttttggttggtttcgtcagtagctctctcacttcactcacaaagtgaaaccagttacaaaaccaggggtacttgatatttttgtatttacagctatatcattgtatctatcatacactttaattattttaattttatgttttagttaattactatatacttttattgttagttacatcacctttttcgtatgtagtatgaatggataccattctaacatgtaagtgataaaaagaagaagaagagaagacggtgaaagtgtgaattaggaggagctgctgatggcctcacgcagagagatttttagcttttctggtccccctccaattccctcttttgactggtaaatatgcagtttcattttatatcttcccttccaaaataatattgattatggattcttttttgccctttttttttttttaaacaaagagtagatgattacattgatcacgaattattactcaaatatcgcaaattcgatttagataccattatttttttaacagaacaaaaatctgagagacaaaaataattaattgactgtacaaatatattgataccacttcatccgatggttttttattggttcttttttcttttgacttcgacatacttttgcatgtgtctttcaacattaaattcaagtaatatttcttaatgatgacacaaacaaaataatatacatatctactcgatgattctgtggtgtatatactgtaattggtttgtttttcaataggaacaatttgtaccaccgagcgtcattggtatcatgtttagtgcaaggagtgtacacaatggaacgagataggcaacaaaaccggtgtggttctgactcaaaagctagaccttggtgggcgttttacaggttcactttataccaacaacttagggacgcattagatggctccatatacggggccgttttccagaacgacatcaattaccagaatactcccaactcgatagtacctccacgttacattattgcgttacgtggaacgatcttaagcccacaaactatggcttgtgatgttcagcttaacattcgtatcgccttcgagaacctctaccgcgggggtagatttgtgcaggccattcaagcaatgcaatattttgtggccacatatggaaacacagctatctggatcgctggacactctctaggagctggccttgcactactcgcggggaagatcatggccatgtatggatgccctgtcgaggcttacatcttcaatccacctatctccttgattcctctagagcagctagtggagagtgaggatcttaaatgtgcggtccgactcgctagggatatcctcaaagccggcatagcaagagtcctagaccttaatgaggtatcaaatcttcataatacttatggtacttcacaaataatactatctcccaaataatatggggggattgacacaaatggcactaaaaaactttattattccaaaaatgatactttgttttgaaacttccaaaaatatcatataaagtttttaatcatttatatattaattaaataataaagttttttattactatttgtatcaattccctaaataaaaatgagagcaaccactaatctaatattaaattgaatcaaaaaaaaattaaatattggaaatatataccctaaattggaaataaaaaaaacccaaatataataatacaaactaattttaaaatgaaaaatctcttttaaatggtgaaaatatataccctaaattggaaataagaaacccaaatataataccatcaactaatattaaaataaatcaaaatttcttttaaatagttgaaatatataccctaaattggaaatacagaatccaaatataatattttaaatttctaatttattttggttgaatagattttatataaaattgtggtattattattgttcataaaacttgttttactgttactttaaggaatttttcaaataattatttgaatgctatttatgtcttaaaaactttttaatgttatttttttctaaaaaacttaaaagtgtgctatttgtgggaatttctcaataatataatacctcacaaataatgtcccccaaccatataaaattttcaataaaataaccattaaagctagatattgaaattgttaataggtttgccttttcttacaagaaacttgatcacctcttgatacacttatcttgaattatatacagggtcacgaaagccatctatttatgaatctagcttcctggagacctcatttgtttgtgaaccaatcagatccaatctgctcagaatatattggctatttcaatcatagaggcgatatgaatgagctgcaactgggtaggatcgagaggttggctagatactcaattaggagaatattgttcggaggaggagaaagttcgtcgtcgtattcttcagaagaacatcttcattttcttccgtcggccatcgtgatggtgaacacaatcatatcaccggattttcagacagatcatgggattcatcaatggtggaatcctatgcttggacagttttcataccaaattatagcatgacttgcgcttaatttcatcgcttcagttattttcttttcagttgaatcttctatacaaatattgtaaggtttttttgcttcatgtcacatcaaactttttttcagcattttattttcaattggattacttcccgaatatactttatttgattaacattattcttctattaattaactttacttacctagtagtaatttgttaaataggatatgttcaaatttaccaactagaaatatataagcaacatatttccagtgaattcttaaatatcgtaaagactatgtaattgtgttcgagtatgagtaaccaaaacgatttatttgacccaatggagtccattgaatggacctattaataaggcgcacatggcagtagggtaagagggttacttgttacttgttttccatgaacgatttgtactattaataaggcacatggccgtacaaattaacggtaaggaagaaagttactggaaaactagtaaatctgatcaaagccttaatttgactaacttttgaaaaccaaaaaaatatgttcatcttcataaagagatattcgaaaagtttacaaagtataatcgataccgtttattattgtttaattttctcatttgcgaagtatatggatttcaattttctggccttgcacctcctacatgagatcttgaacttcgggcctagccctcatcaataattaaagagtttcttataagcatcttgtgtcaagcaaaagtaaatgagaaagttcaccttaaaattctcggggttttttcttggattttgaatcatcacttaaagttcaccttcataaaacaggacgaaaacattgacaatgcaaaacatatctatagaagtgtattgattacctcttgctttttgtatgcaagacaccgttttcgcttgtagtgactagaatttatctttcaaagtagcatagaacttacgaaactgttagacaacatacttaacttcaatatgaccaacaaaatggttgatagttgtaagagactaagtaaaagaaacagaaatgggaaggggaagatatttcacctaaaattgacttggcaatagaatcgcaaagttcttaccaataaagaaaaatattaatcatgaagtttattttttgggaatgtagcataatgagacacttttaaagaaagttttttacgtttgaggcactttataaggagagggcactttttgtgttgtttgtgtgttttttggacttttatacccctgggatgaaagaaacgctaaccaaaagtcagttatcaaattgtctttaaccgaacacttgaaaacaaaccaattaagttatatggggtttaatatcgatcgttggattaaaatctactataattaagatgaagttatcagatctaagaatagtcgctctctacaaagagcaatttctttctctctccaacacaacaatggcgagagccaagaaggtgttaattctcactatactaatcaaattctcctattaacgttctcaatttttcatttttttttaacccttgcctttgcattatcgagatctaatgagcacggagtcgttgatgacgacaaattgatgacgagtttgttcttctaatggccttctctctcttcctcgtcggtcctagttgctcacctgaagtaagattcacgtcagttatggtcagatcttagatccagtgcagattcacgatgagtcatcgatggataacgaacgcaaatccaggaggaaatcggtgaataaacgatataaagcggcgataatctgccgtaaaatgcttctccggtgacacaccgaaggtgacggaaatttcgaaaaagtggtgattagagtctaaggaaagtggatatgtgaatgaaactaaaaattggacttgcgcaagatatcaatatttgaagaagcagtttcttaagcatctaactagtaagcttgggagatgggaaacagtggctttggtattcgtaggaaggtacaagacatagaatgtgattaagaaggcgaaagagattggtggaagaaaatcaacgagagtgattctatcttggtaaattgatgctttgttgaacatctaaactaagagaattagactttgtagatgacagtcaatttcatagtgttatatatattatacttgtaagagattgttcttgggttttggagttttgttgttttagctttgtcgttcctatgcaagaaaatgatggatgagactcacaaatattgctttgaaagaggaagtgatgatcaacaattctgatattactgttactccaactctcttgggattaaccagttctttatctaggtgtgtagcctaaactccttttatatatcaaatgctaaactctgtgttcataatttcacattagtgttataaacttcacattagttacatggctgccaatatcattaccacacaactctgttttgtttttttactctacatgtctcttctcattaaaaattagctttaaaagataaggtaatgattgtttaattagcttatcttgttttaaaaaataagagtaatggtctacttaaatctgcttatgttaacagaatattgtatcattttttcatgtgttttggtaactttcttttgttttctatgaacaaatgcttatggtcaaatggacaagtgtttatggttgaatcttaatggataatctgaaagtgtttatatctcttaatccattgtggtgatgatggtgtccaaagcctgcaacaagtcttgatgattcaaataaatgtaaaactagatgaacccctaatccttatccactaaatttgaaaccgtaaaacaaaactctaaaccatatagtatatcataaccataaaaaaatgataattttacagagcaataaaacacattgacagtagatcaaagacataggtgtccattaatgattgtccaagcggtctagtccatatttaattattcaccaggtagtatatcatttcaatacacaagtttatacatgaatgataattgccaattcaaaatacatcgtacatcgttcatttttctttgaccatttattcatttgtgtatggacacttccatcattatatagtattagtcattctttcttaagaagtatctaaatgaaaattacatgacttttctaaagattttaaaactcgcaaaaatggagtgacaaataaacagatttgaaaaatggtttcatgtacctatataaaaccaataatcaataagttggtttctattaaatttttataatttgcaaaacatggagtgataaatgaataaatttgaaaaatggttccatatcttcgacgtatatacgaccaataatcaacaatttggccagatcttcaaaatcttacaaaaaccgtctacttaatctataattcatgcaaacaaaaggtatggttgtccattaattattgtccaaatgttatagtccaaacgttacagtccatgtgttaatcttctttccaatagatgacctcaagtactgaatttcaaacaaatggggcaaatagttcttgaactttatcacagaattatgaaaaagatctccaaacacttgtaagctttttgtatcaaaactaaagagataaatgtatcccaatcaaacaatatatgtgtctaaattgacgctagtactctccactagcaaaatcaaagtctggcttaatcgttcaaagctataagattaagcgactttaacatccaataacatataatgatttttgttttatatagactctcgacaatgaaacagaaatcgagataagaagaaatcaaagagtttacgacaaaagtaacccaaacgtttgcaacatttcacaacaaaagtaaatcaaactccaaaactaaaactcgaatatgtaattgtttggtgattggttagtcaagtttgatgccattgcactcgaaaacccagccctaccacaaaacaagtaatcatagtaaatatctgagagttatcagaagaatagataaccaccgacttaaatgtcacaatactactcaacaaactaaccagttgaatgagacctccgaaattgaagcaagtgcaactccaccaacaattggtacaatggcactaagtacctatggagtaggtttctaaaaaaggttaataaacaaattatgcttacacaaatcaaacaaaagcgatgactaatatagactatccttaacatgccgttagaaacaagaatcaaatagcaacttagtccagacaggaacatttggagacatgtttagatcgcttgaagaagcggcggttataggatggtggcggagagagagtcgccgttgttgtaggagagggatcgacggagagagggaaaatacggcggagctttgcatcgtttagatctgaaatcaaaagttgttggtgagagtggagaacgaggaagaaggcgtttttagaataaagatccggagtcgagaaactgtaatttaggatttttttattagatttagattttttatagaattatgaaaataaactttgatggtaactgtaaagtcgccgtgtacgtaaaccaaatttggtttagggaatacggatttggtttgatttatagataaaaaacagttttagggtataatggtaactttgattggacaaagtgtcttgtttttttaaagtgttgtatcacgtaaattgttttgaaaaagtgcctcagagggtaactatctcttattttttctttttctttcttgtgtctatttttgtgttgcgttagagagtattttgagtttctttgcatgtatgtgatttttttttttgtaccgtttctaaattttgttgtctttgggtgtgttttgagtttgggtgaattgtcttcgtgtgtcttgtgttcgtgaagttatgtgttgaattttattttttgtgttggtgttctgagtttattgcatgtgatatgatttctattttgtatcgtgtttgagttttgtgtgtttatgtttgaattttgttttctctgggtgtgttttgagtttgagttgattgtgtttcagtgtctttgtgttcgtgaagttatgtgtttctagataatttagtaacccgaacaagccaagccacataggctcgtcaaatgcaaataatctatacggaagaatgcatgagattagagggaaagatttactttacctgacctctatatgctcttttggctactgaatcgcctccggaaattaggttatgtacagctcaaagatacatgacctctcatttgatcttggctactgaagcactttcttgaacttttgttcttcgtagatccactctctagtatccaaaacattttgttagcaattattatgggcacagacaacaaagtgaaactacaaaattatcgccaaaggaaaagaacaaaacatggtaagaatcttacagagcctgactggttgttaattttctgttatttaatcttgacaggttatgctgtgtaatgaagaacccgactgaaaaacagaaatcatcaagttaggaaaacaatctcacttaatatgagtattaactgcgaaacgttttgagacaacattaagataacccaaatcatgtatgcagcaaatttgattcaaacagtgtttcaacactcacatttgctcctgacacggaattgagatatgagttgtcacctgattgctgtatcatttaccaatcagattgattatgttagagctcggaaatggagacaagaaacatataaagatataaagatagatagcgaaataaacaaagtggtataactatagattcttcttgcatgactttcttcttcacagatacaacgaaagtgacaccatagtcattagtccaaaccccatttatccggatcatgtaattatgatggtttccttcaagtccaagccacaaccaaaatgatgcaatggataagaaaaaaaaaacagacatacaaataaagttaggaaagaaagccacatgtaatttctggaaaaatcattctacaaccaaaattagtggtgtaagagaagatgaaaatcattagtcaccttagtattggtcaggaaacatttggctgcctcatgtgtaaaggactctccaacaactgaaatccaatccatgacatcattagtattttacctgggaaatcaagatgtgatagagaaatatgttgtgctttaattagttcctgcaagttataaatcactttaacacatcagacatatccagaaaaagattttctcaatgtaagtttaaatttgactcttttccgctcaagtatcatgtatcttagtacaaaattattatgttagcagtctactagatagcaagaacataaaaaatacaaactcagaaacgagacgaagatgtttacctacctgatcttttttccgagtagactgaatcaatttcttatgtttagttattttcagcttaagaatcttctatcttgaattgattaaaaaagaaatacattctataagcaatacactaaatacaaaagactatataataaaaccacaaaaataatgctgatgtagagaaaatcttactaagtatgatccaagtcaggataggtgtaagagaagatgaagaaaatcagtcaccttaagactgaggaaatatttggttgtctcattggcaaaggattctccaacaacaaaaactcatccctgatattattaatattgtaccttgcgaatcaagatgtaatctagatatatgatatgggactagttcttacaagttatagaccacttgaacacgtcagacgtttccagcaaaagtgtgtttatttacctgaccttcttctttaggggagactgaatggctttcttaaattaggttattttccgcttaa

SEQ ID NO: 735 - DNA, 84194 bp, Arabidopsis thaliana
gatccgtctaccttgttataaaaccattctattagcagtataataaatacacaggaccgtaaaaaacaaatatgaaaagagacaaagatagtttatctacctgacacttcctttttcttagtcgactgaatcactttcttgttcaattattttcagcctaagagtccaccatcttgatacaaaaccattctattagtggtatacttaatacaagactaaaaaataaaaccacaaaaataatgctaatggagaacgaaatcttacgaagtttgatccatcccgggatttgactgatttgctcatgttgtttctattaatcttgacaatgaaacaatgtccaaagctgaaatattgaacatgtttattaagtatgacaaaaaccagcttttacgattggttttgtcctttctcaagtatgtattcatatgaaaatatgaagcaaaagtaattaaatgagaagaaatcaagaagctttaccctaaaactttagtgtttttcttggattttgaatcatcaccgataccccttcacttacaatcacaggacgaaacatatctaagtaaatacattggttacctctttacttttgtatgcaagacaccattttcgcttgtagtggcttgaatttctcttttggaatagcatacaaagtacaaaattgttaagaaaaagattaataattgtaacttgtaagttgtaagacacaaagaaaaggaagaaaaataggaagataaagatacttacctgaaattgacttcaacaaaatctcaaagttgttaccaataagaaaaaaaagatattaaccgtgacgtgattgattttttttctttctttcttgtgtctaattttgtgttgtgctgtattttgtttcttttattatgttcttttttttttttgttacctttgagtgtgtttggaggttttttgcgttagatatgatttgtttttggtagtggaatttgagttttgagtgtatgtttatgtttgagttttgtagtctttggatgtgttttgagtttgagtgcattgtgtttgagtgattttcgtgtctgtgaacgtgtctgtttctagataaggtgtgtttttggatagtgtgagtaacccaaacaagccaagactcggttcttgaaatgcaaataacctatcgagatgacacaataaacatgagaatagagtgagagatatctgacctgacatatgctcaaagatatcagcatgaggcaagaaacacgaccccttactaaacaaaatttcacctgaaatacaacacacaaaccataaaatgaaaccacaaaatcaatgccaagaagaagaaaaacttggtaagaggtagccaaatctgaccgcttgctaatttgattactttcaatcttgatgtgtatgacaaagatccaagctgaaaaacataactatcataaacagtctcacgcatgaggaacaaaacggcagagaacacataaagataatagaaagagactccaatgcatcatctaggcaacaaatataaattgaaacagtgtattaaaacttacatttgttcccgtctccaaattgagatatgaattgccacttgattgctgaatcatatgaccacaaacctcattagagcttgtaacatgaaaagcaagaaagacaggtaattcgagataaacgatgaacataacaattgatatagaatcacagataaaaacagtgatcgactgatgatgacaacataatcaacatatgaaactatttaaactcatctacttgaacaaataacagagaatatcataacattaaactcttatgatcaccaaattaaaatccatgtacgcgattaaaatcctaattggtagatctcataaccatcaaaaacaactaaattccaacagaaatcaagcaaacaatttcaaaactaaaaccctaaattcccaaatcaacatacacactgatcgaaattttgcgcaccttcttcgatttggtagtactatcacacgatccaaatccaatccgcgtatccatctatcgattatcaccgacccaaaatcgaaacccttggatcccgatttgaactaacccaacgaatcatacgccattgaacatgaaattcaattgatcggagaaaagaatcagaagaagatagacgaacaaaatcgcttctccactcaaattcaaactcgatttgaagaaattagaaatgaattttgaaatttgaatattcgttgacggtttatttgtggaagaagagtttaagttgcgaaattacgaaaggtttagagaaagcgaggcagctatttatgtgattcttcgaaaccaagagcacgtagatttacgattatccccttatgtatatgctcgaacggtattatttttaaaattgtgtttcccgctttgaagatttttggttagaatcccataaaaaaaagatggttttgctaaatttatttattttaaaagttattcacatctcttgatgatataataaatgttcatttttctttttctttctttgggaatttggtgaataaacaaaattggtaaagcaattacgaatatagctatgtaatgtagaaaacaaaagcaaataatgatttgcatttttctttgtcagtcgtcacgtcgatggcgtcatacactgatacaagagtacgtgaccatagaaaagatagaactccatacaaggaagaaagttatatccacttagccatgtttctttcatcatttatcattttcattcagacgatccacttacataattcatttgaatgatgtttctttcattatttgcaatttaatctaaataatgcatttaaataaatctttatttgtttgattattttgtaattcatctacattctcatttagataaaaatgattaaaatacccatgctttcattttgacaaatgacaaatattcaaaatcattacctatcatcaatacaaaacatattggcaggaaacatgattttacggttttgacggaaaagcgtttttggcgggaaaaacatgattttgcggttttgacgtaaaaataagatttttgcggttttggcgggaaaatatgatttttgcggttttagtggaaaatataatttttggcgaaaaatataattttatagttttggcgggaaaacatgattttgcggttatagtgggaaaatatgattttgcaattttggcgggaaaacataattttgcagttttggcgggaaacataatattgccaatggcgagaaaatataatttagtggtttcggcgtaaaaatatagttttatgattttaggtggaatagcggtttttggcaaaaaaaacgcaattccatgattttacgattttgacagaaaataataatccatgatttcatgattttagaatttttttttgtttcaatatgtaatttgaaaaatataaaataagaaatctataaaaaataatattatttaaaatatgattataaatgaggatatatttgtcttttgactgaaccatatccatctaaatggttcaatcaaattcatccaaataagttttataaatttgtctaaatttaaaaaatcattcagatgtattatccagatgaaccatccaaatatttgttaaatttaacaaacatcatttttcatttccatttggatggatcatttggatgaagaaacaaacagaactacttcctaaaaatctctcgctatcatacagacccttctagaaaacatgcatgcaccggactttgtgttgcaacttgcaatgataatacatattatttttgaatagatttctaatgataatttatatatccttctacaaaaagcaaaaccatatattttttcctctccttttgtaagtcgaattcattgtccacttggaaaaaattattaaaatcatattatgcaaaccaacccttgtggtcccataatgagacgtgcacatctctcgtatttactatgaataacaaaaaacaaaaatagaagaaaatcaaatcagtaatggagtttattgatttatattggttcagtaatttaaagcaaaattatgttttattagatcattgatttaaaaattttgtcaaaataatgtattatccattaattgatttctaaataccagttcaaatcatgatttaatgctggatttcaaaatctacattagatattaaaaggagaaaatagagtgatttaatttatggataaaccatgttatcttaaaatcaatatgtctaatttcaaaattaataaaaattcacaaatcaataggatttttttattattattaataggaattttaaaaactcagtattttggataaggataagagaaagttgtgttcctgggttatctacgaccgggggactttcattggttgtaaaatattatcatttatcaaacataattatcatatgaaatcttaacttgaattttatttatagccaaaattatttttactctttgttcataaaattttaatactaacttatactattgaatattataaaaggacaaacgttcatttgaaatgtgctatcgtaaatgtttcgaagaattggttaggagtgcactgaaacttgaaagtaagatatttttacagttttatattttaatttatcataacgtacggacactcatgtcaaatacgaaacaagatatttgaataatcctttctactaatacggttaataaatttacgtaaaacaaaattaattttaataattttatttacaaaccaaaccaatatcatcaatattatgtcttttattgagttgttgactacttgacatataaggtcttctaagaaaattccacaatttgaaacttcctcacaccttcctcaaaccaaaactagtattacctatttatgacatcacttttatgcttacacgatagctactcagatatataagtgtgtactctatttcttgtttgatggaaatacctttctagagtactcatcagacccagttacatgcgattatgatcgaacttcaagaatccagaccatgaaaaaggtacgtatgatcccattaaattcaattttactttaaatttttgggtactattttaaaacttcatctactctacatattctattattttaaaatatgttgttttaaagttttttcttttcttttcccagctatgtttgaagttagagaacattaaaagtaatgtcattcacggtagcaaaactaccaaaaatgctacaaaacataaatctttccaaatgtgtcataatggtggacaacaattttgtctaccaaaatttttttatgtcgtttcgaatttttgtccaccaaaaatctgttgtttcaaaagtggacaagtttttttcatcccattttttcgtttcaaaagtaatctttattaattacatcccaattttttcgtatgtaatgcggcaggtgattacaattcttacatataagcgataagaagaattgaagacgaaaattggaaggaggagctgatgggaaacttaaaaaaatctacacgcagtgacgagttaagccgttctggtccccctcaaattccaaatcctgactggtaaatttcgtttcatcaataccttctgcttaatattaataatattgattatgaaatattattaactaatgtaaaaaaacgcaactatataatacgtaactgttttcggaaacaaaagagtttacgtcatcaaacagaaaatctttacctcaatttttcttttggccccgatgttttttatactagccatttcctaggaacgacatttccactattgcgtactgttttgtttttcttttgacttcaacgtatatttgcatgtgccaatagaatttatatataaataacatttcatatgatacaaaaaaaaagaagataatatctactcgatcgtttctatggtctaaattggtttgtttataataggaacaatttgtatcaccgaaccacagtggcctcatgtttggtgcaaggagtttacgcaaaggaaagagacagggaaaacaaccgaaatggttccgagtcattagccacaccttggtggaagagtttcaacttcactttagatgaaagtgaaatcctatatgacgcatttgacggctccatatacggtgctgtcttccaaaacatgatcaattatgagaataccccgaactcgatagtagtacctccgcgttacgtgattgcgttacggggaactgtcccaagtgatgtgagtgattggatacataacagccgtattgtactcgagaaactccatggcgggggtaagcatatgcatgtcattagaaaaatctattctttggtggccaaacacggaaacacagctgtctggatcgctggacactctttaggagctggcctggcactactcgcgggaaaggacatggccatgtctggactccctgttgaggcttacatcttcaacccacctatctccttgattcctctagagcagtgcggttacaatcacgaacttaattttgtgtatcgactcaccagggatctcttcaaagctggcatagccaaagtcgtagaccttgatgaggtatatataaagttttctttttgccaatgctatttttcgtcttttagaaacttttcattatacttgtggtacttcacaaataatatctcccataacatgaaaagctttaaatagagaatccttaacgatattgaaaatgttattctcaattcttacctccaattgttacagggtcaagagggtccacgatataagaacttagcttcttggagacctcatttgtttgtgaaccaatctgatgtaatatgctcagaatatattggttatttcaatcacgtagtcactatgacggaggcgggactcggtgagatttcgaggttggctagtggatactcagttaggcgtatgttattcggagacggagaaaattggtcctcgtcttctacaccagatcatcttcattttcttccgtcggcctttatgattgtaaacaagactgaagcgtcggagttttataataaacatgggattcatcaatggtggaatcatatgcttaaacaatctacaacgtttagttcatactagtttcattcatgggtgttatttagtaaacctcgatgcctttctcattacattacttacagtatatatacacatgtataagaatgttctccaagtaatatcaatacatataagggaagtgaatattacgtattctcttgtctatcaatgggtttcaacgcttcagtctcttttctttcttgtcaactgaataatttgttaaactgtatatcttcaaatgtttttttttttataataaaaatatgttcaaaaactcaaatgtttgtaattgtacagactactagagtgtttaaaacacatgttggaactattccaatgaagatagaggttatgttccatgcatgcatccaaatcgtatatagttgtttgctaaaccactagatcaaataaccgtttagaaaaacgatttgaaaacattagggagatattattttgaaattttttatcagccacataagagtcaagatgaaaaagggaacgtaaatacatatttttgaataggaaaaatcccagataaaacctccaagttgaaacatttttcaaataaaactttcaacttttttagttctcatagaaaatctccaaatcgaaaagaaaattcaattaaaaccttcaacttttttcgttcccaattaaaacctctaactaattagtatttttttataaagaaactttcaagtcgtcaatttgagcttgatcaatggttgaccaatgatctttggtaatttcgttcggaatagttaatagtcgttgacgacatctcttttttgtttccaaaatttatatgaaccctaaaaattagaaaaaatatgttctagggttcgtaattaagattttcatcttttctgttctaactgacagatgtgaattttaaaagctaaataaaagaaaaatatgttgttaaaatccgtttatcgttagttaatcattgatcagacacaaatttgacgacttaaagttttattttattagttgaaggttttatttgggaacagaaaaagttggaggttttaattggaaaaaaatcaatttggaggttttatatggaaacggaaaaagtttaaggttttagttggaaaaatgttataacttggaggttttttctgggattttcccttttgaatatgcatatacgtacgtgtgtatctaaaatattcatcttgacttttcatttgctgatatgcatacataaaatgataaaattgtatcagtgaaagcgaggtgtcaagagtgctatagttaatgtatacagtatacacacacataaacttggaagaagtctatccaccaagcatccgattgatcaagtggatagataagaaaaggcgaaatcagctttcaaccatacaagcgagcggaaatcgacgttacgaaaagggtctccaaaaatttggttcgcatcgagaaattaaaattttataatttttaacgttttttgtatttaagtgctaaaatttcaaccaaacaatacactagttgtaaaaacaatatttttcttttcaatctaatttaacattatttttaaaaataaaaattggaagaagtcacataaataagttttttttctttttttaaataatgagatataacgtatttagtaaaatcttattttcttaccacgaatttccaaaatcatcatatatatgaaagaaagtgaactctctccctccttatgacacctcatcacttaagaagaggacacgtgtatttggaaaaaaaaaatcataattagcacattaaatatttatttttttttgacaaaatctaaccgaagatgtatagtctaaaaacgtaaatttacggcatattgttgttttctataacaatttatctctccgtaatcaatgtcttgttaggtttaaactctcggcaaactattgaacttctctcttctatccctttaaagcatggactcgtctctccatcatttcattatatttggaagcgagattcatcctccagattcagaacaagtggaactctaatcgtcatctctcaggctatatcgtccttagccacgtccttttccatgtccatattctattgtttgatcatctgtcacaggttgaagtctctctttttgttttgagtgtttttatcatgttcataaattcatggtatcaatcaagaatctcacggtcacattctcaagcagagaagctaaacattggttgattaaaccatagagtgacgctcttatttcattacatggtaggggcttctatctgatgatgttcatagtgattcttcttttaattttgtttggttttgacgaaatacataataagtgtctcccaagatgtttgtgagtgtttttttttcttatcctttagtccaaatttttcataacttaagatccatcgaattttgatcttgaatatgtatggttttgagtgagatgtttaccatcgaatactcttttattcctagattcatggattgtaggtttatatatttacaagcgtcgactcttttatgtcaaggtttacatgatattctggaaaacaattatgtttgtacgttttctattcattctcatgaattcccaggtaatgttagttcaaacgctaatattcggaagaccttaaatcactggaggtgaccagcttaacaaattacatatgcattgatggtgttggccccaaacagaggcatttctgatattacacctaattaaagatatgtatgtatgtttagtttatctgcctcttttaaaacaatttgcttataagatcctcttgaaaatcaatttttattttatatatgtttttttgctgttgttgttgacacccatatttcaaactcacgcaaatcctcaactgttagttcagccggtgaagattttatcatatcgcttatgttattttttagtctttatggtgatcgagggcctaccattttcggttcgaatgggaactttggcttccatggggattgcaatagaggaagcattcaaaaagaaaatttgatgcatgggtgtattggtgtgtggtgtggttataaagtgggaaattgatgtatgttctacttaccatcagtcccacatgaattcaagtgttaaatcagattacccctaaccatttgagttcagcatattgcatgaaacatgaaagcttctttcggggagagatggttttggtttctcgcttttagtttcttatagtcatgttgatctttgttagtctatctttttggtattcttctcattggcttcaaagtaaaatcatatcttaaactgtctatattttttacaatgttctgtgctatatatattcgacagcaagatataatattgttttggcgtaacagctccacggcgaccgtctaccatcttttgttctggtttaacacgtgtttctttctcctcttaccgcctatgcggtggttttcctgggctaggttgggctccgcttcttttcgattcaattgggattagtggctttgtcatgttgcttgatggaatttagaaaccctcatagattaaaatgcccaataaaaacgaaaaacctacgtctcttcttgcatgacaggtttccactaactcccatgtattatggtcatatcttcagctcttcaaactatatatattcagttattcaatgagattaatgtgtgaaaatggtttgttgtttacttatgattattatggtggcatgataatttcgttgtagaaacggtacatacttgacttgctctttgatcgtcaaaacaaagagtaaatatttgaacctaatagagctttgtcaatgaagttatatatcatatacacaataagttatgcaattcctgaattctgttagtgcccaatcttgttcctaacatcttggaaatatatcatttttatctatatctcacctatcatttacaatgtaattcatgatgttgatgatgacaagtatgagaatctggtataccgggacccatataattgggatgacacaagtcatgcatcagttatagcccaaactagatgttgtgagagttatgtgattgattaaatctatcgctcaccagaaaatgtttttttatgtggacaaaaccgactataataatcatgaggatcttacggtctcttctacaaacctttgttctattttaagaattgatatgtgtgttaaaagttttaacattgggacgattacatgatctttctggttcattttcaagatactacacatgagacatgtaatgaaaaacattttggtcacaatgtgatctttccaccaaaatctcctccatgatgacaatttaattttagtttatagtttcacttgcaagaaatgtttagttgtcatcttgagccaagatgaatctaattttataactacataagatagatctaactttactaagtaaacattataaacataattaataccaacataaatatttcaacaatttttaaaacaaatgtccatcaaaaaatgaacataacaaacaacaaaaactattaacaaagaattgttataacaacttttttttcttaaaacccacgcgtagcgtgggtactcatctagtatatataaaaagaagctatctctctccatcattccgccacgtcaacattttaagctcttctagagatgacacatcagctttctaatcttgcagtcagaacatttcattaatatgatcaggggcggaggtaatgaagagagagggggtcaattgacctccatgaaatttatgctttttgttttttaaggtaagttttataataatttatggagattttggttctataatgactcacatactctcaatagattccttaatttgacccctcacatatttgattttcatttaacattaatttactttccactttttaaatgtttttttagaaatagatataaatctttaaaatcctagtacatatgaatattttagatatattctatttatttttgtttacctatttttcaaaattattcttagacatactatatttagcgtaaaattaataatttaacattaatatataattaaataaaaataattaattatatatgacccctataactgaaaattctagctctgccactgaatatgattcagcttttattttttacacatcagcttctaattataagtaacaaatagagtaaacaaaatagcacatgctagatataccatatgtgttttagaatctattagagtgcaaaattaatgggtcgagcccatttcagtgatggcttaatgcttctaaacccaacaacatactttttcagttttagatatgatgatacttgatgtttaacatttgattattttaacagtacatgtatttgggttaagtgaatatggtagcgttgacataaattataaaattccaacttctaattatattggtaatatagaaaggttatcaattaaggaaaccatgattgtgagttaattttgactaagccagcgttaatatatcatagtgtatatatggttttaatacgaaatcatagcgtatgattttaataaagagtttatgtttgatcttatcgtttagtgcatagtcaggatacaacatgtaatatataaaaacatgctcttcaagatggagtgtcgtatgtgactccaagctttcagtaacaaatcttggaaatggcgtgaggaaaattgtgttgaccccataatcaaaattttgttttagggtttatgactattttaattagtttgactatgtgtcccaataagaagaaggaagatttgttttccaaacacatatagatatgatttgataaatcgaaacagtagtacacggtctcaaagattaattcacacatctaagtatgtttttaattgctaatttgtagaaattttgtcaatttgtaaaaaaagaaatagttgatacggtctggctcatgtcagtgtgcttgtgtcagtcttaaaggaacaatatcaaagctaagtctccggatcaaaaagtcttcttgtttttagcatctatatagatagcaatatgcttttctgtgtgtaaactcaaaccaaaaaaataaaaattggaggaactctttaattagtttgttttctttaaaagattacttcattcgattaacttcttcgctcctgattgaccacggaaaaggttttttttttttttttttcttattaattttcacctttttctcttattatctttcctttttagaaaacatctttacattttttttttatcaaaaaactgcttgtatgtaaaagaatgactgatgtatatatcatgaaaatgtcaaaagaaaaagagagtagaaaacatataactatgaacttttctttctttagttttaatttttggtaaacatacatttgcatgttgttcttcacgtaccgttttacttaaaattagtttgattactaattggcaatgtaatatcttagattataggaacaggaagaagtaaaaatgggacgaggttctctcaggaaattgataggaggaggaggagagatggcctcagactcagatagagacgttttcagcatctttggccccttccatcttacatctattgattggtaaaccaacttttaaatttactattgattgatgtggtatatgaaacgattttgaaaattgatgtaggaaataataaattagggaacgttttttttatctggcgcaagcaaaacttttcaataaccaaactatatatacataacttaaagcgttacaaagttatcgatatataattggtttctatttctttaataggaccaattcgtaccatcgaacgtcagtagcatcaagtttagtaaatggagtgtacacaatggaacgggacaagcaagagaaacgggtaggttctgaatcacgagccatgccctggtgggattttttcaacttctctttagtcgaaaccttgatcgacgactacgacagctccatatacggtgctgttttcgaatacaagctctccaacctttgccaaaatacctcacatgcgaaagcgcctccacgttatgtgattgcattccgcggcacgatcctagagtcagatacttggatgactgatgtgaaacataatctcaaatttagcttcaacaccctccatgaaggcggtaggtctttgcaggccatacgagcaatacgcagtatggtggacaaacacagtgaagcagctatctggcttgctggacactctttgggagccgccctagtgttgctggctggaaagaccatgacaagttttggattcctcctcgaaagttacatcttcaacccacccatctcgtgtattcctctagagcagttacctgggggaaaaaaaattaaaggtgtgtttcaattcaccaagactgtcgtcaaagctaccgtagctatggtcttaaccgatctacaggtaaataaataatctttataaaaaaattaaaaatgttttcacaacttaagataactagttcataattaattaagatggttcaatcattaattaagagtctcaatagctcaattaataaagtatttcacgaaaagtttagaggttgttggttcgagtgatacttaggaggaaaccatcgtaaatgcttttgtccctggctttagagatgtacggaccataacctcttatcgtgttagtcaaaggctaaaatatcaagtttcatccgtttgcgattccatgttgattgagatttttaaaatatataatactagtttcaagtttattttcttacaaaagaaaccgtgtttgtcttaaattattacaggttcaagaagacgatccaaaaacagcatcatggataccttatttatacgtgaacccagcagatccaatatgtgcgggatacatcgattacttcagacacaaaaccttcatgtctgagataggagcaagccacatcgagagaatcggtgctggaaagtcagttaggagtctattgatgggaaaatcatcatcatcagatttgtcaacggaacctcttcaccttcttccatcagcagatatgattgtaaacaagaacaaaccgactaaggttatgacagctcatggacttcatcaatggtgggagcgagactcggccatgagggaaaattgggaaagctgctgcatcagaccttaccctgacggcaaattggagcaactgaccatacaataaacaataaaaaggagactcgtatataattaggcgttatgccttcaagtgttcttcagtttccacttgttttcatgttttttttttctagcttccatttcttgtttgtctctatgttcccatgttttataactctttctctttattttgcttctttttagtttgattttttgttttccatgtaattgtttataataatttcttggaactatacttttatgttttctttaacaaagacaatatataataactcaaatataatgttataaacgtgtgattctttaattaaaaacataccataattaacaaaaatataagtgattaattaaaaccataccatttatgatatttaaaatatattaataaaagaattgaccatatttaattaaaagattagtttatagatatatatgtgtagttttgaataactaaaaattattggcctagaccggtacatcccttcagacaagagactagagcatttatatggtactttcacaaatgccactagaatcagcgacatctatgctttgcttgagaatttatacctgctgaattattaatacttgatatgcctctcaataacatcatgctttgatataaatgctctagtctcttgtctgaatatattatgcatgagattgaataacactatattaaaatcaaggcatgaaagattgcatgttcatacttatccaatttaaataaggaatttattaaaaatttaataaattttaagttaaacaattactatattttaaatacaattttagtagtaattgaatactttaaaaaaattgttacttatatatatatttcacttgaaaacatacctttaatttattaatactaatttaagttaaggtcctaacattaatttaacatgaaaatttataacaaaaaacttctactaaaatattgtgagaatttagaaatattgtatatatagatatatatgtactattttaaaaatatttaagagtaaaaacatatgttcctcatctttccttttcagttttgtagagtacataataggtttgttctataatttcccatattaagaggaattctgagttggagaaaacaaattacttgtaaatagtaaatatttagaaaataatatagttctccttattctttttcttaaggagtagtcagcaattaaaaatcaatatatttattttcttataaaatattttttattgacaatttgtaaataaagtaggttttgatacactttagcacgtttcaatgttagagagatggtcccattaaagtctccagatccataaattaaacttcaatacccacaagaagaaaagtcatctcatctgtagaaaactctataattgcctagtttcttttagcggattcgttttcatgagattcgactcattctaatagaacttttgcgtgatacaaaagggtatgttgttttctcttttcttaattgaatttccgttttctatttctttttgtagcgtaactacaacaaattttaccaattttttggagttctttttgtcttctcctcatttttcctgcattcatccaaaaggtgattaattatgataaattcaaaaagaattgatgtttctctacagtctgttttggatgattaggtagagataatatggaagaagaagatgatgaggttatggtcagagaggggctaatggcctctcaaagagaaatcttcagcatttctggtccaatccatttaacttccattgattggtatattttttttgttccatctctttcatttttaaccacaaattcatcttccaaattcatttcacaacaaattcatcatcactaatcctccgtttttgccaattcaacgggtttagccatagtcaactctaaaatcttctaaacattcgtttccacaacaagttgcattaaaatattacattcaaacaaacaaacaaaaaaaaaacttaaagtcaactcttttcttaaatactaaaattcaacttgtgtcttatgataggaataattcttatcatagaacctcggtggcatcatgtttggtacaagcagtgtacacattggaacgagacagacaacaaaacaggattggcctaaagtcacaagccaatcattggtgggagtttttcaacttcactttagccgaaaccctaatcgacgactcagacggatctatatacggcgccgttttcgaatacaaacatttcttctcctacaattaccatcacacccctcattcgaaaccacctcctcgtcacgtgattgctttccgtggcacgatcttgaaaccgcactctcggtcacgtgaccttaagctcgacctacgttgcatccgagactctctccatgatagcactcggttcgtgcatgccattcaggttattcaaagtgcggtggctaaaactggtaatgcagccgtgtggctcgccggacattctcttggagcagccgtggctttgcttgccgggaagattatgacaaggtctggttttcctcttgagagttacttattcaatcctcctttctcgtctattccgatagagaagctagtgaagagtgagaagcttaaacatggggttcgattcgccggaagtcttgttaaagccggagttgccatcgccgttaagggtcgccaccataataaggtacgtacaatgccattatacataaaacaaattaaatgttcccaaaaatttctaatattttgaaaaacttgaaatcaagcaaaataaaacttctaaaacatagtaggaaaaaaaaactgaatctatatatgtttagtacaaaacatcagttacaattagaaaactagtgaaaggtagaatataaatttcgaaaggagtgtatgactaagtttctatgggaaattgcaatggctctactctgaagttattggttcgaaccttacaagaaattgaatttaaatttatttacagggtcaagaagacgattcgttcatgaagttagcatcatggataccatatttgtatttgaatccgttagatacaatatgctcagaatacattggttacttcaagcacagaaacaaaatgtttgagatcggagccggtaaaatcgaaagaattgctacgaggaactcacttaggagtctgttgtcaggaggaggaggaggaggttcatcttcagattcttcttcagagcctcttcatcttttaccatcggcatatatgacgataaacgctagcaaatcgccgaattttaagagagctcatgggattcatcaatggtgggatcccatgtttaatggtgaatatgttttgcatcagtttaataactaacttctacttttgttgcttcaaatgctttgaaacctttttttttattttttgttttgtttataattgtaatctgtgaaagatgaaatttgctgcaggttttgatggaaaatataagtatgtaatatagagtcattaccaaaccattgtttccaaaagctaaggagattagttcaaagacagtgacacttatttatagttgcggacactggatatacatctgttgaacaatcacaaacagattggagcgaaagaacgatgaagatatttttcagttccaagcatactggtcgagccggttgtccataatggcagagacggtgcttataaactcatcttcggttgtctctgtgggcactatggcttctgcatcatgtatgatttgctcgatcacagattcttccttgagtgtttctctgcacattatgcttccgatggtaaaaggtgtgagaccctttgcagaacctttctttagaagcatggttgaaatacggaggacacgggtgcatgaaggtggaatctcccaaccatggaatctcagaagttcgatgtctttctcggggtccaaggatttgatgtattccaatgtctctgaagagtatggctcttttgcttgaggccagtatagccattcgaatgtgcaatcttcaaactgcacaagaacaaataaggtgctatgaaattaagaaaaaagtgtgaaaatcagagattcttgtgttttgtattcagtatagtcattttaccttattgggaaagcaatagccatggtctattggagtaagcaccatctgaccatcttttccatctcggctaaccaaaatgttgccagcatgacgatcagcattagccagtcttatgtctagtactgatatcttgtgaacctgatcgacagggaatactcggtatcccatatcttcgcaacttccaacattactcacaaacatctgcagtgagcctatctttgtgttctcaggagagaaactgtaaccattgggatggttgaaatctttgtgcaagcatttgaccattgttgttggcggaacaccagcaaaaccggtttggtcatgaggaaaagttcgtggtccagtcataggatagtccaaaatgtaggctgctacttctctgatagctccttcaccaacctgtgtgcctttctttagtccctcgccatctactgaaacaggctgtccatgcggattgttcacagccattggttcctcgtcaatgggcttgaagacagagacatacttgtgtccagatggatcttgcataaaataagctcctcctgatccatcagatgatcgaattgggccatttcccttctccaagccttctaaagtggagctgataagctctttcagcaatatcggaagtttaatttcaggattaacaataaaaggctccacgaagaactctttaggcttcgcttctgatgatatgttttttcctcttctaccatccacattgtgcttgtgatttacatcttcgataaacacttcaaaatccttccccactggtttagctctgactttagcggatttgctaattagcaagtgaatcacattgtctccattttgacagagatcagtgatgagtctctggtcatccagctcttcaccatctaatgtgagttcatgatccctggggattccgagctctttttcctttgaagcaatttgctgcttcacgtaaccaacatttctactcctctcaacaacgagctcaaactctttcccatcaacagttcttacagaaatggcttgaagatctgaaagtctaataaccaaatgcaacagtttcccatcagcaaggccataatctcgaatttgggaatcatttcgagatacctctctaccatcatacagaagtttctgcttcttcacaaaaaaacccttgatactctgaatccttagcttcacagatgctattgaatctgactccatgacccgcttagggatcacagatccagcaatagtcagaaaaaccaggattgggtcgtctaagttgaaaccaaaccgtccaataatacctggaaagttgacaagttcctccagggctggactcaacgctacactagcaactgacattccaactgtacacttctatcctaaattcctgggaatgaagagagctcaacagggaataaaggctgaaatcccaggaatcaacccttattcttctcccgtgagctttagaaaagaccaagtccctgcacgggttcaggaactctggaactgaaaagctttctaactcacatcttgccaatcaatattttccaaaagttcatattgaagttaagacaaccctaaaccccctatgattaggctttcgtacgaattatcgtagctgaaatgtatctcgtaatcacatcaatcccaaagaacctgaatgagagaaacaatgatcacaggaatcagtcatggaacatcaacaacaacaatcactattttctaattaacctcagggtattaaaaattatgatcaaacacaaaaaaaaagatttttaaaaaaataccaacctctttgtatagatgatgaactatataaccttttttttttttgttggaacatgagcaaactatataacctttaaaacttttgttctcaatctatatataattagaaatcttcaaagctaaaattagcttaaaaagcataaccaaacaacagccaccacaaaattagttttaagtcaacgtcttaatcggattttaatcatcacaaaaccaaacaggctggcctaagtttttaagactttatctgattactaatcttaatttaggtttatgagaaaattaagatttaaacactaattctcacacttttacaaattcaaagaagaagtaaaaccaataattcaatccttaatcactaaatataagtctcggatcatcaaacgagtatatctccagagaatcgctacataaatctccaaaatcaaaacccgatttcgaatttctacacacatttcccgatcatcgaaaccgatacaattcatcatccatgatcggaagagacaccggcgagaaaatcgaaaatcgaaaatcgaaaagaagaaattaatcaattcttcagagaaatcgaaaacaaacctagaaaataaaattaagaaatggtaatacctcggaataaaaatccgtgaagcgaagaatctaatcggaactggtgttattcgataaaacttactcgccaagtttccgagaattcgaaaacccctctcttcaattttatttcccccagaaaattttagcgttcccagaagaaagaaaaaaaaaagggagagagagaaacagtggtaactaagtcttctttgaacagcggcgaattttgtggggatgtatttatagagtttgacctcgctgacttttgacggaagtttaattgagatctttaacgccgtgaacttctccacacggtagggcagataccgtttccgtaacggacgcaaatcttttatcagacgaatctagaaattaccaaattcaaacaacaacactttttgctagtgaattctataaaaattgaaattgatcgttttcaaattaatacatttgtcaaatttctttgtttacaattggtgtaaatggaatagttagcaattttttggtcaatggaatatttagcataaaatgcagattttcaccattaaagtcaatgttagacaaatggcgatgaccaacgtggcgtcgttggaaaaatcgaaatccgtcaatcaccggcgttttggtgggatcagtgatacgaaccgatctataaaaccgctaaatcggtttaattttgggttgctttggtttgattcctgataaccgaacataaccgaaaaattctaacacgaaataggcagactcatgaagcctcataatgataattgaatagaaacctaaaccgagaagaaccatgtatgattgtaaaataaaaagtgttaaccaattcaataggcatgatatataatttatataccatgtaaagaaatgaaaaagaatgtgacaaaaagcaaaagcaacaacaggttctgtgaaagtatcttcataagttcttctctataaactcccaaatcctctgttccatatatatccggtctttcttcttccgtggcatatgccgttcatcgggaaatatcaacaactcgtaccgctttcccgcttcaacaagcgcgttcacaagcctagccgtgtgtctgaaatgcacattctcatcgatcattccgtgtactaacatcagcttctgcttatcggtcaagttcccgacatggtgcattaccgagctctttaggtagcgctcctcctccgtgggaagacccatgtacttctccgtgtagaacgagtcatagccatcccaagatgtaacaggagcacccgagacagcgcagttaaagatctcagggtatcgggtcaagagtgtagctgaaaggtacccaccgtaactccaaccatacactccaatgtggtctggtttagccagaccttgctcgattagccatttggccccagttacttgatcttctgcatcaacatatccacagttatgcttcatccaagattcaaatttcagcccacgccgtgcagttcctctgttatcaagctgcacaaatcagtgataacatttcaattctaaagcatcatctttgagtaaaccttattcaacattttcctgagtaaaaaagagagaagaaaaagaatttgtagaaccttccaaactaagatgcctctgcttctcagatactgtgtcctcatgtcgactgtattaatccaagaatcatagaccaactgaacgctgggacctccataaacgttaatcattgttttatatggaggaggaccaaatttcgaactgtcgggtttgtaaaccgcgccatacagtgttgtctttccgtcatttgcttgtatttgaacaaactctggaggctctagtttaaggcttttcagtatctgtataggagatgtctgctcgtagagaatcttgagtacagttccgtcactcagagagcaaagagaaacccgcggaggcgaatcaactgaatcatgaatgtcaacgaagttcttcatctggtgatcgagcacaacgatatgttttcctttcccatgtgtaagtctcatgggttgacaccgagatgtattcccagcttccaattttgcgcagtaaagattagtctcaagtggtccatcaagggttcctgtgaaatacaccagactcatcggctcatttacacctgctatttgctcaaccatccattcaccgctagtaatagctccaaggcatgtcccatcagactcataaagatacaaatgtctaaaaccagtcctctcactggcccaaatgaatcctcctgaacctctcgatgaagggactttctccagaggagtaaaacagtcatgtaaagtcacccacgtgtcggattcttccgtcaacagtacgtttccttgaccagtgtttatgtcaaagctgatgattttcagtttactctgcgacctattcagaacctgcactatgaggacattcccgggcagccagttgactctaccaagatactcgtcctctgtattgcctcttcctccgcacacaagattcatccaagtcgtctttccaccaccagctgaagaaactaccccgagacgaagtgtagaattgagagctcctgcaaaaggataagcatgatcttcttgcgcctctgaaccaaccgaacgttttccctgatgcattattctgaacaaaggaatctgtgaggagtcaacttctgtataggcgataaacttgctatctaatgaccaccaatacccatttctccgatccatctcctcctgaaatagaaaaagttgcaagaaattatttctgatataacattcaatttgtagaatgaacaaataaaatggagaagttttcagggaaaagtttctcacctgagctatgtactcagcaaggccatgactctgcaacaacaaaacaaatcacagttattctcctgagagtatgttgattagaccacaagaacagtcatgtagcaaaagctttacttaccaaagtacttccattggcaccgctagttaactgttgtgtctggttttttaacaaattgaggacatgcaactcggattctcttacgtatgcaagaaataagccattaggagatagacgaggatcaataattggagaagtgggtgaacttggaactatgagctccggatttggtgatgaagaaaggtccttcatatacacctaaccatggtcacaacacaaaacatacaaaaaggtaacccaatcagagtttagattatttcaagacattaaaaaaagaatgctacatgtaagaaagatcactaattcagctgataagattcagactctggattatgacgaacaagcacaagtcctctttaatatctttggatcaacgaaaccctaagagatctcctaaccctcccaagcctataggctctcaacaaaccacatggtcaaatgcccctaataagttctccttccatcacattctagttcctaccagattcagttcaaattcatctttgttctctaaaaagtaacacaattccagtaaaatttccacaggtttcaagaaactaacgaagaacatagtgtcgattatagaagcaaggaaaaaacagaacataccccggcaggtaaaggaaccacaatgaatctcatctttgagttagtcttgacccattcataccgagttacacctaaaccacgctcccgcaacctctccctcctcaacttctcttcaggtgaaatgttactctcatcaactccaccatcaggaggactaaaaaccaaattagattcccctttattgacatcaaaagcatacaccctccttttcaaattcttttcagggctaaacaaataagtgatcaaagaatcatcaggactaaagctaactgcagttggagctacataaccaggtaaaggcgtctgaacaatatcttcaaccccaaaaggaacgtccttatccgccataaagggagatcctttagattctcaaaggtatctactttccaacaaactgcaaaataaccatcaacaagaatcttcattacctttgaattgcactacacaaaaaggagtcaactttatcacgtcaacgaagattaacaaacagtaatcaattatatcttgaatttgacatcaatgggtacaacaatgatcaaaatggttcttcaattcctcagcaataagaatcaaatacatgcgtattaacggaaaaaggaatcgtcgattgacactggaaagatgggaacttgttgaactaaacgaatttgaagaggaagaggaagatggagattagagttgaagttggtgggcttacattggaaatggagctgatcagagagattgagagatagaactaaaactggtttggtccgtcttggagatagattagagagagattcctcggcttgctttgtttttcaatttttatatataataaagtgtttattcaattaaaaattcaacattatttaatatctagaatgtataaataattttactcaagaactaattaaaataagcaaaaattattttcataaatcatctacttttaaaatttcgtttgatatatattaatattatctacaataataaaccatgtgtgtacaaattttttattgttattctaaaaaaaacacgaatattttcatgtaacaaaaatatgaatatccgcaaaaggtggatcatatattttggtatatacaacaatgaagcaataatagactagatttgtaaatatttaattagtaattatgtatgtgagatggagagtcgctatgtaaataactaaatatatacagtacacaaggcaagtccaatatcgttatcaagatcggtttatttccaaatcctagcttacatctctatcttcctcttttaagatattgtacaaaaatattcgttttatgtatatttatctttccttgcatggcttatattaggaagatacgttttgcaattccatttcttcctcttcacaagatgaaacgaaacttggaaacgtcctatttatgtccctacatttaccaagaatcttctgattagtcaatttgattcaatgcaacaatcaaagcagttggtttggatcaaagttggtcacggtgtaaattatgaactcactttagatatggcaaagtcatgttcttgatgagcgatggattcaaggatacaaagtctttccattcatctatatcgatttttccgtcgtttttgcggtctgcttgcacgaaagcctgcaaatatataccaccatttccttataaattctttatcatatcatcttcagtattggaattaatatctagtaaacaaatgtgcatcggtgtgggagtgattaccttatccaccattacttcaatcatatcttcggaaagaactagttcggattcgtgaagaagcgctactaccatctctttcaactaatcaaaatgtaattcattatggtatatacatgttagatcaacacacataaacgttagtggagtaaaactgtttaatctggagggtaccaaaacaaagtatccgtaaatggactcacttcttctcgctcgatgaatccagtttgtcgtaaatcgtacaacttgaaagcaactgcaaattcatgagaaaattctttgttagttagccaattaagaaaagaatatcaagtaaattcacatagaatgaatatgaaacaatttttggggctagaagaatgacatttgactttttcatggaccggcgcgcttggatggaagacacctaaggaccggacaaattcaccaaactcgatcactccatttcgcttcacatcaaatacatcaaatatctgcatattataaaacagaactttgtttaaatttacatatgttttcaataatgtcacttgttctagctaggtagttactatatgtacccgatcagcgaagagattcctccggttcctatttctgaataaagccagctgaaattcttcctgcaacatcaaacttttaaactctaattaagctatatagattacctaattgctgtctacatatggaccttttagagtgaaagaagaaaccttatgaataagaccatcatcgataattgagctgcttagcttcttgaacagttcatacaaagcctccacttcttctaccgtgactattgtccctcccattacaagtaaaataaaatttgaaaaagtttaccaaactctacaacatgctattgtaacatttaaagattgtcttactaataagattttaaactaaaaactaacatggcgtgacggatgcaagaagctcgggatcctcatatcccggtggtcgcattgcattcttcttcttcttcttcgatacagagcagcccatacaaacacacccttctctcaactgttattagcctttgcttttctcacgctacaaccaaacgcaaataatcttggttaatttacagatatttcattgttcctaataatttgatgattttataaaacacccttcgactgaatcctacattcgttttcgctggttttacttctactaaaaatggtcctagaacaaaccaattaagatcgagtgcaattaataataggcaacttgtttagtttgtcacgttattgacttttctagtgttttttttgtggtcaaactcaaacaaagtaaacatattttggcaaactcacgagattaccaaaatgtttctaatgaaattcaatatttaattacatatacatacatgaaatattaatgtagatgagcactaatcatgtacatctaatgcatgtatatatatatcgtctatgtatatgtaacatttgaatttcgttaaaggcaatctagcgtcgaattcatcaaaatctgcaagagtttgacaaacatcgatattaaaattttgaaagggtcgacgtttgagcaaatatacaatagaagtcgacggctatacgaacgattatgtcattggtttatacatttttttttttacataataaatacataggatataggtggcaaagttagccattaaaatagttgtagctttcacgacagctagtaagctctccctaaacaatcaattcattaacagaagtagccaaaattagaacaaaaacagcgttttccctatttaatctataatttagtaatgattcacaataaacgtaatgaaaccaaatattatataattcacagaaggtgtaggcaagtcgccgtattagccacgctaatgactaggtgtatagatataagagataattagtttactcctaattttattatccctaataacatagataaatgatcaaagtctcctatgatatatgcatacatatagataatacataaatacaaataccggatcaatatcaaatctaatcgacgttggtccacgtatatacatgaatcagtcaatgtactctagtaaatatctacaaagatgttttcttttcttttccaaataagcttgaacctatgtccaactcaatcacaagaacacatttaagcgagtaatacaaccatgtcgtaagtttaggaacataataagaagccggataggttgaataaataacggctttgaatggtaactcattatcaaagttgtacaaactgtacaactttgacagttaccattcaaaaaaactttatcaaaaacgttacaaaaagttttattctaaacttttctgtacagctcttttagacagttttgtactatttcgtaacagtttaccgctccagctaacagctaaagttttgtgttaccaatcagacccaacatgatttaagttgttttggtgagtacatttttaagtgaagagagactagaatggattttgaacgaaaaggatagagaactaagagaagagttacaatatgaatggccatgggaccacattaaaaagtgatgctttatcaaaaatcaataatcacgagattgagacaaccttttgttgcttttttcaatgtaggcaatttatatgtgttttactaataaataaaacaaaaagggcttgattacacttacactaatatctagagactatatagtatatttaaatctcgttttgttccaaaaaagccacgtaaaatcctcaaccatactagcatttaatttggtacatatcagagcctgtctttgaccaggcaaagcgaatcttgaacttggaacctcaaatctaatatagtatatatttgaaaactacatgagcctagttggttaattaatgaatcattaataatgatcaactaatgcctaaggaaggttttggtgcatttggcttttctatgacatttctaattaatgtattaatttatggaccattttgattttgttatgtgtggagcctccaaattctcattacctgttttttagatctatacgtaatcatactcaatgtacgtcgtgtaaacaaacttagacatatctaatttagaagcagtattttcatcttgttgtttacttctcgcgatctttttgtataattaataacaaaaatgttgtttaatcaaaccggccacgcagcaatatgacgttttaaaattaattattttctctataagtatttaaatagtaaaaatgaaaaaaaaaaaaacttgcagctattgacttttataatttatttgctataaataagtttattaggtgtggtctttgatttttagtaagaaatcaaatttgccatctcctctccttagactctaaatcaccaaaagtgacacaagaaacaaaaaaacagttctaaatatctaatggctaccaactaattaaacacccaccaaaatcgaaccgagatggaccaaaccggatatgatccaatttgtaatctctaatctgaaataacttgatttcgattgaaaccaaaaccaaagccaaattccattgaatgattaatggaatgttggaaactatacactcaattagaagaaaaacaaaaatcaaacggttcaattcagtctatagcactaaagaactcaattgagtcagttttaaagaatggttttgctttggtttgtttgttttttctaatatttaaccgaattatactaaatcttatcagaagattcctggaaacacggacatattttgactctttcttgaagaaaacccaagatgggataaacttcaagctcataaacctccatttcgaaaaaaagagagaggaaaacagtgaattcctttacatatatcttgaggtggactaaaaattacgaaacagaaaaccaaaacatggaagtgatagaaaaaaaaaacattggatagagatgaaagattttctcagcaatggtgaatcgaagaaacaaaaaaaataagatcaaaaataactaaccaagatatggatgaatctctatatgttcttgtcgactcttcacttgtctcgatcttgaataattgaataatggtgttggaagaggaaaagggcaaaatgagagttatttaaatagaagaacaaatttgtgacgagcttcccaacatcgggttaggtttgtgtccgtccatgcgcagatggatcccgatgttatgtcggttttgaaaatatatttttatatcgtgtactataaactatatagcaatgtttcctcgaccttctatttatgacaaacaaaaaaaatattagagtagtactgttttcaagtcccacctcactttttaatttccttttgttgacacttgtggtggttgttggcaaataatcttttaaaaaattataaatatgagaggcagtttttgatataaaaataacctaaaatattattcacttctgaaaatacaccaattttaaaaaagttaattatatatttcataagaaattttgtcttacaccttcgcttgatgtgtttgtcttggaccttagtttgatgtttgatataaataaaatggacactcttgtgaccaaaaaaaaagtcgctaatatatttcttaaactaactaatacaaattttcttacagatgattgataattacatttatacgtatgctcatttttgtagtaattattatgattccgataaaaatgaactcgattgtttatgaaaattttaacaattaccatgaaaacgtaactatgaaagagatatatcacattcatcatcgtcaagctaccagattccacaatgtacatcactttttatagggtttggaacttgtcagctgatcatacccgtcctataagagagcttcctactcttacataaaaaaaaacatgacaacactgaaactacatgtgcctaacttttctaactttcgtcatgatccacagagttttattttcttagttcaattacaaaatctttattttatttatagttgacccatcatttcatttgcactttttcaattaaacaaaaaattacgatgtgaaatgataaattttccttcactttttgcccactagtattctctttttgtctgttggattggtgatattttaaaagtttggttttgctaccatggctattttcttataatatgttcgttatggttcaaaaaatctagttatttaaaaagatcatagcagcaagatcaaaaacaaacttttgaaatagaaaattggtgaacaaaataccattaaccgaaaaagaaaatgaaatttcagaacaaaagtgactaatccaaaaacacaaaaaccaaaccgataaccaacaggtaaacaaactgtttgaatcgttttaggtccagttttactctcattactctaaagactgagactggattagctctaatgagtttgtgacattgtgatatttttcatttgttttcttcattttcttgtctaccttacgcattgaacacttctcctcctctatcttcttcgctgccattctcactttatctcttgctgcttccatttttctcagcttcacttcttcatcctcctttagtgtaatcgggaaatgaaattccggtatgctgatccaaaaaccataaatcatatcatccgcagtaaatacagatgcaaggaataaaactcgagttttgagctttacagtttaaattcaagaactaaaacggatacaaggatcaagaaaaggtcaagtacctgcacccggaatatatgaatccgttatcttttgcgataaaaccatctaaagagactgcaccaccaccattgatgtgtggaagagctgctttaacttgcttttgggtctctatacctgtaaattcccaaagagattatagaacaaagtctctctaagcccgtatcctgagtaagtttgaacagtgagctcctctggagccaaatcaatcatgttcacggcatagcccttgaaacccggtatgggatctccatcgggcagctttgggtcatccatggctaatttcttctgaggatcgttctccaaaagtccatccttccaaggtctgcgtgtttgaaaagatcacttatgattctgtcagaaacgactctaaggtttagctatcgatatgttgacaaatacctgattgcatcaagacatagaacatgaaaccgatgattggactgaagcctgagaaactcagcattattaggtccaatttgtgccgatttgcataccaaagcgagcaacatgtcttctcccaaatattcagataacaccctgcataccaaatgacttcagatacaaaagttttggccactatgatcagtagtaacactgtgggtataaatttatgtcacctgctaagggaggtggaggcaactgaaccaagaagtgctacgaggccaaatactcctttctttgacagaaacagtgactgtggaggcggtgactttctgtacaaacaacagaaaactgatgctgcagtgtcatgatgcttctcttcaatctgtttcatcattgattctttggtggataggcattctgggaacatagcaccgagaggttctagagaagctgagataaaggtttaggcaacatgagcaggtaagcatcaatgcaaattcaatccccatcgtagttatcaaaacttcttcaaatgataatagttaccttgcaaggtacgcaactcttccttagcctggttttgttcagcttccaaacaatgtaggcgctcatctatttccactctgtgttcactgtatccaataagattttctttaaagctctgcaggaaaattcaaaagttaactcggaaaacaaaagttagatcattcgagaaatcgttctgcttttcctaggcataaatgaaatgtaaacatcaatatctgtggcttaaatggtgatggccatatacctcagtgaactgtgccacatccctcaggctcgggccagtttggctactgagagccggtgaatatgtggttgaagccatctttgatttaggtgttaaacccatccttgaataagatgtctcatctctttgaagtatttgagcaggtgtaagctgaatctgtaaatcaagaggacatgttatcaacaaccggcattttctactcattgtaaaaacatattgcaacttgtaagataactcagtccacaacattactacctttaagctcagatgaagctcgggaaatcgagaatggaaaaccttgaaagaaaagacaccctccctctcaggtagagaaagagtaggaactttgcaggaaccatggacaaaggcatatctgatttcactctcatcgctgcttgaatcagtttcaatgctcattgtatggaaacatccagatttttcatcatgatggatactagtatccataacaccatctgaatccgtcactttaaaaatgaggtttgtaagatttgaaccagcaacacagcattcaggcagctgatcaaaacaaacgatttcagaatgagaaagacagaataagagaaacaaactaagactgcattgacacaatcaaacctatgttacagatatactaacctttgttaagagcatgagctctcgtctctcagtctgagactctttcttgaagatctcatcaataccagacataaccgagagagatactacatattaaaaaaaaagacattagaaaataagaagatatgaattattacatcttacaaaagaatggtagcagatgttactagttttcccatagccagccgtgacttggagtattccagacagatcaatgcagccacaactattaacctgtgacatcatcaatgaacttagaagagtaaatagaacattgctaaattcttgttcagtgataaacagaacattctcgcaccttttggtttaagcccatcgagtcattgatacaatagccctcaatacatatcagaacattggtaccttctgcaacatggttattatatccatcgaacacctgcataaaaaatattgtacatagcttgatttgatgtaattattcaatacttaacaaatagacctttacctccaagatataattttgaacagtagaacctggaagcaaattctccaaagcctctggatacttctcaacaacatgcttcaaaggtccaggattaactgaaatatgaaaagcttgtgaagtaaattatcattctacagaaaagtactcttctaaatcaggttagtttgtaactaaaaacatttcctactgttgtcaattttctctgttccataaacaaagtagaaattataaaaatgtcagttagttggagtaacactatttaagattttgcagcacagacatattactatacaaaattaaagcataaggcttacctttacaagaaactgagacagaaaatggttcatcaacgcaagagatagagcaaggaggaagtgaagaacccaccctgtagacacaccattatattgatcaaagttgagatcttaaagtgcaggaacaaaagaaaggtcacatgtaaggagtcttactgaacattatactgccgcgtggacttgagattagaagcaagtttccaacttcccactttcgaagacggttcaacaaccaccctttcgttagtagtaatcgagtttccctgatccgcagttacacctagatgataataataccaaaaaacacacattaaccaagtcttgacacaaaccaaaagtttttacttcttcttagtccttgtcaaaatctgactccttacccttaatatccactttcttccatgtcaactttgccttttttctgcctctttcacttgtttcttgaaaaccgacttgaatttcttctcctttttcttcttgttcttttgccgttgttgtgcgtgttctctttctcccgtacatcctctccaccttgcttctcttctcacttgactcatcttctttctctttctctttatctgtttcagtctcatcttcttccaagtcattctcttccaactctttctctttctctccatcttccttctcacctttagtatctttagcttcttttagattcttcacacatgattccacatatgtaagtcttgtatccatgtcatcaatcttcatatatattctgtttaaaccatcttccaactgcttctgtagctgctcaacaattcctttttcactcaccttcttcagagccacctttttccgaccaactcttaccccaacaacattcgcattctttggatttgcctcaatctcacggctactaacatcttggatatgaagctcttcaaaacatattggcttattttccttaattatacgcttcgtccaaccatcaacaatcatatcatccacatcatcatgtccaacctcatcatccatgatttgcttcaaaagttctttttcactaggagatggaagcatgatactcttaatttcctgtgaatgaaaaaaatacaatttgtatcctatactctcaattaaaatttaaggtaataatatacgattaaatcatttctaacctttgttgtaccaagagtatcatacaactccgaaataggaaagcctttcatactactaggtttgaacttcatcttgcacatcctaggacactcaggatctgcttctctaacatgttttctaaagttgttcattagatttgggatggtctcaaacgctagaagctacagacaacaccaaaacattcaaacagtagttataccaagttataccagttgtaaccagtttatatatcataaacacattcaaaatacatacctgcatcacgaagctaggaaacacccatgctgcgcccaattcttcatcaaagtggtccatgagatgaaaaatgtctttcatattcttatcaaatgctaatcgaccccatgggaatgttttacaccattctagatcttccacggatttaagaaagaaatcttccacagcctctgctttttcccctgtttttctcttcccaatgatgacgctgcataagaagaataggaccgccattttcaaacgctctctcgaagatttcttcattgagagtagttttgtcttcactttcgcatatgttactgttgcaccaacaccaaaatgcttaccagagaaccctaagctgccaaatgctttatagttttttggataagaatggcagtataaaccagagatgagtgcaagttcttgaagagaatagcggattggaacaccgttgacaacaaaccaacattccttcttcttatcaacacaagcggtgcgaagaagaagcatccacatggccattaccttgtgatttgaatccgtatgcatatggaagaaatgtttgaactgtggatgctcccaaaaccatttcttctcctcacttgaaagatgactctccaaaatattcaccacttgatgaatataacactttgttcctatcttgaatggcttcaaataatcggaggggctaaagtacattttcaagggtcgtaatggttcagtttcctcttcagaatcctacaatcaatatcaagatgtgccaagttacaaaatcatctgagttataccaatttctactaagttgtacacagaaacataccattgaaatttgcttagtttcttcattatcatctccaagcaacacttgttcttccgaaggattgtactcttcactctggctcgggttctctgtacgcgccgtcttacaaatctataaacaaaaccaacaaaaacgaagaaattcatactcggacctaagtaataaccttgtattttaaagacacataaacttgtaattatatatgttaactatcacaagtattattattgagaaacttaaaatcagatccgcaaaagctgtctcaaagctataagtttgtgtagtaacagagcaagtagcacaatgaaaaaacaaaaaaaacaacgactcacatcaagacggagtacattgcacaaatcaggcttaaacttgtcaaatcgaacgatttctttaatcttttcgccgttaaactcgagataatatttgacagccaaattccaatcaacccgcttcctcttcttaccggacaatacacatttgttcaggcttttctcatattcctctttcaccaagttaacaaaattattcattgacattctaggttcagggttggtaagtgcgagtgtcacacttgtgctgtttggtaaaagaaccttgagcctgtaaaacttatcttctgcttcatcatcatctagactcaatactctcccgaccgatctcttattactcatctgaaattcaaagcacatgattcagaagataagctaccaaacaaaaaactcataatacaaaggtacatagaaattaactaacaaacttttagttggtctaaaaacaagaattgtaaaaggcatgcatgaatacgagttttatacattttattggaagtttgttacaaattgggtataaaaaattgtttggtgactaagaaagcaaatatactgaaagctacatatacatctactagtacaagtgcatgtaaacacaaccacacttgaaaaaaaaaaacagaatctatgtagattgatgattttcatgttatatattcaataaaataaaacaagccaaaatgggaagactaaagttgccaaataacaagtacattgtaatcttcttcttcgctacctgctcactaaatagcataatctagggggcttataagagaagaagattttcaaaaacaaaagaccacagcaatatatttatagaccaaaaaaaaaaaaaaaaaaaaaaagatcttaggttttgtcagtgatccgataccttagaatttgaagactgatttctgtttgagtaatccaccaaaccccgactgagaagaaggagaataaaagtgagaatgttgggaatataagaaaaggaagagtgatggcgtgaggcaaattttttcaaatgagtttttattggatatttttgggggctccattacccaagagaaagcaaaaagagatgtgaaatgttcaagaaaaaacgaaaaatgaatttttagtttagataaatagtgaccgtgttatgtgctattatcattctataattttctttcaatttgatttgattttatgcggccattcaattttaatcaagtaaccaaatcttctgctatcgacatagttaacctgtgacgttttctgttcacagaagtacctagagcttttgatatttttggcaaaacaccaaacctttttatatttaccaaaatatccagaacgttttagtcaataccgaattactccaaaccttttgcaatttacaaaagtactaaatcaagaaaactttttaaaaaaagtaaacctaagagtctgccatagcagtaaaattttggtatttctcatttgccttcttcaactttttcaccaacctgcgcaacgaacgattctcctcagtcatcatctcctcagtctttctcttcttgtctcttgttatttccagttgcaccaatgccttctcttgcctctccgttacggttattggaaaatgaacttccggtgtactgacaacacacaataaacaaagatatcaacactcacattaaccaagacagattaaaaagaaagcaaaaatctggaaggtttctaggcctccaagctttagaaaactgaaatgcatttaaggatcaagagaaagtgcatgtaccagcaaccagagtatatgaaaccgttttctctggcgatcacaccatctagagacacagcgtctccaccattgatgtgaggaagagctgcttcaagatgctctgcggtctcatatacctgcaactctctgaaaactccatagaatagtgtctctctaagcccgtaacccgagcttgattgtatatccagctcctctgaagctaaatctatcatgttcacagcgtagcctttgaaaccgggtataggatctccattcggcaggtaagggttatccatggctaatctcttctgaggatcattcctcacaagtccgttcctccaaggtctgcatgttttgaaccagaacatatctggttaagcaaaagattaacacgaaatccaaatatcaaaggaagagtaccaaaatacctagttgcatcaagacaaataacaagaaaccgattggtgatagatcgtccgaggctagctgcttcagattgaaacttgcgatactcatcgcttttgggtccaaactgtgatgatttgcacaccaaagaaagcattgtgtctttccccaaatattcagacaaaaccctgtcataccaaataacttaggaaattgaagatttgccccaagtgtagacactatgaatttgatcagaaagactctggctataaaatcaatgtcacctgcttagcgacgtggaggcaactgaacctagaagcgctacaacgccaaacattcctttctgtgacagaaacagagaccgtggaggtggagcctttctgtacagacaacagaacactgatgctgcagtgtcatgatgcttctcttcgatttgcttcatcattgattctttggtggataggcattctggaaacggtgcaccaagaggttccagagaagctgagatgaatttacatgaagaggtaagaattgccagtttatgctacgatccgccattattttgaattagaaaactgttgaaataagacttgtgaaactctccattaagtattgagcatgctcagaagtcagaactaaagaagtaggcaatgttctagacaccaaatttagggatagtgtttcaaaaacagaacgcaagcaaataaaaaaatagcaccaatgcagcttcaagttcaaaccccatcatagttatcaaacttcaacaaatcaagatacgatttaccttgcagtctactacactcttgctcagcatgttcacgttgagcctgcaaacattttaggcgctcttctaattcaactcggcgttcttcgtcaatattgattttttcttttaaatcctgcagtaagaaagggacattataagcatgcggctgagatgaactcggaatacaaaagctagctcattctagatgtttttttgcctgcactaaggtataaatgaaagagaaatatcaatatatgccgcttaaatggtgatggccatacctcagtgtactgtgccatatccatcaggctagtttcgctactgagagccaatgatgatgacctaatggccaatactccaaactgtgaacatggagtcggccatggatttgtgattgaaggaatccctgattcaggtggtggagtcgtttttgaatggggtgtagaatatccactctcctctctttcagatgtgggagcagatgttacctgaatctgagaataaaaaaatagagaatcagagtgaaaaagtgtgttaacacgagcttgaactgaaaattctacccatagtagaaacatagtgcaacacatgcccaattcaaaattactacctttatgctcatctgcagctcgggatatcgagaatggaacaccctgcaagaaaagacaccctcgttctcaggtagggagagagaagaaactttgcaggacccgtggacaaaggcatatctgattgcactttcaacgctgcttgaatcagattcaatgctcattgtatggaaacaacctgatttttcgtcatgatggatgctagtatccaaagaaccatctaactccgtcacttggaagatgaggttcatgagatttgtaccagcagtacagcagtcgggcagctgatcaacacaaacaatttcaggatcagaagtcagtagagagacaagttcctgacaaaagcttggtggcaagaaacaaaaccaaactgcaccaaaataatctttacctcggttacaagtcttagctgtcgttcatcaatttgtgactctttacagaagataacttcattaccagacattacagagagtgatactgtagagaaacaaagacgctagacaatcagcaaatcatcaaaaaggaatgtcaccggaaaaatatagaaattgaaggatcacattaccagatttcccatagccttctgtgaccttaagaatgccagatagattaatgcagccacgactatcaacctatcatttaagaaacaaactgcgtcatccagatagtggtacaatggcgagaatacgatatactatatactcagtaagtcaaacagagattcctattcttgactaaaataagcttctcacaccttacggttgatgcccatccagtcttcaatacgataaccatcaatatgtatcagaacatcggtcccctcggcaacatggttattatatccatcgaacaactgcataaaaattatggtcaacttaattcggaggaaaagctgattcctgtttgacagcgtgcatagaccgatattatatacctccaggataaaatcttcgacagtagaatctggaagcaaattttccagagccttgggattattcacagcaactcgtttcagaggcccgggattaactgaaacaagaaaatttcgttagggaaaacaatttctacataatataaacattaattgttcattttgcatgtccttacgatgtcactttgacaaatagatacagactacactcccttattacataactatcagaaatcttcaactttctcagttctataaagagagcagaaattacagaaagctccctaagttaaagtaacataactgaacgatacactccggctctgatttcttttcgggtgtaagtacatctctgatgagttatttgtgaaacttaacaagggctttagcatatagacttataaagaccaatactagaattaaagcttacctttacaaggaaccgagacagaaaaaggattgtccattgcacgtatctctaacgttgcttcataattaggtcggatctggtctaactcatcagtctcaacgagcatattctgcattagattcggaaaatcacaaaattatgtatgcttaccaaaaacgataaccatcgtgaatggaaatgttcaactgcctacactatggactgtatttagtatctgtcctcgcttgacattaacttaaatataatcataacgtcagtgcttataccatggaagtaacaacatacctcgattttaagaattaatccatcatttatcaggttggtctcaagtttgtcaattttgattaagaatccagggctagcttccaattcaacttccagacttggaacagaagtgaacggaatcttgtttttgtacttatcaaagcaagcgatacggaaaggtggaagagaagaacccaccctgtagaaacaccattatattgatcaagttcgacaatctaagatttaatgtgaaggaaaatgagaggtctgaggcatataaattccatttctaaaaagattatgagtcttaccgaacattgcacggaagggactccagattatcgtcaagttcccaccttgctgccttagaagaaggtctaacaaccaccgttttgttgcacttaatcgaattgccctgaatataaagtgtttgagcaattacattataactgacagatagaattgtaaggtggaattctgttagtttaaatttatcaaacaatcctttcatatacaaaaaagaagagtgtagaaagttacttacaatggagaaagaaaaattgtaggtgccagctttcttgaaaaggtttggaaacttggacccaagtgagaagatgtaaagaccactaatccctttacgggatgtaggaaacaagcgctgcgaagatatattcttatcacttgatttcaattttactaccatgaccatttcttccccatccatcttaacgatatttttctggtccaacttctttgacggagttaaagacgtgaagcatgcaggtcggacaactgcaacaatctgtttcggaggagctttcccagcacgcacagaattgccaatgggtagttcctgtaacatattgatacataaaacgttacaatcggtgataagcttgtttgaaatacaaaggtgcttagttttgtggcaacgatttggaaacaaaagtgcttattgctcattatatgtatttgcacgcaaaggcagttgacaccaaacactatcacttaaactgacaatagttcataaaaaataatgaaactttcataccccatcaatcttcaattctctgcaatctctttcatccagcaaatcaatttttgacggtgctttttcctgttgcttatcaagttttctattccattcgttcgcatctacaggaaggcactgagcaaaaacatttcgcagattgaaatcatttgctgtatgcagaataggagaataaaaataaaaaaataaataaaaatggtaatagttaagtgactgacctttccagagtcgattatagtgatcggtaaagataaagaactctgaacttccagtttcgaaattccatcgatgattgaaagcttgcatccctcgttctcagggcgatcgataggcctaaaattaaacatttaagatacagaactagcattgaatatacagaactagttaaatgaaaaaaaaattacctgcataaaatccgagtatcccctgcgcagaagacacataaaaaccatcatctcagctgtagccactacaaaaagatattctatttgtagtttaaactatggtgtagatattactaaccgcctgcttcgtcctcaaacccttctattaggaaatagtcaatggtggcatacacattgttattgtgaatcccagcataagctcctctcagaatctttatattctgaccacgtttccatgttttttcttttctcctaacttccttatgcaccctcacagctacagctcaaaaacattggaggtatgagcacccaattcatacaaggagataaacttgaaatatatggaattatccattctactacaacatcaatgattagtaaaaatatatggatatatgataatgcttagaaaacatgcatttttgagcctatagctttccaaacaaagctaaaacataccatcacgcaaaatgccaagggcctttttatccaaggatccaacaatgaggacagcttcatctagacccgatgcagcttcttcatcatgggtattatgcatctccaaaacccattcttgatatttttcctccagatgcgcatagctgacagattttccttctctatgaatcacaatattgacatctgtaaaaacaagaattcattataatccaattacgacaaggaatggaaaaaacaagattgcaaaaggatttcaaactgaccatcatccttctctttctccgtcgacttactaccaaagtttcttaaagccactgagaaaggattttggcttgcaaggtcagtctgtaaaaagcttgtttagtgatcagatgataatgtactaaacacgtttaataatctaggattagtgtttagctcactttggagggcgttgggctaaaaccagcatccaaatctgcaaccacaaagagtgtacactcataaagaaaaaaaaaacagatgtacatatacaactgacaatgtatgagcacttcataccaacaaagcattttactcttcggcagcttttctgcaaagtagaagctctgtttcctctttgcataaacggtattgaatcctacacatttattgatgacacaaacaacgcaagagttaaattctagttttcaagcatattcggagaacttgcaagccctctacaccataaatagcatgataatagttacaagagaaaactaacccaacggacttctggaagtaagcgaccaagccttcttaatgaaacacggccaaaagtctggaagctttcagaaactttgcatccttcctcttctaaactctgcaaaattttctcaatgctttcttttccctgcaaagattctaaagtgttcagttcgagaaggtagccaaaggtaatgttttcttctgtaaaaaggattgttatacctggacgattggaaaataaacaaacttgaggcgagcatttgcctcttgagctgtccctggaacacatatataatcagaatccaatgatgataaactcttgggattgcaatttttgtgcttctgttaggagggcatttcagcgtttctcttaacaaacatgatataggctctctaaaaattccagtgtaagaagattatgtatgtgttggtggaccacaaaacaactatcactgcagtttcattataagcccaaacaaaaatatctcttcattggaacgtaccagccgtattttaaatagacttaataccggatactgaggcaaaagcagccaggagcttaactaataggaaacgtcttgatctgaagaggggtttttaccttttcttttcccaccgaaaagagtgaatcgaatctgaaatgaaaaaaattgacccttggagtgtaggttggtaatggcaacctctccacctgctatctcagccaaatcttccccattgacctgaaaaggtgaaagaataccaggaaaagagtatatctaagaacacttgaagtaatttatcttggaataataataacaaatctgaaacaaaatttagctacaaatgataatcttagtaatatcaaacgagaacacaactgtcaactgattagccaatgatgatgataacaaacctgaaacgccacaggcctttcagtcctcccagttttggagagttcatcacactacaggttaataaagcaaattaaaacagtgacacttaatccgagccaaggaaaaactcaccaagaaaatggtcgcaaggcaaaactattagaaaacatatatcaccgatcagaaactcatcattttttccatatttatagcacagttttcaggcatcaccggatccatatttggtaaagattaacatgctttaagaacgaattaaagccgttaacaaaatccctagcaattaacatggattgtgatatattgtattatcaataccctaagaatacctggatgtaaggaaagtaaatatccttgagcctgcactggagttgatagatctttgagatgtcaaattctgattcaaatatctcgacctaaaaagaatatataccattagtatcagataagcagttgatagcatatcgtagctcagttatacgagaataaatttgaaaatatgaagatcaaactgtcatatgagctgagaacaacaccatgaagtttctacacaatctctagaacacacataatatatatgacagttatttttctaatatagaaagttatataatacacacaatctctacataaaactgtcatatggtttgtttctgcatctctgatagtatatagaaagttattttcacgtcatatgggaacaagggcagaaaattttgaaaaagggtgtacctttgtaaagcttccatgaggggataacttcatttcctcctccgacgggtccctcatgccaccatcagtctatacaagatattcagaattaattgtttatgaaacattgacgagtacaagaaagaacaaatgagctaaacttacagatgaagaagcatattaccttccagttttttcccacgatagaccgattgtcaatcaatgcttctttcttgaattgcaaagtgaacactttcttggactcttttgtcttagaagacaccaaagtacgcctgacagagaagagagttagacgtaacaagacaatgcagataagtatgggtaaacagaagctgaagtcgcaccttcccaagaacatagaagcataaggacctccgtatccaaacatcccaaaatatggctacatagaaaaagagtaaatctttcttcaaatcagtaagataacaggtagttatacagaaagaacattcatactgaaacatgtctacagagtcatccatatgttgactgaaagtacttaactatccgtctaatattttaaacacaaaagttaaaaattgcaagaaggaaatgaacctaagctctttgagactaatgaaataccttaaggtatggtggattgcctccaatggcaccggttttttgagatctatgtagtgaggcccctattttacccctgcataatttaaaccaaatgtgaagaatgttcaccaaaaaatcaaacctgcagtatcaatttgagtaaagaacacttgattgcaatatcaatctcaatacgtaaaatatgtgaagttgtttgttctatagaacaattttctcagttcataatcataacccaatagccgtccctagcgatcatatgggtaacaggttatcaatatcttctatgttctgttagcatttgaatgaaattgaagaaacaatctcaccatttatcaatagagtttccttcgctactgtccattcctctcccggtatcaaagactgtaatatggtcaccagatatatccacactgcaataatcacatgaggtgaagggttacactcaatcttggtcatttaacctcctatcataaaaacaaacctaatcagttttcgagctccttcacgataaggccacacagcttgcaaggaattgtcctgtgaatcaagcaacagaaaaattaggattccatatcaggaataaacgagaaataatctcaaaattagttactaatcgagagtaagtgaatccacttgcgaaaaattgtcgtttaatgtgaaacgcatggtatttacttcagaaatcaaacaagcaaatacaacaatgtgaatccgcgaaagctgcctcaaacaaacataaattttgcattaggcattctatctttgcaggtaattttactgaaacacttactattagatccgcgagagctgtctcaaagctataattttctggtagctctttaagtaggtcagtatccggtgtcaaatcccacaagttctgcaaaaaacaattgtaaaccatcatcacagaccaacttaaggagacaatgagataataagcgtatatgtttcagaagaataatactgacctcatacatggtggaagctataccagaaccgtcctgacccatacatagaaattgaggcagaaaatatcagaaataagaagatggaacaaaaagagacaaagacttgaacaaagaaagaacaactcacatcaagacgtattatgtggcacaagtcaggcttaaacgcagcaaagcgaacaatgcctttcatcttcccaccatttgactccagatgaaactttccgcctgagttccaatcaaccttcatcctcttagacatcaaaagacaatcttttcgtgcattatcatactccttcttcaccaagttgacaaaagactgcatcgagatctccggttctgggtttttcagtgtgagtttcacactagtgccattaggtagaaggaccttgaagttgtagaatatatcctcatcgtcatcatcatcaagaaccaatgatctcttcactgatcgcctgctgctcatctgaaatgcaaagacagaaacaaccatgaaactgattaacttttttgaattacaaattaggcacgataaggattacagtggaagctaaacatggaaattattgattcctaagaactctaattgaattagtctcacagctattgaatggttttagatcattattgatgatttactataacgaacctacaacaattacaagaaagactgctgcatcaaaagtacaaactgtttcttccttgcctctaaacgattgaaaatcaaaaggactgtgtaaggcattcacagatttaagctatgaatatcatatcaatctagtacttgttctacacttctactaaacatacacgcatgtacacagaattttgcatataacatgaaaatgtaacaggccaaatcgtgaagaaaagctacaactttatcaataacaaacgcataggcttcttaaaaaaaaagcagcaatttaagtaaagagagtctcgaaatggaagaagatacagacgatatagtaagtaactcgcatttagatacactgcaatgatatggaagaagacaggacaggaataaaaattgggtatttgcaaaacagagactttattccaacctaagacaaacgaatacttagggtttaagttgctaatcaattccacatcaagcttcgattttcagtaaagtaaaacccaccaacaacaacacagagaatcagagagagagagagtatatataccttagcttcgtcgactgatttctctcccaaaaaacccaggagacaaaatctgacagaagaataagactgaatcagaacgaagaagagaaaataaacacaatattaaaaccaagttcactttttttcttttgggaagctgtagacgagaaaagtttagattttttttgtttttaaatcatagtaatacgaaaatcagaaagaacacttaaaaagcagaacacatttctctgagatcaacgaaaaaaaacgaaaccaggaaaaaaaagtcgacctttttaagaaaaaaaatttatctgaaatccttattaagaagaaacaataggagtgattttttacctttagagtgactctctgtttctaaaacccagaaggaaaaaaaaaaaaagaatctttgtttggaagaaacgacagagaaacaggaagaagaaagagtagagaagaggaagagacagtgtgtactctgtgagagagagtaaaatgtgtaatgggtgtgaaagcttcgggcgcacgcacttcctttatcacacgtcagcttaatactttcttctttttatttgtcgtcacatcaaattacccaaaacattgtatttacatttatatctttagcatttaattacattatattttgagtaaaaattgggagtatgatcttattttgttgacttgatatatatgtggactgtatttattgatcaaaagatatctttatcttttatttttttactaaaaataaataaatttcattttttaatgaatcaaacgatttaactaactggttaaatatataaaaagttgttgtatatggctaacaatataacatgtcaaaatctctcctcaattacaattatacaaatcttatatacctatggagcttgacattgttatacacatagtttgaatggtgacgaaaccatatctttgttactatttaaattttactgtatcttatccgcagttaaaccgcatcattccgattatttcattcggaaagagataagacatcattaaagaaaaacctcaaaacacatttattctatgaaagcattagttttgattttttactagaaaagatacagagatttagtaagtaattagaacagaaattatacaacgttggtcagaccggttcttagtcccactgtatattaaaaggaagtaaaccggcactcctcgggtttaattccataacatggtgaagttatactgatctggtctaaaccaaccaaactgagcttctcgatatactctcccataatatctccgacaacgtatgagattccgcaagaagcaacaacaatagacgtataataagccgcagatttgagataagctttagtcgatccacatgaattggttggttttcggacatagaccttgatcgaaccgagcaaaattacgcaaaccagagaacccaagaaaaccgagatgagcttgtagttcttgattccggtttcgtagaaggaaaatgcgtaaactaacggaggaattaggccgaagaaaatgtaagacatgaccgctactaagatatgtatccgggatttagtacgtctccctaacaattcctcgtacctatctttctcttgatctgaactgtttcttagatcttgaaactgcaataaaaaaaaacccgaaccggttaaaataagaaaccccataggcaatctgtggcacgagaaaacgttttttggttcaagtaattacgttttgagcgaggacgatgagcccaccggccaaatttgcgacagcaagagccaatatattcactgaaacaacaacaaaaaataatagacgaaattattatatagtgttactatttataacaaggaccaatctgatgattagatagccgataaactaatctcgcatttgtttgctaactaaaaggaaaatggagtctagagacttactggtggaggaaccagaggcagaagcagatgatacaacgccgaggctggtgatggtctcagtgagaccgccgtagacggtgctctttaacaactcaatggcgaatctttctccgtccggttgaatttgtggtggtgattgtgtggtgtttatactcttcctcacatctatatattcttcaactgcatatagtttgcaaattttctttgggtacaaaatatatgtagttctatcgaatattcaaataccaaagataagcctataaacattttttatgatcaaagaaaccgttgttgattttttcccaaattgaaatcaatttgtctagtccggtttaggtgagaggagtaatatttttgtttcaattcacgataacatacctgatttctcaaccggttttcccctgatataatcaagttgtaagaactttgttcctgaaatttaaaatataaaaccagggttgatccatcaagtttacaaaaccaagaaaacctggaaagaattgactcagaaccggtttaattaaggtttgatttacctaaccggatgaagtactttagatcacaaaccaagcaagtaaagatagttccctctttatcttcttgatcatcctcaatccgagtctcagggacataaaccttaactggtgattccatctcctcaatgtcgcttggttcgtccggttcaacaaccggtatatcgggtttcagatccagagatgaattaacgtgcttccctcgttttcttttcttgagaaccacatttctggtgatacatgtgctacagctaggacagtaaagctcgtagttttcttgtgtcgcaagcaaattctctaggtttgacttctcttctgaatctgacgatgatctctcgttcttttcttcatcctcatttccaagctcatagttttcttgtgtcccaagcaacttctctaggtttgacttctcttctgaatccgataatgatctctcgttattttcttcttcctcttctatctcacaatcttctccattccgttgccttttgttctctacatttggcaagtttgtggagctcgactctaaccaattattaccattttcttcgtttgaaccggtttcagattcttcgtttgaaccggtttcgctcacagtactctcaagtactattggatctgaatcggaaaatagcgatgatgtactttcactaacagaattgttacctacgatggcaattaataccaaaaataaacgagagattgatctaccggttaagcaggtttgtgtccggttaaaaattaggatcctaaccaattagtagaggtaccaaaaattaaaagacaaaaaaacatgtaagaaactgacaagttgactaatgtaccttgagcttgagatccatcattatcctcttccaactctatctcggtggtgttgaccggcgccggagccgtcgctgccgccttggatcgaaattctcgggcgggaacattatctttaccaaatctatagctctcaagaagatcaaccaaaaattcagcatcaacgatttctttatctccgtccttcaattcggacaaggttacatgaactggttggtttgacttttccatatcaatccctatgtaatgaatctgattccaatgttctttaaagtgattatgagttaatgaaggagatattatgatttgtgagtctctctctctcttttcttcttttttcttttttaaatttaaaaaaaaaacacagttgttcctaattatcgtgtccaatcatatgatcttttatatatatacataaataatacccacgagggaagcacgaggggttaaatattcgtaacgaggattacttttggattttggtaattagggaaggtgtcatagttaattagcactctatttaaacatgttaatatatgtcagtttcaaaacaaaaaaaaaaaattgtgtggtatagtatatgtcttctttttgtcatcagtatatgtcatgaaattgatccataaggttttagaaaaatgattttaaatgattaaaaaatattagaagtaatacgaaaggtgcaatattgattaaataaatacaaactgtgatagtatgataccacgtaaaataaattactacagaaaatgaatatcacatgataaaaatactagtagtcaactctttaataactcataatgacgaggaaagtgggaaacgttacagttagttggaaacaacgaaccatattcaaaacgtgtatagttaatgacttcttatttattatgaagcccattagacatttgtttcttgggcctatatatttcattcacaataatcggcccataaaattaaccaaaagcccaatccaagtaaatcaccataaagctggaacacataaactggagcccactaatttacacgtggcacaatatgaggctccaatttcggcaagaagtgtgtgatcttttttttactcgttcttgatcttcgcgcttttctgatagatcctcttgggacaataaaaccattaaaatatcggagagtaaattttataaaaccaaaggcaaaaattgcatagatcagaaaatatttgttgcaactattgaaattatttttgttggttcgaaatttttacatatttatgttggttatgactcttatggaaatgataatgtgttttaaggaataaaattaaaattgattctgtttcatactaaaatatcaaacaaaaaaaaaaaatttgttttggcaaagaataaaggttttagtgtactctttctctgtggttaactttaaagttttggaagcatgtcggcgaagctggaaggagattctttacgtagtagataggccacaggtggtttcaatcttccccaacaaccagacgaaatcaaacataaatctgtaacagtcgaagaaactctcactctttaattgatcaatggcgtctcttcaaatcagtggctccgttaaattcgagccgttcgttggattcaaccggatccgccatttccgtccgatcgccagtctcggatttcctcgttttcgacggagattcagtatcggacggtcattgttgcttcgtcgttcttcttccttctccggtgactctcgtgagtctgatgaagagagatttatcacagacgcagagagagatggttctggctccgttcttggctttcagctcactcctcctggtaaatgtcgttaaactcgtgattgagttcttcatagtgtttcttccaatttcctcaacgaacagtgatttattctctgatttgtgcataatctagggattttgtgatggtttatcgaatgtgatttcaatttgtaaaaagtgaatgattctcttgaattttgcttgtggtcctcagattcaaagctattacgtttttcaaatttcagaatctttcatattcaaaaaattctgatataaagtagcacgattttgctcagaatctcgaagatgaactcgatttttccttgtacaggtgatcaacaaacagttagcactagcacaggagaaattacacatcatgaagagaagaaagaggctattgatcaaattgtaatggctgactttggcgtacctggaaatagagctgttgaagaaggagctgcagaggttgggattccgagtggaaaagctgaagttgtcaataaccttgttttcgttacatccgaggcggctccttactcgaaaacaggaggattaggagatgtttgtggttctttgccgatagctttagctggtcgtgggcatcgtgttatggtcatttctcctcggtacttaaatggaactgctgcagacaagaactatgcccgggctaaggatttggggatacgtgtaacagtaaattgctttggtggttctcaagaagtttccttctatcatgagtatagagatggtgttgattgggtaaccactaatctcttctagcataaattattgtggagttttgacaaacgccattgcttaacattttgtgttgtttttgtaaactgtctttaggtttttgttgatcacaaatcctaccatagacctggtaatccctacggagatagtaaaggagcctttggtgacaatcaggtactactgttgacattgtccaaagaaagactttggtttataattataactttcttttattgtgtaaatgttatgttttaagtcatgtggtctacttaaaacaacaaaagtgcgtcgtctcacacattttctgattacagtttcggttcacgttactttgccatgctgcatgtgaagcccctctcgtgctgcctcttggagggttcacttatggagagaaatcactcttccttgtcaatgactggcatgccggccttgttcccatgtaaccttttcttgatctctttaccttatactctaggctttatcttttaacggatgtgcagaatcctgctttgatttgtggacattgaaacttatatcgtgtatcttcttttattccagacttttggccgcaaagtatcgcccatatggagtttataaggatgcaagaagcattctcattatccataacctcgctcatcaggtaaattcataaacatttttccagacctgtatatgtaatatctcttcttctggtttttatatagttgtaagtttcgtataatgccccatagttagcttactgtgattagttagttatgtatgttgtgtttgattaagttgaaaggttatttttctatttcataaattggctcttttcctaaaagggggtggagccagcagctacatacaccaacttgggattgccttcggaatggtatggagcagtcgggtgggtatttccaacgtgggcaagaactcatgcccttgacaccggtgaagcggttaatgttctcaagggtgctattgtgacctctgaccgtatcattactgtgagccaggtgatgaatcttttgtaaacataatccctgatattaatgaccacattcacttacggtaatgattctgacattgtgtgggttggtattctgattgggatttgttttctgtattttcagggctatgcatgggaaatcactactgttgaaggtggttatggtcttcaagatttgctttctagtcggaaaagtgttataaatggtacttgtttctataaaccccgacttttataatctttcacttaaaacatctttctgagctgatattccggtgatgtttacagggatcacaaatggaattaatgttgatgaatggaatccatccacggatgaacacattcctttccattactctgctgatgatgtctccgagaaggtgatgtgaagttctcttgagtaaaagtgccaaaatccgatgctttgttatggtggaattcactttttgtatctgctttgggaatcgcagatcaaatgcaagatggcactacaaaaggaattgggtctccccattaggcctgaatgtcctatggtgatatttcaaagccacttttatttttataagaaatgttctattttgtcttataatcactcatgtagcttgaatgttttaatactttttacagattggttttataggaagacttgattaccagaagggcattgatctgatccaaaccgctggtcctgatctcatggtggatgacattcaattcgtaagtgagtctattgaacggtttaactggaacacatgcagtaccagtgacatgtgtgatacacatttctcatctcctgtatttagtagctgttttcgcacatttcttaaatctgaggcagaattggaaaattttactggaatctgtagtggttttccgcattctaatattcctttttcagtcaaagagagttgtttctttttatgagatatctttgttgatatgatttaatgtggtttggttgcttgcaggtcatgcttggttcgggtgacccaaaatatgaaagctggatgagaagtatggaggaaacatacagagacaaattccgtggttgggttgggttcaatgtccccatctctcatcgaatcacagccgggtaaaaacaaatcattctagcttagactttcaaaaattccagaagacatgataaaatcaatagagaatctttgctttgtccagggagatctattctatggattatcatatgattcatataaaggaactgttgtagaaaaccttcacagtgccacaaatatctcattggattgtttttgtttgtttgtcttgaaaactatcgataaacagctgtgacattcttctcatgccgtcgagattcgagccctgtggtttaaatcagctatacgcaatgagatacggaaccattccagttgttcatggcactggaggactcagagtgagtttctttaaatcttcaagaacccggataaatacaatcaaattgttttgaatagtttggtactaaaagggtaatgatttataactggatcatgattgttttcaggatacggttgagaatttcaacccttatgcagaaggtggagctggtactggtacagggtaataaacaaatctgtttttgagaaaggaaaaaaatcatcaaattcaaatgatttgtgttgttatgaatcgttcttttgtgggtttaatgtttcaggtgggtcttcactcccttgtcgaaagatagcatggtctcggtaagtttatctaactccccatttctcaagaggatttgtggtttatggtttttgtgggtatatgaccttgttgtgttacatacatctcaggccttgaggttggctgcagcaacgtacagagagtataaacagtcatgggaaggattgatgagaagaggaatgacccgaaactactcttgggaaaacgctgccgttcagtatgagcaagtttttcagtgggttttcatggaccctccctatgtcagctagaccaaacataaactgaaccaaaccgagttggaccggatcagaccagacctgaccaatcagatggagagtgtggaacctccttttccggctatcgaaaatctatggttttcaacgtttccacattaaaccgtgtatctatctatgtctattatcttaaactcgtatggtgtttgttttggggaggtatagaattttagttatgaggttataatatgtttttctttcggttatgacatgtgtgtcttactcttttcctaattatctgaatctgaactagatttcttttgataagacattatacgagtagactaatatgacttaagtttataaaaaaccaaacacttctctagaaaatattcctaaaagggacaattgatcagaaaactactacttaaatccaaatactcttataaatgtaaaatcaaaaataaacaccatgtactagtatttgggactaaaacacgaaaagaacgaatttttaggttgaaaaatcttatctatcttcctcattattttagccttatcgattctttctcccttcacggttagtaagttgcttcgttcacaaaatgtcacagaactaactcctaacaaaaaaatatatatacacgattgtttaaaattttctcaataacaaatagtttattttggctcaacataaccattagattgtgataacgtacctggaagaagatagacataatttagagctttttgcctcgcaatttcatcagttgatcgaaacttgaatgtaaattcctcctacaaataattacaattaaattaaagttttaatgaattcagtctagaagcaatacaagtttctgaatttgtgaaattatatatatatttgtttagcagatcacatcctaaaataactaaccattttaaaaaaacttaaaaagttcagaattacagtagagatgattaaaacaatgtgactgcaagtttccaacctactggctgggttataaataatatttacttataatggattcttaatatacatagttttgatatgtttatgtagtttaacgacaatgcgacacatattaatattataatttaacttcttacatatgtttgaaatcagtaaaaccaaaacatgtcttaaaaaaaaaaagagatatatatatatataaaaggttaccaagaacataaagagaaaataaaatataagaaatttaatagtaagtacggaaccctatataaaaataatgaaggaagtctctttagcgatgacgcatcaatatctcttgattaattaattttattctcttcatagaaaaataaatactaagataatacagttttacaaggataacacatcattatctcttagttaattaattttatttctcttgataaataaataaataaataccaaaataataaagtttaaaaattcctttcatcttttatatattggatttgatagccattatgagaaaagtaccaatcagaaatggtgaattaataagttaataatgatgatttcatttcataccagaattggtgggcttaattccttaaaaacaaataatttgatcaagattaatgatagatgtgaatgagtaggagagcagtaacacacaaatgaatgaaacgtgaaatataattaagtccattagacgtgcttaccatattcatatgaatcatacaaactaatctgtcatcgataaaaagaataaataattattctctttttgtttatttttataataatgtttagttgaaatgaaaacgttatcgttagagccacgcacgatcctaaattctctactataagaatatgtatgaatactatatttgtagttcacattcgctttcctaaggtttaccaaccagtttacactgaaaatgtgtacatgacaaattgacaatgattgtttcgttttgtttacgctgtttttttttattattgaaattcaggaggttctaggccgaaaacgtaatccccaaaaacccgaaattatattatgtaatattagtttcgtctcaaacatcactcgaaccgacgacctttaaacttctcctagagtttttaccaattgaattaacgacattataatttatttttcttagaagataaaagtaataatcaataccaaaagccaaataattattcttcgataaaaaaattaatttgaaatgaaaacaacaccaaacgcctaataattattggatgaaaaaacagtattcatacattaattaataagtgaatcatcttacatgtcaaaaaatgttaatggtgtttgtatctatctattcttttcggtgattgattacatcaacaaccatttgaaaattttgacatctttttttctgacatattggatactgccctatttattttgtccaaaacaaaaaaaaaggatactgcccttttttcttctcatagacaaaattaagtatataatttatcaaattttgttagatgattttttttgaataaaagatgatttggttttgaaaaaaaattcaactccatgttaactaacaattcatacaagatgaccaaaaaaaaaaaaaaaatcaaatgaggatttttttttttttttttctgttttttcttggtctttttttatgtcagcactcaattatgtttagagttgacatgtttgaatatatatatttaaaaaatctaaaatagtttaatttgagaaaaagaaagaaataatgaacaaaaaaaaaagagcgagcgttcgttgctccggaaatgatgggcaaaagtgggtaagtgagtgggaaatagaggtctgtgaataccaaacgcttccctttttcttcactttcttccctctaattactctcttgtctctctccctttcctctttcgtctcctacgtgtttaaaccttgcaaaaaatcaagtcttttttggtgtttaaatcacccatttttgtcaatctgtttttcgagcaaaacaccaggaggaaaccaaaaagctagaggctttgtggagtgagaagaagagtctcaggttagtttcttgtattcttctgtgtattctcattatctgtttttttgttctcattcgtcttgtctgcaaaattcagttcacaaaggttgagactttacacgacttggttctctttaaaaccgttttgaggtcataattggtaaacatttgaattgggttttaagagctctgtttatatagtagaagaagttggaacctttcaatgttcttgattaagggttttaggttgaatgtttatagggtttgattttggatgactagtccctttttagattatttacttgaaatggccctttgtctctgtttatatgctatggaacaaaatttgcaattcttgatctcggttggttggaaaatgctaattctttaatcttttatttgtagattttgttaattctttgttgtcttaaaaatagtattgttgaagattcagacaaaaatgtgtttttgtttcagatcaaattgtctggtttctttagagctgtggattctacttcttgtctgtttgttattctttattaagatttagttggcgtgttgttgtttaccttaaacatccacagaatcatatactctttggtttaaattccttaaaatggatttaaaacactctagaccaatattagttgctttagtttcattttgctagcagcttgaaattttcgagtattcttacaaataccatcgctgaagatttgactatttgttttcttcattcttgtttgatcatttcatttccacagtgaaaacagaaagcagcatttgagattccactgttaatctttgaattaaaaatgagtgcagcagctacaatgcctatgccccgagaagcgtctaattacgatgagatctctatgcaacagagcatgctcttctctgatagtctcaaggtagattctaaagtatcaagttgaataatcttaatggattttgtgatcattgctaaagccttaaatcttctgtttacatgttctgcaaatagtttagtaaacatctttgttatacaggatctgaagaatctgagaacacagttgtattcagcagctgagtatttcgaactatcctacacaaacgatgaacaaaaacagatgtgagtgagtttattcctctccctaattgtgattgttctcttttcttggagttttgtaagtttttacttgtgtatgtagagtcgtggagacactgaaagattatgcaataaaggctctggtgaatacagttgaccatttggggtctgttacatataaagtaaatgactttgtagatgaaaaagtcgatgaagtagcaggaaccgaactgcgagtatcttgcattgaacaggtatccattattcttcaaatggacagatatttctgctttagttttattcagttggcatttttgagaatgattcttgtttgtattactgaactttcttatatgtgtatagaggctacggatgtgccaagagtacatggatcatgaaggtcgttcccagcaatcacttgtgatcgacactccaaagttccacaagcggtacttcttgccttgtaagtttcgactctccaaagttccctatatgtttctacaaactttcgttctcttatttgtcggttttgggactcagctaacaaaaacgaaattctctatcagctggtgaaatcaaaagaggtggcaacctcgcaaagcttaagaatgttgaaggtagttttgatggagaagatgactggaaccaattcagaaatggtataaattgccatttcatttacttagaaattgccttgattcttgatttgatatgtttcttgttgtgaattcttaaagctgttcgcgctacaattcgtgaaacgcctccaccacctgttaggtatagtccagtactcatagtgagttcccttgtcaaatgaccgagaagtactaaacttttatcgctttttgcagaaaaccgatacttcagtctccctctcaacggaaacctcaacgttcagcaaccttttcgttctcctctatcgccaccgcaccaaagaaagaacaaggtaaaagacagcttcaccttgaaattgccgtttttggcttaatatgtaaacagaacctttaaacagtgtgcatggtaaaatagataagcgagcagtatcaccacatcggtttccgctgctaagatctggttcggttgctatccgaccgtcatcaatcagccggccaacaaccccgagcaagagtagagcggtaactccaactcctaaacgggtaagcttcggttacatttcaaaaacactcacttctaggctctatctctaacggttgattcttgatattttctggctcagtatccgtcagaaccaagaagatcggcttcggttcgggttgcgttcgagaaagaagctcagaaagaaccagagcatcaacaacaaccgagcaagagcaaacggctgctaaaggcgctacttagccgacgcaaaacaaagaaggacgatacgctctacacttatttggacgaatattaaaccgaaagctggttttgtatgttgactggtaaaccggaaattacattccagttttaattgcatttacgtaatgtcaaattgtcaatatatgtgttacaaaatatgtccatgattctatgattttgtgtataccttatgactgtcagagtgtgaatgcagttttgtttacaagcgtagtaaaacttgctgtgaattattttactgccgattttaaccaaattaacagcaagtttatatatacaatttcgttctcgaaatattatttgacagtttaatatatattttgcatcaattactgttgcaagaataattatgtttttgaaacttttgcttttatttatccagtttttgaaattgattaagaatgtttgagactaatcctcccttttttctttttttttttttaagccgtggtaatgtggtattcgttcggtaaatctacctattcaaaaagatagtatcatcgacttttctgttgtattaacttaccatttacaaatattacattaattaatttgaaacaagtcaaatttattgtcaccaagaatgaagtacacgtatacagataaaaataaagaagaaaaaaacagagacaacttttccggagattttactttagaaagcaaagaaaactaaatcaaaccaagccttcaaaaattaggtagctcttataaaccggatcataaaaccaaacatcaaaacatatgtatgctctttcaaaacatggtaccaactcacgagtcttttcatcagggccgattctcaccatcactcaatggtctagacaccatcagtttggggttcaacttctgatcttttgggtggtggtggaggtggtgatctgtcgtaatgctcagcaacaagtgaacgatgagaagaaggaagaaaaacctgacgagactccatcgatggaaaataagatgatggtacattatcgtcaagaagtttccggttggtttgagcatgcccgatcatgatcatagctaagagaacacaacatattaagagatgattcctagaagccattttctcatccggtgatcgatagagttaatttctttgcttatcaactatgttgaggttccatcttgtaatgtcttatgtatatacatagctcacaaagtcacaatagagggttcccactaactattattagattgattgatttctgaaaaatattatttttgtgtaccaagtaaaattatatgattttagatttgttgttagttttgatttgttttagattttttttttgtgcaagttgaattattattgtatagataaaatgacgagaaaaaaaaatgcccggttcggttaggaatgatttgtccaaatacgaacacaaccaaagataaaccattaaaccgaaccggagaagcttacatataaaataggatccggttctatctattcactgtgtatcaatggcttccttcacctgttcttctccatcttcgattttacctgtaaaaatccctcctttgcttctctcataatcatcctttgatgtcaatgtgatttctcattttcaattattgtatattcagattattgatacgagaagtgggaatttgcgatgcacatttcagtctcaggttttgaatggttgatatatatacgaatttgtgggtttttgggggagagttttgagtgaatctggttgattttttcaggtttcttgtgggattcagagagatgataatggacgccgtgtttggcggaggagaacattggtaagtactaaacttgatattttggtgattttccagtttcatgtttatgacataagtcgaatcaggaatcaaaataagggtttttctttgcttggagacgacatttctaaaaagttgcaatttttagtaggatcacagattagctttaactcactgatgaggcatgactattaactctagttagtctttacttagtcatagtaattgatatgatgcatagaaggagagatggagattgtcttctctgagtttttgcgatttctagtttacccttcttgattccaaattagcttacacacctgtttcaaaagtgtctttgttgaactatgctcatttcagacgctagctttagttcttatactgttgatgaacttaaagaaacatggctttttacctctagttagtgtttacttatatatattcaagtaaccatggtcttatctctatggcacatgcaagaaattggagattgtcttatctgagatactgggatttttaggtgggagttacacattacataaaatattagtgtgatctttttacttgtactatattctacaaactatcagtttctgttgtttgatcctatcaggttcatgaggttttgagatttcaataattaccaaagccagaacaatgcaaaatctttgtttatatttgtcccgcttttaatctctctatgtcgttctcctgttttgtctgtagacgaagaaggacgatatgttgcgttacaaaatgcaaagagttccatttgtggaagaacaagtaaggaagataagagaagttgggaaggtaatgacaatggacatagagcagcttcttttgagggaagacaatcggtttgaatttgtcaatagcgtagcagctgaagcaacagagtacgtggacaagaacagagacgaatatggaggttccaaaaaagccatctttcatgttctaagcaaccgtgtgaacgatctcggctttgatcgccctgaggcttatgtagaagctgatccttacaaacccggtcctggctatttgttggagtactacacttgatatattataacaaaaagtgtcaatgtactttacagcttttgttcttgtattaccaaaaccaaatcaatgcattcacagctttgttgttttcttggccaaatttcattttatttatttagatttactagatgaagacgaaagtctaatgacaagagtttagtaaaagtaacggtctagtgatttgtggtgaaaggaggtcgtcgtgtcggtggaggaggaggaggaggtacatatggcattggtcgttttgggattggtcttggagaccagtccccatagtcttctttgttatagacagttggttcctttgtcacaacctcatcaacctttcaaaaccaaactcatacactattaaaaaaggaagacacttttcgtaatacttcatttttgctatagggcacgtacttgtgttcctggaattgtagggtcggatggcttgggaggtcttagatgcggcccagcgtagtccatctccagatcgattcttcttccattcatgaccatctctttaacctttttaaatcaacaagttttatatctttttgtttttagttttgatgcatatttgtaatcaaatatataacgcttttagaaccgtgattgttaataccttgcggttgatgttgtcatgatgcaaagtctcaacgatccctaacaaaaatatgaagcatatttattcaattcggagttctatattgacctatataaaatgttaaagctactataagtttgcatatgttagttgatcagatctatatacctgaagaaaacattgggagaacgagcaagaaagatactagtatcactagcttcatccttaagtcagattctctcatttttgttttgttttggtgatatgtgaattgatttttatagtataagttgagatacacatatatacgaagacagagatatatagtagtcaatcgtaattatgaagataacgcatcacattgactagatgaatccgtaatcaactaaaatatggacaatcaatatagtcaaagcaaaaacgaatatgtgaattctccataattaagttataccattattgtttcctctcttgagagaatccatatgttttaatttaggaaggggtattcaatagctaaatctagaaagattaaaataataataaaaagttatagattctgtttaaaaaaatttttaagaaattttattttagacaatatgagatttgtttcttcgtctttattatttaacttttgattaaattccgttcaaatgacatttggcatctagccattaatattaagtactgagaccaaattaaaaagaattaatgttaaatcttgtaactattgagactaacattttaaaacgttatcttgtaacttttcttttttcatccgattttaattaaaactcaaaaaaggcaaacataactacctgatgaatgttgttatataagtgatataaaacggtttggtgcaatcttttcacgccaagtaaacatattttgtaactattgagaccaaattaaaaggaatttaaaacgcgtttccctctgttttatattacttatccttttagttcatttcacacaaattaagaaaaaaaatttttttattgttttacccctaattaatacactgttatctatatatacatttttgcagccattttagcaaataaatcctcaagtttaaacttatttacaaaagatgccattgctatcaattattatcaattaattaatattcctaatttgtagcatttccttatctattatatttccatcaatttcaattacttaaaaaatgagaaatcttaggacataattaatatatacttgattaaaagataaatattatatttaattaaacatttaaaatatttaggaaaaatgttttataatatttataatatatgaaatctataaaaattaaataatcatttgaaataaaacttttaaattgatgtgattataaatcttttaataaaactattattcgaacaaaaaataaaaaaataatatttaattttaacggttgagattagattataagatgggtttagaatatttataatatatgaactttaaaacaattaaataaccatttgaaataaaacttttaaattgatttgaattatatatcttttaaagtaaagtattattaaaacaaaaatacgagatggtatgacgagttttggtcgataggtaatacgagacagtatagcacgtgtgaaatctattagatatgtttaatttcactgaacgagattagatgatatgacgactttggatcgataataatacgagacagtataccacgggtgaaattatatatatatatatttataaatcaaaatatcattatattattaaaacaaatataattaaaaaatgaattatttagttataatctaaattttaacttaataaactgtttgttattctttttatatttttaaacagtaaaaattaaacatagtaattatatactaaataatatatatatatatatatatatatatataagagttgtacatttagaaaatataaaaataaattatatatatttaatctactaaacaaattatttttttattttttgaaaaagatatagccccgcgatataccgcgggttaaaatctagttaaatatatataattaataagctaaaaatatgacaaactaaaaaatttattataaatctgcattataaatacactatccataagtaatatgaaaacaaaattttaactctaaaagaaaaataaaacaaaactgagggaatatcttgtaactatttagaccaaatttgagaagcatatttttggtccggttcattaaacaaaacaaccatcataaagctaaaactacatgcatgagacgacgttgttacccaaatgaagagggaggtttgtgtttgttttgtataaaccatatacaaattttaaagtttcactcatacttttatagacgcgaccaatactactagcataatccaaaatcatatgcatataaaaaggacaatactatttaatatgtatgtaaaggacattccacttcaatatttacaacaacaacaacaaaaaaaaaaaaaaaaaagcagctcgaaatgatgtgtagtttgctaggattgattattccaatacttcatattgttgatttgaccaaacaaccctgaatattattgcaaattacagtgtaaaacttactaattagcctgatattcacaatttccataacctgcaaaacattatgtaagaaaaaaaaaagtcaatacaacgaaattagttaatttccctaaattataatttaattaatgattcatactgggatcaatcgtagttatctctccagtgttgtcgaaatcgcaatcgaactcgtgtttctccatagtttggtaatacaagttcattgcgtacttcgaatgggctttcactgtattcggcaagtaacaaagcccaccttcattaatgggcctacaatccaaacccaacccacatacgtaatcaatgttcctttgtaaagccaccgtctctgcaccggcctttgtcacgcaccaccgcttcgacgacgatcctctaaccggtgatcgaggattgtaaaccggatccgatgatctaaactgtcagttcacaaaaacaaattcgttaacatatatgaaactaaataatgttgtgaattgcggcggtgattgattaccgttggccggaggattccgatgtcgtaaatcggtgtcagatctgatcggaagatgccgaaattacgctccgacgttggtcccgatttgagattttcattgaagagcgcgaaaatgtaagtttcaaaagtccgatttggcatcaatggagttccggtaccggaatctacacgcgcaatcagattcttgttaaactcagccgctgtatcaacatcaactccgatctgatctatatctccctccgatggccatccaatttcaccaatcacaatctcaacatctgaaaaccctaatttatccatggcggaataaaccgaatcaagctgagcatcgagcatgtttgtgtagagaagcttcgtgtgttgatcaaataagcctggattaggtctaaagagagcgaaatcgagagtttcgattgaataaccgaagaagggataaggattcacgacgaacggcgaagaagtagaacggaggaagctaaggagaggcttgaggacttgggcgtcgtagcctcgccggaacttagcggaagaaggtggggttgaattagtgagggttcctaaagaatgtggcgttgagatttgaattcgacggtggagagaggcggagactaaggcggtgtggagagattgcatagccgggattaaggttctgatgaggaggtgatcggcggtggagatgacttcgtttccgacgaggatacggatgatgtttgtggatgggaagtgaggttggatgtgatcggagatccattgtttggcggaggagaggttggttaagtgtgggatttggtcgttggggacggttacggtaacggcgataccggtgttagcgaaggcttggaggatttgaggatcggtgtcgaagaggcggatgcggttaatgacggtggaatggaggaggaactccgctacttgttgcggtggagggaggttgttagctagtgtgccgtagtttacaccaatactcgcttcacttcctgataatgaccaaattcaaatgttaacgtatatatactacaagatagtggattttcactatttcagaatgattatgaaaaagtaaaaaaaaagtgaagtaacaagattaaaaatggtaaacgaaaaatacctgttgaaaggattaagagaactccgactatagtaaacatagaaagagagaaaaatggtagcacataattcattgttaagtgtagtaagaatcaaaacatcaaaatggagaatgctggtaaatggtattccaaaatatgctttgctttgtctttgggagatcaccagagtcacatcagtagcaaagataaatttacaaaaaacttttgttggtcaagagatttacagatttcttttcggttctaattttttaatttctaatggtttttaattattagttaaagtgtaatataatccgcggtgatatctacactacgagtctataagccaataatacttggtttccttcttatatctcgataggaatatctttgaatggaagaaaagaactatgcaagtttcttgctcacactggaaacaaaaatcataatagagagatatcttaaagaacgagtcgtgtgcataagcataacctaaatactctgttctaaaaaatattatattaaaaaataattgataacgccacatactatgactatttacacaatgatttaaggttttgtaacaccagtattatgtaccaaaaatatagtattggagagaaaaccatggtatatacacgaaaaaacacaggcctcagttacatttccctatatattattacttacaaaaagaaggaaaaaaaaaaaactgacaagtataatactaataatttttacgattaaaaaaggcaaaaatctgagtcaccccttcttcttttcgttttccctacccatgaagcaattccgaaccttcagctcaggctagctccgatattggtgacactcagctacgacccaccgggccaccgtgttaggcccaaacttaggcccgtataaactccaaaaactatggcttctaacttcaccacttttcgaaacagaagagtttatacgtcgacgtttgagaaggagcgtttcgtagcctcgttggatttcaaacgggaacaggcaaaccatagttgtgaaacaatttgatccgtccatcccaaccaccggtgactataaccaatccccagagatgagatgactccgacgttctccggcacgaagaccggaggaatttgtaatgcgatctacggatcgctttcaccggagaaaacgagctcgctagcttctcttccggccaagtggcagatcccttgggagaatcgagaacgtactcgcgccctaatgagaagagcgatggcgatagctcggatccgccggagagtacaggcgtaaatccgcaccacgggatagctactgaaacatccgcagagaatttttcgaatgatcggattttaagtcgtttggtgtgagagaaaaaaccaggagacgactgttcagggtcgtgtccaacgcagttccagacgtagaccgatgaatcgtcacacgcagagactatatgcttcccgtctgctgtaaaagatgccgatatctggtttccagcatttcgagatcctagaagattaacacatttcagaatttgcaaatttttgttcgaatagtgtatgtagtagtatgtctttagaagcattacctttgtatttgtggacaacgttgcgaccactaatgatcctcacttgtgaatctgctgatgccaccatgactctgcttgggtcagtagaatcaaactgcagaagaaactagctaagcatcattataaaatgttcaatcttgggagacaaatttaagaagaaatatgcacctgaaagccgattattcgtttattcgacgacttctttttgttgtgcagacatatatgaccatcaagttgaaggcagtggcctgaaccagaaagagagataactatgtaagaaatcaggtttcttagactaattaactcaaactctggagtttctaagacaagcccatgcgtctgtgtgtgttatttatgagctttacctgatacattgtagaagcgacaatcgcttgtcaaagttccgataatcactgcctgcaatggaaaatgtattcttttaggaaaaaatctgagtcgagtcaagtcgataaaggaaaaggatttttggttccaagtcacacctgcccatcaggttgataacaaactgcggttacaatgcctctagcatcggcccaatctacaacttggcactgtgaagctgaccagatacgaacttttccatctatggaaccactgatgaagtgatcatcatcaaccgggttaaactgaacggatgtaactgcaaaaatggaaaaaaaaaacaataaaatggcgttcagattgaatgatcgactaacaaaaagggaggaaaggaaaacaatgacattgtatagacggagaagaacattaccgtagttattgtgagagaagattccaagacagtcctcacagccgatctgccaaagccgaacactattgtctactgaagctgacaacagacgctgccaccaatatcacagaatgagcaactcggtctagttttctgttcaagattacacatacaggggctgaatctacgttcttgtgtgttacagatctcaaaacataacgaaacatgcataaaaaaggtgtctaggtagttctaaaagcagctccttatggttataaaatcaattttaagacctagagttcggttcaaagcatcagtgtaaaaatgaagggaaggtcaagaaagacgactcacattgttcttggaccaagagatatcaaggatatcaccactgtgaccgagaaactcgtgaagcggtttatcaagaacccgaaaaatctttgggggaataataacacaagcagactctgttgtcttccttggactcatcaacgaaccagtaatcccatccttttctacagccaccggtctcaactcagagagtttactcacttcaaagtatatacaagaaggatcaatcttaggaacatcatgttcttcacatctttcgtcttcaacaacactccaaacccgcaaaaccccatcttcaccagcactcgcaagatacctcccatcaggactaaacttcatagcgagaatcgctccttcatgagcttgtatctcttgacctttaaaaagagcagaaagctccttagcctcttttttatactctttcaccttcactctctcaatcctactcccgcaaaccgcaacttcaccgccattatcatctcctcccgcacttcgcttgttccgcactttgtacaaccgactcaaccatttctccttaaccctcttcataatcccacttacttcccgttcctcctcagcaaccatcgggtctggtaacaacttaggttcaccatgttccttcacaatcttatccgatacaggagatgatgataaagaacaaagactagagctaatatcaccatcatcaacaaaacccaaattcctcaaaaccataccactatctacttctccttcctctttacacaaactctcattcacaactctatctacactctcacttggactaaaagaatcacaacgagaagagctaaactcatcgtcatcagatttcaaactcatcaaaaccgctgattcgttaaccgagctcgataaccgatacacattacctgatttcgattcgtttacagtactacttaaacccatccacttcaaaaacttctcacgacgctcctcagtgttaccagggcttttgatccaaacatcgtaacgaaattctccagaaatcgacgatggagattcgattttacaaggacttgaacaagatgcgatttcttcgtgagcatcgaaaaatcgagactcttcttcttcttcaattagtgattccatttctcctttcgtcctcaattctcaaagctgcctggagaaaaaaaccaaaccgagaaaattttcaaaattaattttcccgagaaaattagtaaaataatcagaggaagaagataagaacattgaaaaatggaatttacaaaaataaacctagaaattataatcaatcgaacaaacatagatcccgatcaaaatctgaatcgaaaaaattgagttttttttttcgttttgcaaaatcgaagccattaaaaccagaaaccaaagctccatcaatcaaaaaaaaaaaaaaaaaaaacacatgcagatttcgtgatgaataaaaaggttatttttctttcataagtattaatttttcttacatgtggagatttatgatgtcgaagagctcagaaaacgaagaacccatgagacaacaacaacaacaacatctagaagaacttgttcttttcactcttgtctcttattttattttatttttctggttatgtatacagattctggaataaacaagagaaaaaaaaaaagagttgattttgatatatatttttttgtcagacaaagaaagaagcgtagatttgatgaaggaaaaagagagaatctgtggcacagaggaagaagaagaaggaagagaaataataattatagtttagaagaagattgtccgaatctgatttgggaaggacatttaattttttgtgcggacacattaattatattatcttccttttttctaatttttatcatctctaccgtcattttaattatattttatttcaactctacttttttgttttattatttttcccaataaaagcatataatatatagacggaaatgtggaatgtattataagaatactatatttaaaggtattgtattactaatctagtcaaacaagaaacaacaaatctagcacacgagagagagactgttgaattatcaaatactataatgagtttgtttatttgtatcctaataaaaaacaccataattcacatcttctgaatattaatttaaagagaaaagaattatggttatgcaagtacttccttagattaacactagaatgttatactattaaatttgtttaaattcgttaaaccaatataattatttaaacagcttgaattgctattagtaaaataaattttaagatgtgtcatagtatttttttgagtttttattattgattattagatgattactcgctctactatcaaactgattttgtaagagttttgtagaatgtttgcttaacattcgataaagaacaatagaatattttgcttataaaattgactttcagaggtgttagataggtcaaattaatttaaatttgtaatacatgctcttacctaagatctgtcattctaatatgctataaaataactcaaaacatgattttggtgaccaaatcaacttacgcatcataataaatagaaaaatgattgtttgatttatagaatttaaatttttcgttataatcaatatatctatgtatagagataaagagacactgcataaatttcaaagaagtatagtaaaagagaactttgactaaccacaattacaaagtccatttctacagtttggtttgtatacagtattaggctttattcaatacgttagcaagctccacaaagagaattgataaataattaatctctaaccaactctctttctcatcttcattgctcacatgtcacatggatgatttcattttgcaatcacttttcaagaaatcccaaaaaactgcccacatgttagtaaactctcaaaaagaccatttatgtctaaggatacaaaccatttggggaaacaagaaaatacttgcttatctagcggtagtagacagatgattagtgttgtttccaaattacaaaagtaaatgtgcggcagttagaagagtaatctttaaaatgattctagtaacctttttctgattatcaactgaatgtattcatttatgtgaagtatattaaaaaacaaaaaaaaaaaatactcatcaaatgttgcacaaacttgtcaaatgatagtaacatcttacatgagctataagcttaagattggattaagcaaactctcaaatagagagatatgctcatagttgacatttttatgatgccaaagttttatttagccatcttttaggtttagaaaaaatatattggttaacgttagtgagaatttgagaacggtcaagcatatagcatatatggttaaataattgaaaaccaaaatcaaataagaaaagttcataggaaaatgaaatcatggtgggttaggtacttcaagcttgcatatacgatttatctataatgcgttttttccaagcttatacaaaacaaaaaacaaaaaacaactaatcaaaagaagaatctaatcaaaagtgcttactagaattagatacatataagctttgttactatgtagacaatttattgtatactaaattttaatccacaatatactgtgggatgatttgttttaaaatttattgattttaaaattaaatggttatataatatatatatatatatatatatataagtctgcaaattgtatattttataagctatttttataaagaaagcttaaagaccaatcaaattttcttactataattactggtctaaagtctttgaatatcactacttgaactgattatttttagatattaattatttacgcgttacgtgtgtgtgttttacagattaggtaagagacaaatatgagaatttggagcgaaacataaccaatataattattaatttgatgcaagatgagctcacaaattttgtccatattactatattagtaaaattagtttttgtctccatatattggagcccgacacaactcctccagaatttcatttctattttctaagaagtttctttagtatttttttcgggtaattacgataacaaaaatagactcctaggccacaaaatgagagtggatcgttagcaacaatatcattttttatatataaattttgtcgattgattcggtaaatctcgatagaaacataccgatatactttatagtggacttcttcttaaaggaccaccacattgtctgttcttagtttgcatttctaactatcacataaaccaattgggttaagacccaattgacagacttcctaaacaaatgtgatttaaataatattatttttgtccagtttcttgttactaactcaataatatacagatttaaatttaaatatacattttatacttaaatttctaatattaaaaaaaaaagtttgtatatattgacagaataatagaatcacttattttttagtcatctatagtaaaagtatatagaaaggttagtaaaaaacaattctgaagtttgttaactatggtacctaccgttatgtataattaaatgttttaaaataacagaaagtcagctgttacatttatgctctaattagtgggggaaaaaagcaaattaaaattaaatttatggaatcatagtagagaccccatcatagtaatgttccgatactttatgaaaagtggttccctatgaaaatcatctggctaactcagatttttgtttctagtcttaaaagtcaaaaccactgtcaattgtgtcaaattttattaaattattctaagtaaacttcctatcaatttggcagaaatccattaaactattatgtctacatttcaaacacaattataatgctttttgaaatatgattactaaaccaacgttggcgatttgtttcaaagatcaattcaaataagtctctttgatcaaacgggtttaaagattaaattaaaagtagagaaatagtaaacgtcggtaaccaaatgggacctgatctcacccgtgccaacattattgtcatcatttaaccttaatcaacgacaattacacacaaagaatcaaaaggagagtaagttaaaagcaaaatgaaatttcataaaaacagtaaaaaggataaagttattgagtaatatgttaaccattttacatgtctcactgaaataaaagcatattgatgataattcaccctttgtggtatgagcctgagaaacttgaactttggatattttcacataactggttctctctattttttcaacaattgactcgacaaagattcagtccttaactcaatcccaactatttggagtaacgtgacttgatggagttaaacttgttgtttcatatgtttgtcgtgttattcgtaattagttacttagttaaatgactaattcgttaaattattggtacgaaatcaaactattatatgtataccactcttcaaaatgccaacaaaatgattttgaaaaatatataagtctctaactaagtaacataaagagacaaatacattactaaacaagaaaaatgtattaggagatttaaacttttaagaaggattattgacaaaaacaataatgtggattactcgatttagtcgtttgtccaatattaggacattgatttttttttttttttatgtgtttatgctcatcaggttaaaagtttttgtccaatactttggatcactaagtcattttagaaaagtgatgtcgtatgtagcataactttttcttttctaaagagaaagaaatgattatgatcccaattagaaaccctaacgtagggacaaagaggggagacactgattagctattataaccctaattaaaagacagcccgacattgattatttaataatcaaatttgcacggatatatattgttttcaatgtgataatgatatttggctttttgttaagggaacaagagaaaataatgatgtcggtaatagttggttagtctgataacctaagtccttaacgacaaaattctatttatactttgctttaatttactttacgatttgaaaccaaaattaaagttggccgtttggcttcgcttctgtggtatacaattgtatagtaatcataaagaacaaaatattcgatttgttcgatgcaaacaaaaagaagatgtaggaaaaattataaagatgaaggataattagtgaccaaattttagatatagaaagaaaattattgcaattaatattctaattaaaaagaaaatacaacaaaacaaaattcttattattactaaaaatcaaatataatttagtggccagtagtatctaatactctatccatttatggagaaatccaccagtcacatatgtaaagtgtaattttgatgttggtttcgatttacagaagttggaagctacaggaggttggatcatcagaaatcattacgggacaccaatctcatggggttcaataaagttggctcacacgaataatccgcttgaggcagaaaccaaagctcttttggcggctttacaacaaacctggattcgaggatacacacaagtacttatagaaggcgattgtcagacgctaattaacttaattaatgggacttcgtctcacagttccttagcaaatcacctggaggacattcgtttttggtcaaataaatttgcaagcattcagtttggttttattaggagaaagggaaacaaattagctcatgtcttagcgaaatatggttgtacctattcttctttttattctggttctggttttttacctatttggcttgatcgatatttttgtaatgaccctaattgattaatataattgttttgacgtaaaaaaaaaaactctatccatttataaataagtgttgtttaagattttggcacacatttttaaaatagataaattttctatttttcttccatcaacataattttaataattaattaatgcattaaattagtggagataaaaactgtaactttttttacatcaaaattgcattaaaaatataaaatgatacttattttaaaacaaaatataggttccataatgtaaagtatacgtatttcaatgtaaataaatttctgtgaaaagaaaaggccaaaagtcagaaaagattgaaagacaaatgctctactaaccgaaaagaaattgaaattagccaaagaaactaaatcacaattagtaaacaagaaaaaacacaatgaaatgatagtatttagttactcatgacatcacgtagattagagaaagagtggcgtaaatcacgtgataacgatttatccagtaaaattcaggaacaagccttttagatattattatttacttacttgattaatgataataagccttcaactatttaccctttttctttctccttttctatgggctccataaaattataaacataaataattttaattgcattgagaagaaactaaacttttccaaaagaaacaaagtaatccgtttgatgttaagcaaaaagaattagtattgagtatgttttattttgtataaaattaggatttgtaaattttgtgatggtgtcctttgtatggtttttctttttccatctttctcacatcttctattgttactgctaaaggcaccaaactcttaagtaattagaaattacaccctttcttttacgtataatcaacagtaccccctactaatcattaccaatttctgtggaacttaattgaatctcaccaaaacaaataacatatgaaagacaccaaccttgtaagttagattcgaaatggttatatgatttacgactatatgtactatcagttgtttggtgtagagtgtagacaaatcattgatattgatcgacctatcaaaaagagtttggtggatagatatgtgtttcgactatatatcgttgggggctagtactatgtttatatatgttaaaatgagtttaaaacccgtgagattacccgaatccatctatatatttaatcactaaatgaactaaataagaaagtcatttttgaaataattttattgagattctatagtatctaaggtccatcctgacagtttaagatcataatgctactgaccaaagtttggtcctatattaacttgttttgaggcgtatgttaagagatccaaggtttatctatgcttcctacgtcaaattgatacttagtaatcaattttaatatgatatgtccgctcccgtagccaaatttataatatcctgatggagagctaaaagatgaaagataaaatgttcaataaatcaatgtcgagatatttatcaaattgtctcttaggtatgtacgatgcattaaaattgaataaatttgttggagaatgcaaaaaaagatgaaaaatggtaagtgtgggatccaaaaggaagtttatgtcccacagtgatctgaaggaatcacaaaggaatggtttttttgatgcaaactctcatagtcgcttgaaggtactgtcagactcctttagtctttaggctctttggaccattctatttcattcattattcctactctctcttttccttaccaacaatctttattttcttcaattcaattcccatttctagtgtattttttacaaatagaacatcaattattccgacaaggcttcacattttgatccaacttgaagtaaggctttggttcatggtctaaaagcccagttaaagcattaggaaggacaaaaaacacttttaggttgtttcttgatgaacaagcaacctttttaataggttgacctttcttacgaaattcacagggttatacaaaatgttcagttggatactcatgttcatatccgttgtaatcataatacaatctttcccctttcgatatgtctctattagctacgagaagaaccctagcttctccgttgatgttgaacctcacacacttcaggttctgcttcttcctcccttctctgcaattcacaaaatgtcaacaaatacacaatgaggacaagcaatactagaatggttccaactaattcagaagcaggaccaaaacatggagctcaggtgttgtgaccagagagtcgactttaaggaaccaaatagaagagaagagaaactcacggtgagtgattgttgatgccactgatgaaccgggcgatgttactgcgtctgtcagggcaaattacgagacattgcgaaggatcagaggcatgaagtagagtcatcatactgtctccatcatagtcatcttctctattgctcagataatcaacatctccaacatactctgtgataattgtccagtcttttataaacctgtccgcctctactgtgaacctgttcagatagaaaaaattagacttcaatataattatacattgataaatgcattttcctactctcttcttggttataaaggtcaaaagagaagctaataagaatgttaagtacccttcataaggatcgaagacgaccataagtggcgggcattcaccgaggtccatcattttcttgcacaaggctaaggtctctacgccttctttagatagaacctgtatgaaattaaatacaaaatcaacttttctgttgatacttaacccaacaatgaatgctttcaagaaacctaagaatcaccaaaccaatcatatagatgtgactgaagaacaagagcaatacatatcaacttaagatagatacctgcatgcctcctttctcaaaagcagcttggtttgcagatcttggagcctttccagatacataagtaagctcattgctgaacttggtgttggaagctctcaacgcagtggccagagacgccatttgctctagcctcctttgaggatcattgctaggattgtatggaagaagccttctcttcttctttgacatcaccaagctagtctttttccgtttcttcccaatactatctgcaaacatttcactattcagattaatatttctagggatttagatttctaatctgcaaaattacatacctgaagaacttgagatttgagatgaatctggagaccgcttaatccggaagaaatctataattttagtctgaataagagggaaagctgcagatttacaaaacttttcattagtaattcagcaacagtgtaatccaaaacctgatctagtagtgttaaatctgaatcaaattcgcaaaatcaaatcaaagacagagatc

SEQ ID NO: 736 - DNA, 45529 bp, Arabidopsis thaliana
aagaaacccagaagaatcctaaaatctaaagctcaacaataaacatatcctaatcaaaagaaggaagctttgaaattagagtcatgtgggtatagtgaaaaagcttacatttagggatctgatgtttggaacaagaagggcagaaccaagagcctttgggaactgaaacgaggatcggtctgagacagaaaagatgaaaccctttatcgcatttgtcgcaaagaagcagctttgctggttgtttaccggaactgcattcttcgcagactgtatcccaatcggaatcggaatcatgatccgacatgtgttgcggtggttcggatctagggtttgacgcttgtgttctccttcgcctcacagccaccattcttacacttattgatttaccagagaaagagagagagtgagagattataaatgtgagatctagccgaggttgagtagaagagttcgcgctctggattcaccggattttcccggggaattttaatttggcgccactgttacggtttcccgatttgcagactggtttattttggttttatctaaccgattttgagaaattaggattagatcggttcatatattttggttgttcggttcggttcaatttgattatcccaccggacaaaccaaaaccgacataagactctccttcaatgtaactttcaactaaattgattttgctctttgaacgatggagaccaatctaaagatctatctagtttcatccaccgactcgtccgagttcactcacctgaaatggtctttcactcgttctacgatcatcgccttagacgccgaatggaagccacaacactccaatacgtcgtcgtttccgaccgtcactctcctccaagtcgcatgccgactcagtcacgccacggatgtctccgatgtcttcctcattgatttgagttcgattcatcttccatcggtttgggagctgttgaatgatatgttcgtgtcgccggatgttctgaaactagggtttcggtttaaacaggatttggtttacttgtcttcgacatttactcaacatggatgtgaaggtggattccaagaggtgatttgcttttgaaagtcttgaactttgcttcgtagtgttagtttaagctaattgtagtcgaattcttatcaaagttttaacctttagctctgttatattctcttgtacttaaagttcttgtgtttggatcacgtgtggtgtttatagataggtaagtattgatttgtgtgtttattgacttctgttgaaagtagattgttgaattgtgtttttcttttatttgcctttttaggttatgttgctttaaaactctatgtttgtgattgttgatgtgaataggtgaaacaatacttggatattacaagcatatacaattatctgcaacataagcggtttgggagaaaggcgccaaaggatatcaagagcttggctgctatatgtaaggaaatgctggacatctctctctcaaaggtttgtcaatgattcctgcaagaatttgacttttcgtgaaacgtactgttaataaggcttttcttaacaggtttttattctttaggaacttcaatgtagtgattggtcatatcgtcctcttacagaagaacagaaactatacgctgccacagatgctcactgcctgctccagatattcgatgtatttgaggcgcatcttgttgaaggaatcacagtgcaagatcttagagtgataaatgttggcttacaagaaattctgactgaatcggactatagcagtaagattgtcacagtcaaactttgcaaggctacagatgtaatcagatcaatgtcggaaaatggtcaaaacatagccaatggagtggttccaagaaaaacgacactaaacacgatgccaatggatgagaatttgttgaagattgtcaggaagtttggagaacggatcctgttgaaggagtctgatcttctaccaaagaaacttaagaagaaaacaagaagacgtgtcgcctcaagcactatgaacacaaataagcagttggtctgttctgcggactggcaaggtccaccgccatgggactcatctttaggcggtgatggctgccctaaatttctattggatgtgatggtatttgaatcaatttctgttttctgttgctcttttgtttcttggttttatttaattagaggacaagaatttgatttcacctatttagtatctttgtttttgaatctaaccattttcagtagaatccatgtggtatcataatcagtttcttgtaaaactactttataggttgaaggtttggcgaaacatctacgttgtgtggggattgatgctgcaatcccacactcaaagaagccggattcaaggtactttatcctaaagctgctattaaagtttttctgtgacatggggttttgatcacaatatctgtataggattgattttctaattgtgatgttgacacaaatgccagggagttgcttgatcaagcattcaaagagaacagagttctattaacaagagatacaaaattgttgagacaccaggatttggcaaagcatcaaatatatcgagtaaagagtcttcttaaaaatgagcagctacttgaggtacaaacaaagttaattttcaacgtataagctgttatgcaagatctgtgatgtggcatgatttggtttactagatttattaatcaaaaaggacacataccctggaaattttgctttaaagaataggatctctcaagacactagttaacaaatttatttttaaccttactttctgggtggaacattttctacactacctgtaattatggcatgcttggattcaccgagccaaaataacctcgtccactcactgtgcaaccacttttcttacattcagtagaatgattacggattttttgtgaattactgaaacaaataagcttcgcaggtgatagagactttccagctaaagatcagcggaaatcagctgatgtccagatgtacgaagtgcaatgggaaatttattcagaaacctctaagcattgaagaagctattgaagcagcaaagggtttccaaagaatacccaactgcttatttaacaaaaatttagagttttggcagtgcatgaactgccatcaactatactgggaggtaagtcacctaccccatcttttgccgttgtgcattatagttcttgaacgagtataccttgtgtcaaaaaatcatctggtccatctatgttagttgttttgctgattgaacagtcaaattttagttgcctaacgatatttatcaaatcagtgatccaattaatatttgtatgaagtcttagttggtgaattgaatcttgatttctttaaaacatcttcatgtgttcatgtcttagagcagaaatcatctccacaagattcataacttcctatatagctctgatctgttctgtctctaatagtcagtgtccgacatatttaatgtttgttatgtggtttcagggaactcagtatcataacgcagtccagaagttcatggaagtatgcaagttgagtgagtgattcactttttttttttttttttgggtttttacaattttggtgaagtgttcaatctctcgttacctcagttcctcaaatgtttttattttatatcaaacgtctctaagcaaacaagatgtgtttgtaacttgtgtcgtttgcacacatgtgttccagaggttattaaccgtgtacaaatgttttagtttgttttacaaagttgaacacattactatcttatgagaagaatagacttgtagtattttctatttaccagttaaattcttgcataattttcaaagtggaatattattttcaatatgctttcttgagatgatggcttttctagccgtagattcatgcattttaaatatgatgatataccaaatttaggtattgtggattggattggtctagttcattagttaggcaaaaaatttaacctcatcaaatcaacattacctctcttcctaattttctccattgaattcttgttcaaccattttttttctttcactagcaaatacggtgatgaactcgaaaatgatatctttgcgacagatgaattaaccggtataattggaaagcgtttcttgagcatcagtgttcctacttgaggaagagttgtcttgtagacctaaacaagagatcaattgccccaacacgaaactatgtagatcaaataagtatttagttcactcttctttgctcacttcaaatatgttttagacttattagaaaatccggtgagtcagatattcgacgggcacattcacatcggaattaatagtttcatagggtgttgtctcttaaatttggaccgaccggttggattgcctatctgccgtataaagaaaataagacaagagaacattaatttcatggttgaaccggacggttcttggctaaattgaaccgaaccgattgatttcagaaggtatgtataactttttttacggagtcgtcatcactttctctgctcgtcggcgaagttcacattcaccggtcgtatagtgtcttcgtctccttcctcgtgaaatttgttcatcacagtctctacagtcaccaccataggaggtcgtaccgccggatcttcgccacaccattaatttctgcgttctctcttctcaattcgccgccgatctctctgagcgtaattaccaaatcgtgcttaggtatgtcatcaaatcttgtctcacaccttccaattcatctccatgcactaattcattaagtaattagtcaagggtttaattcaaactttatggttaaatcgacgagagtgctgatgttttggggttagggtgtgaagaaaattatattgattctctctctctctctctcctgctaattagatctccttctcctagaaactgctgtgaggatcgatctcgattgatcatggaaagtcctggaagaaaagttttgtatgagatacgtcatcatgcttcattgccttatgttcctagatatcctcctcttcctcaggtacaagattcatcattgcttatacaatttagtgttttacttatatcttacgctttgatccgctgtccaagtttaggcagatggaactaattcgaaaggaggacttcggtcacttgtttccatcaaaggtcagtcgcagatggttaactcagagatctgtgatttttgaatctttggttttatgagcttgtaggaatcatgtttgtgtacatctcttttcattaaattagcagtatagctcattggttcttcatctctgtgctcttatggtattaaggtgttagtcaactcaaggaaaagtggagtgaatactggaatccgaaaaaaactaataagccggtgtcgttatttatttcaccaagaggagaacttgtggctgtcacttctggaaatcacgttactatcttgcgaaaggatgatgattacaggaaaccttgtggcaattttacatgtaagaaattctggcatatcttcccttgctttcacaaatgtttgcctgattatgtttttcggggtcattgccatagcacactcaataaacgaatttgtagaatattgcatttatcttgtcaaaaactatctacttgatttactctgataacaaacgcctataaaacttgcatttgcttctttttctctctaagtttagtatgtggaatcaccgttttgtgaaaccttagactgtaccagtcatttattctgttcattaaaaaaatatgctctcctcacaataccgttttccttctttctgtttcttaacttatggtcctttgatgtctatgctatggtcctctaacttctgtattctgcatcagccagcatatcaggttcatttacttctggagtatggtccgaaaaacatgatgttcttggtcttgtggatgatagtgagaccctctttttcatcagagctaatggcgaagaaataagtcaggtcacaaaaagaaacttgaaggtttctgcaccagtattaggattaatggaggacgactctgatttgcaaccatcatgcttgtacgtttccttctgttcatatttcttattgattaagacttacagagtactttgttcaaaaaaaaaaacagactaaaggagtactctgggatcctaatgtgtccttgaccattacagtatacttgtttgcttaaggtctacggctgatatgaaattttgactggtggtctgtgctaatgataatttgcctgcaggtgttcgttcagtatacttacgtcagatggacgtattcatcatgtcgagatcagtagggagccaagtgcttctgccttttccaagcatgcttcaaatagtgtctcaaagcaattccccaaccacgttttctgctttgattaccatccagatctttcttttcttctcattgttggtagtgttgcaggcatatcatcgtcagggagttctggtaagttttatacaacttattttagttgaggaaagtttggaattaggagtaattaaaaagctacacttgcttgaaatcattcaatttggcaaaccatagctgcgtactattatatgagaatgctacctatactttatcagtgtttgtgatagttgaatgaaaaatgtggttgttgaaatatttccgatgaacagagatgttaggttcatgattctgcgataattaatgttttaatttacttactttcaggttcatcgtgtatctcgctttggcgtaagtgtcagaatttaggtctggaattgttgtccaccacaaagtttgatggcgtgtattgtgagaacaaagatgatcagttggcatatccaaagactttaatctcccctcaagggtcacatgttgcaagtcttgatagcaatgggtgcgtgcatattttccagttagataaagcaagattgacactttcgtgctgtccttctgaagacagttctgattcactgaagccagataagtcgctacaaagttggaaagaaagtttaagaaatgtcgtagattttacttggtggtctgatcacgcccttgcaattttgaaaaggagcggtaacattagtatatttgacatcagtaggtgtgttatagttcaagaggatgctaccatttattctatgcctgtcgtggaaagagttcagaaatatgaaggacacatttttcttttagaaagttcaacacaggaagcaaaatcagctctggccaatgttgacagggacgcaagtgaatttcatcatactagtgagcatagtatgttatggaggctaatatcatttactgagaaaacaattcctgaaatgtataaaatcttagttgagaaatgccaatatcaagaagcgttagatttctctgatagtcatggcttggacagagatgaagttttcaagtcaagatggttgaagtcagaaaaaggagtcagtgatgtgagcacgattctatcaaagataaaagataaagcttttgtgctctccgaatgcttagatagaattgggccaacagaagattccatgaaggccttacttgcgcatggactttatctaaccaatcactatgtatttgctaaatctgaagatcaagaatcccaacaactttgggaatttcgtttggctaggcttcgtctattacagtttagtgaaaggcttgacacctatttggggataagcatgggcaggtatatatctttactcttgctatcttctcttcctttctgcagataggaaacctggtatgccatatagtactagtcttgcatatccaggagattctatggttatctaacacaggatgagtgtcatttagaatttggttagaatttgtcgattctagagtttaaagtggttttgtgggtttgattgcaacttgaaaacttagaagttagaaccctcttttgccacccttagatacccactcaggcaagtttcatctgatatcaccaagctctttgcatatgggttctgcatttcagaattttcggttcctttttatctgctgttaaacttcactatccagttacttcttaaaatggttaatgacattgtctccacagatattctgtgcaggattacagaaaatttcggagtaatcctatcaatcaggctgctatttcacttgctgagagcgggagaataggagccttaaacctgctatttaagcggcatccttattcacttgtttcgtttatgctgcaaattttggcagctattcctgaaacagtccctgttgaaacgtatgcacatcttcttccgggaaaatctcctccaaccagtatggcagtgagagaagaagattgggttgaatgtgagaagatggttaagtttattaataacttgccggagaatggcaagaatgattctctgattcaaactgagccaattgttagaaggtgtttggggtataattggccatcatcagaagaacttgctgcatggtacaaaagtagagctagagatattgattcgaccactgggctgttagacaactgcatttgcttgattgatattgcatgtcgaaaaggcatatctgagttggaacagttccatgaggatctatcatacttgcaccagataatttattctgacgaaattggaggcgaaatctgcttcagcttaagccttgctgggtgggagcatttatctgattatgagaaatttaaaataatgcttgaaggggttaaagctgatactgtggttagaagattgcatgagaaggcaattccatttatgcagaaaaggtttttggggacaaacaaccagaatgtggagtcctttctagttaaatggctgaaggagatggcagcaaaaagtgatatggatttatgctcaaaagttattgatgaagggtgcattgatttatatactgtttgtttttttaaggatgatgttgaagctgttgattgtgctctgcaatgtttgtatctgtgcaaagttacggataagtggaatgtcatggcaacaatgctatcaaagctaccaaagataaatggttagttgtccagatccaatgtattcccaacccaaaatctatgtaactaaattatcggatgtccttatcgattcattactgtatcaaactgacatccatgcaaatgcagataaagctggtgaagacattcagagaagactcaaacgggcagaaggtcatattgaagcagggaggcttttggagttttatcaggtctcgaaatgttgctgcatcttgaattactttagttggtgtctcttagcaaaaaaatatgtagccttattccatgtgcacatatttcaaatgaactaacttaagcatagaaacatgtgcactggattagttctctgcatctgtagaagtacaaggggatcttatgtttgaaattatggaagttctaatgctaccttctctttctccacaggtccccaaaccaattaactattttcttgaggttcatttggatgaaaaaggtgtaaagcagattcttcgactcatgctttcgaaatttgttcgtcgtcaacctggacgatctgataatgactgggcatgcatgtggcgtgatctgcgacagttgcaagagaaagccttttatttccttgatcttgagtttgtgctaacagaattctgtagaggacttctaaaggctgggaagttttctctggctagaaattatctcaagggtacaggttcagttgctctgccatcagagaaggcagagagtctggttattaatgcggcaaaggaatacttcttctctgctccgagccttgcttctgaagaagtaagtggtgtttctatgtttgtgtataaagatttttgtctatcctaaatatatttatgcgactttcaatcctgttaaattctttcttctggtgatgtagatttttttggtagcaacaattctctttgtgcttggatgtattttcatttcatttttgaaaattttgtctttcagatatggaaagcaagggagtgcctgaatatattttctagtagccggactgttaaagccgaggacgatatcattgatgcagttaccgttaggcttccaaagcttggggttagtctcttaccagtgcagttcaaacaagtaaaagacccaatggagattattaagatggcaatcacgggcgatcctgaggcttatctacatggtgaagagcttattgaggttgctaaacttcttgggttgaattcttcagaagatatatcatctgtgaaagaagctattgctagagaagctgcaattgcaggggatatgcagctggcttttgatctatgccttgttctaaccaaagaggggcatggtcccatttgggatttaggtgctgcaatagcaagaagtcctgcacttgaacacatggatataagttctagaaagcagttgcttggttttgctttgggtcactgtgatgatgaatcgattagtgagttattgcacgcatggaaagattttgacctgcaaggccagtgcgagactctgggaatgttatctgagtcgaattctcctgagtttcaaaagatggacggtgtttcttgtcttactgatttccctcaaatgcttgatggactaagcagtgatcaacaactagatttggatagagccaaagattcaatttcttgtgttgctaaggatatgccggttgatgatagcgtggacttggaatctctgctaaaggaaaatgggaagcttttctcatttgctgcttcacatcttccttggttgcttaagctgggaagaaataggaaactggataaaagtctagtgcttgattcaattcctggaaagcagtttgtcagcataaaagcaactgctctaattaccattctttcctggctggcaaagaatggttttgcgccaaaagatgagctgatagccatgattacagactccatcatcgaacatccggtaacaaaagaggaagacgtcataggatgctcctttctgttgaatctggtagatgcatctaatgcagtagaagttatagagaagcagttgagaataagggggaactaccaagaaattcgaagtatcatgagtctagggatgatatacagtttgctacatgactctggggtagagtgcacagctcccatccagaggagagaactgctacagaagaactttgagagaaagcaaacagaaagtctcgctggtaagagtttctgggtctattattttctcaaattacctgttttcttcgttctgttttgacctctaggtaccgttttatatatatatattcagatgatatgagcaagatcgacaaacttcaatcaactttttggaaggaatggaagcataaattagaggaaaaaatgcatgatgctgaccgttctaggatgctggagagaatcattcctggggttgagactgaaaggtttttgtctcatgatattgaatacattaaggttgctgttttctctctcattgaatctgtgaaatcagagaagaagctgattttgaaggatgtactaaaattagctgatacatatggcttgaagcaatcagaggtaaatttcacttagtatattactcattaacgtttaccctttcctcaattgcaactactatatacctgtctttgtcttctcgccaggtgatattaaggtatttaagctctatcctttgctctgagatttggacaaatgaggacatcacggctgaaattttacaagtcaaggaagaaatactcacctttgcttcagacaccatagaaaccataagcacaatcgtgtacccagcagctagtggtcttaacaaacaacgccttgcttacatatatagcctcctttctgaatgctattgtcatttggcagaaagcaaggaagcatcattgttggttcaaccgaattcttcctttgctgggttatcaaattggtataacgtccttaagcaagagtgcagtagagtgtcatttatcaaagatttggatttcaaaaatatttcagaattgggaggtttgaattttgacagcttcaacaatgaagtccatgcgcacatcaatgagatgaacttggaagctttggccaaaatggtagaaactctaagtggcttatccatggaaaattcgtccaagggtctcatttcctgtcaagatgtctacaaacaatatattatgaatttgttagatacattggagagtagaagagatcttgattttggaagtgcagagagtttccagggcttcctcggtcaacttgagaagacatatgaccactgtagagtatatgtcagaatcttggaacctttgcaggctgtggaaatcctgaaacggcatttcacgttagttctaccgccaaatggttcctatatgcacatccctgatagttctacatggcaagaatgtcttatcttactgattaacttttggataagattagctgatgagatgcaagaggtaaaatcatctaatccaagtttggtggagaatcttaccttgagccctgaatgcattagcagctgttttactctactcataaaacttgtaatgtatgacagtctgtccccaagtcaggcttgggctgcaatacttgtctaccttagatctggcttggttggtgattgtgccactgaaatcttcaatttctgcagagccatggtcttctctggttgtggattcgggcccatttctgatgtcttctcagatatgtcctctcggtatccaacagctttgcaggatcttccacacctgtatttgagtgtccttgaacctattttacaagatttggtatctggggctcctgaaacacaaaatctttaccggctgctctcttctcttagtaacttggaaggcaacctggaagaactgaaacgtgtcaggcttgtagtctggaaacaactcgtaatattttctgagaacctggagttgccaagtcaagttcgcgtctactccttagagcttatgcagttcatctcgggtaagaatatcaagggctcatcgtctgagctacaatcaaacgttatgccatgggacggttcggctgagttactatcatctatgcagaagactgaagccgcgcttaaccaagcgttgcctgaccaggctgatggctctagcaggctcacaaacactctggttgcacttaaatcatctcaggtcgctgtagcagccatctctccaggcctagagatctccccggaggatttatctactgttgagacatctgtttcttgcttctctaaactctctgctgctgttactacagcttcacaagctgaagctcttttggctattttggaaggatgggaagagctgtttgaagctaagaacgccgaactattgccatctaatgaggcaaccgaccaaggaaacgactggggtgatgatgattggaatgatggatgggaaacactgcaggaatcagaacccgtggagaaagtaaaaaaagaatgcgtagtctcagctcatcctttacattcttgctggctggatattttcagaaagtacattgcattgtccatgcccgaaaatgtactacaactaatagatggttctcttcagaagcctgaagaggtgataattgaagaaactgaagcagaaagcctgaccgggatcttagccaggaccgacccatttctcgcactaaagatttctcttttgttaccctacaaacagatcagatctcagtgtctcagtgttgttgaagaacaattgaagcaagaaggcattccggagttatcgagtcagagccatcatgaagttcttctcctggttatatattctgggactctctcaacgatcatctccaatgcttgctacggctcagtcttctccttcctctgttatctgattggaaagctatctcgagaattccaagaagagcggataacacaagctgacaacagagaatcgaatgcaagttccgagagtcggtttatatcatgttttgggcaactcatgttcccctgttttgtctcagggcttgttaaggcagatcagcagatattagcggggtttttggtgaccaagttcatgcacagtaacccatctcttagtctgattaatgttgcagaggcaagtctgcggagatacttggataagcagctcgaatctttggagcatttggaggattcgtttgccgagagctcagactttgaaacactgaagaatacagtctcaagcctaagaggcacttcaaaggaagttatacgatctgcgttagcttctctctctaattgtacaaacagcagatgatttgacaatggaggctttttctgtggcgaaacggtcacaaaaagggagtagtacataggagagggtaaatctgtttatgcgtttttacgtggttaatatagttttttttaacgttattttcgacaagaaaactgtttttgaggtaccccatataagctgtcacaaaaaaattaaattaaaatcaacaaatgccaaagaaagactgaattgcatttgctcaggttttatatgtggtttcgctactttggtgtcgataaatgtaattttgttttgttgaattccatcaggatattgagatttgaagaagcatacaatgatgaacaatcattcgcactagttgatgatatgactctacaggctcctttcttaggccaagggtaatgcttttacacttcactcaaatatttttatatatctgtctctgtgtttgtgtttatatatcttcaataaacttttcttttgatgaaattagaattgtgggagaagtagcttcaaccggaaaccatcaatggctgttctcagacacattgtttcaggtttgttcacttcttttttcttggtgtttgatatttctcatctatgagctataatgtatgtcccattatagtgactgcatagaacatttcatgatgaagaagaataaagatttaatatttgtgtgtttgattgttttgcattgtgaacatgagtttcagaatcagtttctctctggcttcaaggttatttttatttgtcttgtctccaagtttaaggattcatatatccattttgaatcagattcttatagggcagtttacttatacacagactatcgcaatcattccactaggatccagcggcgttgttcaactaggatctactcaaaaggtttgcatatataaatatataacaatgttttcttgttgtgagtcatggtctaattacttactgtctttgaatgtatgtgcctatcaatctttagattcttgagagcacaaagatattggaacaaacaacaagagctctccaggagacttgttaacaagccctgagacaaaacaaataaaataaaaatgacattgaccaaaatggaatgcaatttcaagtgatcagttttgcgattttctcttacttgcactaagggtctaactggtttaagcgttgtgggtgcgagtgtggttatgggagtttgactataccactcttgactcttgtttaagaaagatctcttgtttaagaaagatttaaagcatattgaatatagaaattgacttccaaatctcaaacttaagtgaaaacatatttttagacaaaaaaaaaagaagtgaaaacatatttcattcagatgacgaaacccactgtggtcgaaaagttagttacatatatatatactagattttgacctacacgttcgtgcgggattttatattgtaaaaaaggattttatattgtaaaaaatgtgttgtataaaatttacattcagtttagttttttttttgttttagtcatatatattgtagtatatataaagaaaattgtcgattgttaattatgtttgtttatgacataatagctaatattgtgaactataagtcaaattctggagttttaaattgaaaagtagattaaaaatatcttagatggaaaattatcgtaggttataatgatgtcaagtattgttatataaaaaattatggttagagaatagcaatagaaatttatgttatcgatggtgaaacacaagttagttttgttaatgttgatttttcaaaattttaatggtatgtatgaactaagaatttgtgttaccatgttaaaatatttaaatactcatgcattttttgtatatgtgttttggactatatttaattggctgcttgtaaatcagtattttgccaaagtaacttaaacaaaataatggcaaagaaaaaactttaatatcagtaaacatattatctatagttggcccatgtagaacctgtaaattattttgtaagtatggattcgattgcaaagctgagctaagtcctattttctatcattgtatgttgaattttttttatgcatatgtatagtaagaattctctgatttaaatgattcttgttatgtcaattaacaaatccgcagaagaataacaatctttaaattttaattaaaatagaaaatatttgaattaatgctagaattattttctagataattacaaatctaaaatccaaaaagtatttgttaatatgctatattttaaatttaaatgatggtagtttagattatatacgattttgaattaagtagtttgatttgttatggaaactttattaaacgatttacaaaaaatattgggtagttattcatttattgatttaattttgggaaaaatgtcatttaatcccccaactttcaaaaaatggtcattttatacatcaacttcgtatgtggccgtttaaaacatgaactaaacgttgactaatttttaaaacatgatatttcgttaaccaggccaaaatagacatgccgttatcagtcattaacggaacttttaacgttcgttttcatccgttaactttattagtcaagtttcaaattgtgaccattttaaacatcaacttcttatgtggccatttaaaacatgaactaaacgttgactaccatttaagacaagaaaaattcgttgaccaggccaaaatagacatgtctctatcagtagaacttagaaacccgttaatgactgttaatctgtccaaaacaacgtcgtttgagaataatcgaaagaacataaagatttttcccatatgaaatctccatatcaaaaagttttaagcagaacccaagaacatagtttgataaagagataatcgcagtgccagtaattggaagcaaataaagatgttttcgtttatatatttgttttaaattttaaaaggaatcatggaagcaaattgaagactcattataagattgttcgtcttgtttgagcggttgtagaaatagatttggggaacttgggtttcatttagaaaacaatcctgattttcttttgattatcctcaaaacaaagtcgttttagggatactaatagagtcgttaacaagtgataatgaatgttataagttcttttaatgaatgatgacaacatgtttattttggcttggtcaacgaacttctcatgttttaaatggtagtcaacgcttagttcatgtttaaaatggccacatataaagtcgatgtttaaaatagccacaatttaaaacttgactaataaagtcgttaacggatgataacggacgttagaagttccgttaatgattgataacggcatgtctattttggcctggtcaacgaataatcatgttttaaaagttagtcaacgtttagttcatgttttaaacggccgcatacgaagttgatgtataaaatggccatttttttaaagttggaggattaattgacattttgaaagttggaggatttgtgtgtgtgtttttaatccaagatctgcttgtttatctgaatcactacatttggtattttattcccatattttatagaaatgtattggaataaattcatattttttcctttaactataatctcataatatattagattatttaatttctttatttgtttttttcaaaaaaaattaatgaaggatccgaatcacagatattcatttaattgtaatatttgttaatttactaaattaccctcacaatgttgtagttcacaaaatgcttcccaatttataatatatatatatatatatatatatatatatatatgttttttagttattatagactacatcacaacttaagataaagactaagacttttgcatcaagcgaacaacaaaaccagaaattatgcttaattaagtgtcagtgatcgctatataaacaaaactttaaatctcttacgattcaataaaaataaggaaacttcatgatacatcacaaattcccctaactctaattataaaagaatatgagtaaagaacatattccaaaataaaaaatttaataataacaaaatatataaaagacatattatttatttttttctagttattatagaccacatcataacataagataatgacctctgcatccaaagcaattcacaacaagaaactatatcccattttgggatttacttaattaattatagttacatactttatctcgtatgcttacgagcccaaaagaccttcccgttgatccgcagctttactgaatcattttctgataaagaccacaattttaccgtttcccaatggttgagtacgcgattcatggtagcgaccgagtccaagaccagcttcgcaaatagtgcttgctcttgaccatcgtcatgttgcatgtcaatgccttgaacacaattttctccatattgttcggtgaaacattgcttgatcacctcttcttgcgacataggaaccccacgaggaaacgttatatacaaggtccgttcgttagcatccgcgatggagttatccccaacagagacatcatgcatcatgttgatactcacggaagtcggatatagggaatgatgggaggatggtagagtcttgtgacaggaggatgagagggtggtggagtctgttgatagaggttaatcaaatcacacatatatatgcaggaaaattgtaaaacaatttagtaaattatttgtactatattataactggagtaaattataatatattataactataatttggatactatgatttttttcttaattaaagtggtcaattagaaattgtcacacgtctctatgcatttgtatgcaatgtctttacatatgatatgggcatatttatgatgtgctttaaaaaaagaaaactatttatggtgtttctttttatcacatatcctctttattcatatctaattggattatttcatgtttttatttattctctaattttgtgattttgttataagaattgctaaatttatttttgaataacttgtagaatttttaaccaaatttggatgacacttatggttaaaaaaatatgatatttgatttttcttttgtttcttttgaatatcagttattaccattaatgtcatccaaatttatggaaaaaaaatctcaacaactatatttacaaaaaaaaaaattaactatgaaaaaacaattttcctaataaacaaattttgaatacattatcaataagaaattgtcacatcaatttcgccatttattaaaaataaagaatatgtttgcctaaaccaacatatatatatatatatatatatatcttattttattttcacatcaaaactaataaaagttggttttggcacttggttcgtcgagcttaatagataaataaaattgaataaattaatacttctttttatattctatttttttatagagtaaataatttttctagatatgactgagactacatcttatgatttatttgacacgtatcacgattctgtgagttagcaagttcggtaaccaaaatttatataataaaatgttaccatgaaacatgaaaatcaatataatcgcattaactaattatctaaatcaataaaaacattgtaccgaaccaatgatttaccaaattgaaatcaccgatttaaaccgataatcaaacaaacaaaaacatctttaaccgatccggttattgtttgttatcatcaatattgttcaaaggttaaagacgaagatatctaaagcccgtcgacatttcatttccgacagcaaatttgcgaagtcaaatcgcgtaatcaaacttcagttttgttccgttttcgaattctccatttcgtataggagatctccataaaccctaatcccctcagagtgcatctaacattcgattgtgtttttctctattcaaagaagaaattttcatggttttctaaagcgatgagaggatctgcactacttgatttgatattgttccttctcgtatctccattagcacacagcttcaaaggatctgaaatctccaagttctatgacaaatctatctccaatcaaatctctcaatccgatcggttagtcttctttcgatttttttcgtttgattcatttgacatttcttctattggaagctttctttatatagggtttgatttgattcggaaatgtcaacatctatttgatttggtctcaaagttgacacctttatacaagtcagagtttttaacaaactataatgatcgtgatatctacagagaatctggttatgtattggtttctacggtagatggatcgatatctttggtggatatgtcttcacagaagctagattggacattccataccaatgagcctatatattcgtcttaccaagctcctcattatcattacaccactgatgaagaacgttcctcggtgcttggtgatgacttttacatggattgtgataaagattggcgtctttacaattcctctgtacgaaaaggaaaacgcgttaatgaggtaacactgtctctcacatatgagtctttaagatattgaagtgcttctttatccatttgaagtgtgtagcttttcctctgttttagatagtggatgcttcggagtttattggtacgttgccatacacatcgacggataggattgttttaggtaaaaaggatacatctgtgtttctcttggattggaagactgggaagttagttaagaggtatagaatggacgagctgtattctaatacagttgttgaaaatgataaagagaaggctattgttttgtctaaagaagctcctttactatttggatcggggtttaagaaatcggaagattttcctgagctggtttatattgagagaaaagattttaaaatacaatgtatatcaaagtttggagatgttttgtggagtgtttcttatgctaagatggaagctaaactacagaatcatgagagcgtacagttcatcagtgggttatcatcatcagtggggaaaaaccagttcccgctgtcttatacgacaagtgttcctatggtacagttacgtaatgttaagtatgaaacactgtttccgagacttggttttctagacgaggcgttgtatcttccgtttcaagatagaaaacctaatcagttggctattggagatgggaatcagttgacacttccgggcaataaagaggctgaagaagtcctctcccttcctcttcctgagactgtgatatctcagatcacagatattattgatggaagcacgaaacaggcaggctttgctagcaaattttctggtttgattgttctaattttcggcttttgtgttactatgctttcggtttgcggccttttcttttaccgattaagacagagcattcggatcaaggaaccatatgtatctgaagtgccaatcgcgacaccgaagaagaaaaaatccaagaaaaatggtactacaaaggcggttcacaagaaagagaatggatttatatctggagggaacaaagatccctctcatgaggagaatgagaagagattacttactgctttccctggcctcaataatagttcagcagaaggatatagggttggtaaactgtttgtctccaacaaggagattgctaaagggagcaatggaactgttgttcttgagggatcctatgaaggtcgtcttgtagcggttaagcgtctagtacaatcacaccatgatgtggctcagaaggagattttgaatctcatggcctcagacaaacattcaaatattgtccgctggtacggggttgaccaggacgaacattttatctatatttcattggaactgtgtgcttgtagcttaaacgatctcatctatgcatcatctgcactacttgagagtccaatggcttcaagtagtatacattcgattcagataaacccaatctttgagaatggcaagggagttgagctatggaaggaaaacggacatccttctcctgttttgttgaagttaatgaggtttgtttagtctctcatctttctgatacgagactatggttcataacactttcacacttaaatcaaaggttgcatacatctttctgatctttgcatgtttgttttacagggatatagttgctggtctagttcatttgcatgatattggaatcgtacatcgagatctaaagcctcaaaatgtgttgattgttaagaactcatctctatgtgcaaagctatcagatatgggtattagcaagcgcttgccagccgacacaagtgccttgactagaaactcaactggtaaaaatcttgaaaacttacatgatacaatgtgataaaggaaacaaaaatcgataaattcttctcgtattaaattgttgtttttaatgataggtttaggttctggaagttctgggtggcaagcacctgaacaactccgcaatgaacgacaaacaagagcggttgatctcttcagtttagggtgtgttctgtttttctgtatgactggaggtaaacatccttacggagacaattatgagagggacgtaaacgttttgaatgatcaaaaggatcttttcttgatcgagagtcttccagaagctgttcatcttctcactggtctcctaaacccggatccaaatttgaggtatggatgatggcacttgtggttaatattgctatcaaaactagcgagatttgataatggaacctttttcaatatttgaaaatgcagaccgagagcacaagatgttatgcatcatccattgttctggaactctgacatgagactgtcttttcttcgggatgcaagcgatagagttgaactggaaaaccgagaagaaggttcacagctcttggctgcacttgaaagcacagcagcggttactttaaatgggcggtgggatgagaaactggatagcatattcctagacaatatcgggcgatacaggcggtacaagtttgacagcatccgcgatttgttacgggtcatacggaacaaactgaatcactatagagagcttccaaaagaattacaggaactacttgggagtgtacctgaagggttcgagaggtacttctctagcaggttcccaaaactgttgattcaggtttatacagttttatttgattactgtaacaatgaagagttctttttcaagtactctaagaccactgtattctaggattcttttcttctgttggctctctctgtataatagggatttactaataaagagctacaattgatctgatcaaagaaacatttgttgctgatatgttattgtaactcttaaatactttagttttatagtaattaactgttatgggaaaacaaaactattatgtttcagccatatatttaaaattacccgaaccggagctgacccgaaaaattggactggaaaccgaacacgaacacgaagatttaccctattgggtcctaaattcccctacccgaacccgaaaatacccgaatattgaattcaaaaatctaaattttacccgaaacccgaaattttatccaaaaatccggatatttacccaaaaaatctggatatttacccaaaaattcagatatcgggcctggaaatctatatccgaaccgatccgaaccgaaaccaaaccgatattttagatttaccctattgggtcctaaacttctcaatctgaaagacccgtacccgattgggttttacccgaacccgacccgcttacccaaattcccacccctattgaaaatcatacatatatttatggttttttctaactaacttactatttttttttttgatgttgtttatctagcaaaccagcataaccatttaaaaataatgttttaaagctatataatgattacaaatgaaaaataatgttttatctaacaaatgaaaataatgattactccacataacatttttcttaaactaataaaagttttaagcatatatttgtagttaatacttaaagtttgtcatatgttgtcactcttgttttttagggttctctataagatcaatgcaggaaaaaattggatgtttcatttaacaaaatggccgtttagttataaaatttgctcctttagtttcctttaagctaagatactatagttattgatttcgatttagcttacaaactttgctccttttatttccttgaaggtatatatacatagttattgatttcgatttagcttacaaaatttgctccttttatttcctttaagatacatatacataattaatggtttcgatttggtatagtaatctgagtataaatttatatgcttttgtacgtcttcgtaaagcatttacatcacacaccgaaatggctcactatatgaatatgaatctgatcatcactagtcttgtgatgatcttgatttcacatttgcctttttcctcaactgtgaatccagacaaaccaacaaagtctataatcgacagaatctgcaaccaaacagtgaacttcaatgagtgtgaattgattgtcacgtcacagctacactcgccgcacgcaaatatagcgaccataacggaagtgatgacaaaaagagctctgacgtttgctacggagacggtttctcaaatccaagactatcttctcccaaacgctacagatactcaggacaaagccgttttctccgcttgcgagatcgcgtacaaagccgtggtttctcgtcttcagagtgcttatacgtcgatgaagaacagtgattacgtggcgatgaaggcacagcagaatcaagcacttgggtatattgatgtgtgtgttgagaggactaacttctttcgccggactccgatggtagcagccaactattatgtgaggttgacggcgaagattgcttccattgcaggccagatccttgctcctagtacgaccacgtccctgtccccttgaacaaaatattattttgtatttttgttagagaaaaactcgagctttgattcatcaataattatttatttatttattaattttcgttgtcttttctcatagaaacaagacaaaccacaaaatttagcatttcagaaatttgtagaattcagtgaattttggaaattttctcacaagagattcgtagaattcagtccactaagttttctatgaatgatgtggttattaagataagatttgttgtgtgcaagaaagtgagttaccgaacaaacagccgtcacttacaccaaaaaattcaatatatatcatatatggtgtaagaaattacacactcccaaagtccagcttgtgacgagaggtgcctttgaacttataaaccatctgttattcttttttctttccaatggtcttaggcccggtcaaataaacgaaccaaatgtaccgaatcaaaaccaaaacaaaaataatcgaatcgaatcaaatcgaaaattgaaaaataactgaatggttactaaattttataaccaaaagaaccgaaaccgaatgattatgtattgaaatatttcaggtaaccaaaaatatctcaaatataaatatattttcaaaaatattagttatttctagactaaataattaaaaatggttgaaaaaaatatatattatagtaaaaatattcaaaaataaccaaaaatatccaaaatatctgaaaatattcaaaacaaaataaccgaatagatactaaattttaaaatcgaaagaactggaaccgaaccgaatcgaaccgaactttcaaaataaccgaatggatactaaagtaccgaaaaaaccgataaccgaataaatacaaccgaaaccaaatggataaccgaacgtacaagaatatgtgatcttcttttaacatttacacccaaaaaaaatgtgtgatcttatttcctccaaatgaaatattattatttaggcccttatgaatacccgccattttgagctcggacgtccacgtcggtctaatccaattgcctacgttacgcggttctttctgcgtgaattatgtcactctttctcttttttggggtgttcattagagcagcaccaatggtggtctctcttatgagtcctttatcataaaaataaagaaaaataattaaaaagagagggacagaagagagaggagctccaaaaacccttatttaagggacagtctcaaccccaaatatacacgtgtagttcttttagtagtcaaactctattaaaaaactaaaatataataacaacattaaaatattattattattttggtttttagggactcataagagagaccaccattgctgctcttagtacactagacaaacaaatatactctatttcaaagtaatacttatctagaactatgtatacaattattacatattgcaatacgataaaaaagagtatcatatctagaaaagtggaatggtctatacgtttgttgatgcttaaagtaaaattttaatttatgacataatttggtagaattctcatctgaatatataatagtagttgttagaaattaattaacttgaaggtaaagtgtgcaagtcataattttatgttacctcctaacttacacttcccaaaataaattacattcgtaaagtttcgtataatacgtaatccatacgaatcagaccaaaaaaaaaaccaaaactcaactgtgaaaaaaatatttttgataataaatattgttgttgtgtaacagtgtttttttatatatatataacaaatggatggattatggaataattttaacagaatatatgggtcaaacttttaatattatgggaatagaagctgacaacacacacatcaaaaagctgggacacatcaggtagtaactgaagtcaaacatagacaccaaactcaactaaacccactctttttcaaaagtcagtgctctttctctttgtggggtttgttgtttactatcgacactttcaagggactccatttttttcctatttttataattattaccaacaccaacttcacaatatttgttctgtttttgttaatatacaactttaccggatttgtactaccatcttcttattattctttttttcggatcatatattaaaatataaaaaattgcacggttagtgagtttcagaccaacaaccatatatcaacccgctctgtcttttatctgaaaaacgtgtgttttttccacatttggttgaatctgaatcacataatatatgtactctcaattacaatgcaaaccctaatttgtacttctgtgcagtacactttctctctctcttcattcatttctcttcttctataaaaaaaaattcttcaattcaatatcactaatatgcgattctctcttcttcttcttcttcttccatcttacgccaaacctcgagtctgcgaatcattcgattctcagattcgcatattttcttcgaattcgctaggctcaaaacgttgtttccgtgtacaagaagcaacctaacgatttggggccaggtgaaggaagagctgatttaggttattgagattcgttttcttcaaatggaaaacgaaagggttgagagagaacagagccaatttcaggaagacgagtttatcgattcgagaaaaccaccgccatggaggaaacagatcacggttcgagcgatcgtcgcgagtttattgatagggattgtctacagtgtgatctgtctgaagctgaatctaacgacaggactcgtaccgaatctcaacatctcatcagctctcttggcttttgttttcctcaaatcatggaccaaagttcttcaaaaagccggaatcgccacgacgcctttcacacgtcaagagaacactattgctcaaacttgtgctgttgcttgttacagcatctctcttgcaggtggatttgcatcgtatttgttgggtttgaatagacgaacttacgaggagacaggagtgaacaccgaaggaaacaatcctcgtggtataaaagagcccggtgttggatggatgacatcattcctcttcgttactagcttcattggacttgttgtattggtacctcttcgaaaggtactgatatctagcaattatgaaaacagagtaaatttttgatttcaatggtgtgattaaattctgagaatgaattgtataaatttcaggtgatgattatagactacaagctaacttatcctagtggaacggcaacagctgttcttataaatggatttcatactagcaaaggagataagacagccaagtatgttttctatatatgttcttgatgaatcttgttttttcttacttgattgggatatatatcgatatttttcgtcgttttcgatacaggaaacagattcgcgggtttataaaatcgtttggtttgagtttcttttgggcattctttggatggttctattcaggtggtgaaaaatgcggattctctcagttccctacatttgggttacaagctttggacaaaacgtgagtttcctcagtttttcttatataatccttcaaatgtttaaacatgtttgattgaagaagctttatctctttatgggatatagattctactttgacttcagtatgacatatgttggagctgggatgatttgttctcatttggtgaatctgtcgttgctcttcggtgccatcctctcgtggggaatcatgtggcctctcatagcccggcttaaaggcgaatggttccctgcaacattgaaagataatagtatgcagggcttaaacggctacaaggtctgatttcatcctagttttttatatatatatcttacagctgtggtagcaaaaagatgcgataagttttgtttgtgttgttgcaggtgtttatatgcattgcactgatcttaggagatgggctttataacttcgttaagatactctttttcactggaagaagcttccactctagactctccaaaaccaacagcatcagcacatgtaagttatctgtggaaggatctagctaacagtgtcttgcatttgtttcgatgtaaaagtaataaccaattgactgattgcagtggtagaagttccagaagatagcacgaaagaatccgataacctgaaacgagagaatgaagtgttcgttcgagagagcattccgctatggatggcttgtgtcggatacttattcttctcccttgtctccatcattgccatccctctgatgttccctcagctgaaatggtacttcgtcctcgtagcttacctcctcgccccgtctctcagcttctgtaacgcctatggagctggcttaacggatatgaacatggcttacaactatggtaaagcggcgctctttgtgatggcggcactggcaggaaaaaacgatggagtggtggctgggatggttgcttgtggtctcatcaaatcaattgtctctgtctcagctgacctgatgcatgatttcaagacgggacatcttacgcaaacctcgccccgctcaatgcttgttgcacaagccatagggacagcgataggctgcgtggttgcgccactcaccttcttcctcttctacaaggcgtttgatgttggaaaccaaaatggtgaatacaaagctccttatgctatgatatacagaaacatggctattatcggtgttcaaggtccctccgctctccccaagcattgcctagagctttgctacggattctttgcctttgcggttgctgccaacttggcaagagacctcttaccagataagccagggaagtggatcccactcccgatggcaatggctgtaccgttcctggtgggtgggtcgttcgcaatcgatatgtgtatcgggagcttagtggtatacgtttggaaaaaggtgaatcgtaagaaggcagatgtgatggttccagctgttgcatcaggtttgatatgtggagatggtctctggattctgccttcttctttgctggctctggctaaggttagacctcctatctgtatgaacttcactgcggctcattaaggcagaaagattttccagacaaaacccgaacttaccgccggagaaatgtatagtagatgtggttaggttaggagtagacagttaaagagggatgaaaccaaacttacatgtcttatgtaatatttatacttttggaataagaatgaacagaaagagagttggtttcttcttttaccggcgaaagattctctttcccggcacaaacaaaattgtttccatatacaaaattgaaaatgaaagcagagaaactcacctctgaaagtttcccaacacaccacacaaatcatgcctatcttgattcaggccatttgatatgttaaaccgggatttagatagcggtaaatcaaatcctcggtttgattctgttccaaccgcggctactatatcccctgatagcttgccaggaagccacatttcatagttgcgcaaacacaagcaccaaggcagttcttataaaccgcaataacaatgaaaaggattattgtgggatagaatgttcgatcttggcgtggagggtaacaataaggtcgtgtgcatcgtctaagagcttccacacgtctagtttccctaccatattgtggcactctcggagaatctcctccatgctactgtacttctctattatgactttcctcctttgcaacacagaagcagctaccacgtacagcaacaaatcctccgtgggaggagcccgctgctttattcgtctgctccaggaagatttccccatcccagctcttattgcagcttggtctgcccaaatcacttcccagagatgcaatgtttgctccagagtcagctctcttctaaacataacaagaaccattctgtaaacaaagaaacagtcttcagccttgactttctcaagatgcttgtagagttgtgagtctttggatttgataatctttgagactatgttcagttgccttgtgatcccaacctcatcgactctgaaattctgacgagctttcttcatgaacccaacgaaacaccaaaatgcctcgtagtcatcaggtatgactgagagtataggggagagaagatcactcattccttggcagtagccaatttcagggtcatgtaaggcataggcttcaagaacagcaacaagccgtgcagcgtgaaagattttcgaaggttccaaataactgtaatcctttagaccaactgcttcagcagcacgacgtgccctattctctgaaaccaaagcttgggattgagaatatggagtccattctgtatctgcacggagagcgtctagacggataatacgctgccaggtcacaaaatcctctttggtacgagaaatatatatgctggatggagaagtactgttttcatctttcccttcacaagaaggagcgacctgaacataatcattctcatcagatgaatctgagtctgacgactcagagttcaggtgtcttgaaccattatagtctctgtcaagcgtacatgagacatcactcatgtagccaatatcttccgtgttgtctttatcgctgataagagactcgtggacgctgcaagcatcatcagaacatgaactttcagagtcttgcgcaagagaccaactatcatgctcatcatcttgagtagttttattgatcttgtttaacttaaaagtcccactgttttgtttttgaagccttttgcactgcctgcgtagtctctcatacacttttctgcaattataaggtttaagtaaaatcaagtcacagaagcacaaaatatatataaaagatcctcgagcggtgattcatctctttctcaccttctccaagttcttgtagcacctctctcttcttcggaactattgaaatcacacctgttttgcagagaagaaaataaacaaaggtgaggaaaacgaagcaagaacactatggttatgtgatacataagtgtgaacaccatgacaatgttcttgatttcaacacataacaagcaacacggtagagattttgttgtaacaaatcaactgacataagtgcattgttgcaactactagagtttgaatgtatacttacactccaagaagaaatggccacacctcagaccgaatgctaggatcaatgccctacaaaggagtaaaaaagaaaatgaatattccaaaacatacactaacaagttttcacaaagtggtgaagctttgactcactctagtccgaactttcttcaacaaatcaactcccccattccgaattctaccctcaggggtgaaacatcttctccaccggcgaagtgtgagtggttttttcccttttctccgggaccagggcgatttaagccgatgcctgaacagaaaaaaaaaaacagaaatcgaaatagtttcactaatgcaaacaatctccactagctaaagtgatactaaaagcacttatttgttgctagtaaaaggagatatccaaagataggttgatcctatacatggaaactaagtaaaggttcaattaggacaaaagtaaaaaaaacaaatccaaacattgatcctgtaataaagattaacccctttgaagcacaaatcaaatcatatagaaactgagaatgagatagagagatcaaaagagactaacggatcagaagaagaagaacaagaagctggagaagaagaagtaacaaggacgaaagcagaacgcaaatgagtccacggagatgacggagaagaaggatttggaaacgtagacttcgtttgtattcttcgtagagctttcatcgaaacccaaaactccttctccttctctctctgtatctatcttcctcttccccaatttaaaggtccaaacttgcggaacaatgtccgtaccaatcggtaacagatttgatctacaactccggcgaaaaccatacgacctttcttctccgtcttagccgcgttgttgaagaagtagcttccgcttctctgtagagagttgcgatttttctctctatctctctagaatctgaaaagagaagtcaaaatcagagtaaatggtcattggagccattaaagccctttttctttggctttttttataaaagttcgttacagtaccccaccatcaccacgtagccaaatactctatattacacttttagcccttttacttttctttttttatttatctacccttatcattaatatacgatcttcacatgtttagatgattgattacttgaatttaacaaaaaatctcataaaaattaatttagtatctaaagatatttggattatttattactaaatataaaaaactagacatgtaaaataatgtgaaaccacacaaataatggaaaataccgtaatgtcgatctattaccatatatgttttcatcaacaaatctaatatatgattcagaaaccatttattcctcattcagatgaatcagatctcacttcaacaaccatttctatttatttctagttctgtaataatttatacatgtttaactttaggaaatatatctcctctcactcactacaactacatgtactaatctatttgtaactctcaaatctcggctacacaaactaaaccaacttaggctttgaatgcttggttcatacgttacggattggatcatgcgtattaatattttagtaacgcttagcttattagtaagcaaaacgtcagactaaagtatggaacagacaaaagtatgcactatattgttactattagtatgaagtttttgggagtggaataaaaacaagcaatggtgaatggtgaagtaagtgcggacaaattcgactttagtccgatccggagcatactacacaatcagttatagtctttagtcaaaacaacaattggagagtgttggttccgatagattttaaccaaaatacaccaaaacaaatcagagaaaccattgattagttcattatttccatgtaaagtacacgcttttatcacaacagtctcttcccacaacataaatggagagaaccaaagagtcaaaatccaaaaactaaaccggactagtcacattggtaagttcactggaatgggaagcataccacctgtttttagagcttggaagatgctggtttgtccaggaaccaaaccaactcgtcttcagcagaaacagaaccagcaggtggtacattcccagtcttctttaaagctgcctccacagcttcagctttcccagaaccgcaaacaactagagctacatgtgcagatgagttgatgaccgggaacgtgaaggtgattctctcagacggtggttttggagagtcagagattgaaactacccatttcttgctctcgttgcagagaccatgcccagggaataatgatgccacatgaccatcaggtcccatacctagaagcatgagatcaaatttgggaaagccagttgattcagatacacggagaatgttggtgttgaccaaatgtttgaggcaggtctcgtaatcatccgctgcagcctcagcggagagggcttcgttgattgcatatacatttccaggcggaattggtacctaaagagaaatgattagactgtgaagaagttgtagctgactcttaacctgaagagaacgtgttcaataccttggatagaaaactatcataagcgagtttatagttgctatcatcgtgattcttgggaacaactctctcgtcaacccagaaaaaatgccaccttgcccaatctatagaatcaacgtaaggagattctactaatttcctgaaacattatcaataaagtgtgtcaaaatgtgaaaaagctatgttcttgatcagccataactaccaaagaagtgaatctcctcaatacacaagccagattcaaatctctaattcacagatgctaaaccctaaatcaaaacgttgcaaacccttaaatctcatggtttcgaatcaaaattcaaaagagagataagaacactcaccggagtgatttgatgagagagccaccggagacaacgacggtgaaagcgcctctctctttacaaaacttatcggagagatctgctgtgaatttagccaaatcaatcactaaattctcttcgagatcataaatctcgactcttttcttctcctcctttcctatatttgtcgtagccatgctctttacctttctccgagtatcggatgatttcttggtagatccagttccgatcgatgaaaccgagagcgattcgaagcgagaagaagtggaatgagagcaaatgagataattcttggggaagaaagtggggagatggtgatttgaacgaaggttagtaggagaagagaagagaatcgagcgaaggaaacaagaagaagaagccattgaaaagaaagtgagagagcgtttttataggtaaagtgaacaactttgactttgtagagtctgagaggaggacaagtggattaataaagccttctccgaccaaacctgtgttttgttagtttgtttatgagtctggtccagcttatgaactaatgtgtagatctagatctttggttccgttctggttcagttttatgatttggataagatgtttaggattcatataagaaccgaacaaaatttggtttgtttccggttcggataccttttgattcggataatagagtgaagaaccggtttagaaccgcggtaatgttcggctcggttacaaattatccttctaacagtcgaaatacatgaaaaattcttgaactaacctaaagactaactgaaaactaaccaaagtaaccaaaaattttttagaagtatttggatagttaggttagcctatcggttcttcgataatacccgaactgatatatatgcttccgaaagacaagtttcatttggttaatttacaatctccgaaccgaaccagatcatctaattcgattcggttctgtttggttctcttcgtttcggctattttgtccgggactaactaatcattggattgaggtatatgaatatgaattggagtaattgtcgaacttttctaaaagactctatacgtcgtacacttttaactgagttttgtaactttgtaaatcaattatgtgattttaaaaatacaagagatcacacacaaataagtacaatggctaaaagcctaaatgtagtagctcgtttgcaagaataaaccgaacccactcgatcttacattcgaacacatagcttttatttgaaaaccatcaaagagaaaccagaaacataagttacaaatagaagagaagccaactaaaccatcaaagtccttttgggatcttagatgcagcggcttggtcaagaaaccagatagcttctacgtcagctgtgagccaagcagcaggcaagtcgaagttatggttgaaaaccttagctaccgcatcggcttgagcctcatcacatacagccatgaggttgtatgaagcgcagttaataaccggtaaagtaaaggtgattctcttcggaggcggttttggggaatcagtgatataggttaccaaatttgccttctccttgatttgataatgtcccgggaacaaagacgccatgtgaccgtctggacccattcctaagagctggaggtcgaactgtgggaagccagacgatttgtatgtgcgaatgatgtttcggttcaccagtcttttgagacattcttcgtagagtaatgctgcacttttggcatcaccaagggctgcacagtctttgtcgattggatatatgtttgcaattggtattggaacctaaatagtgtgaaatatatgtatatatcaaaatcatctaacaagacggtttataactaaaataaaatcatattgggaaaatatgcatataaacctacacgaatatgaatgacatcgtcagtttaattaatgtcaaagcatgattttgagttagcaactcattaacttcacaaagttttttttttttgcaatatatgccgagatgattttgtaattctagttcttttatatatatgaaattgaatatatatgtacgtacgattccttcttaattttaaaacaatatatgtttatatcataaatatttgtttgatacaaaaatttgtatcaaggtatcttcaaatatatagttcgttttaccaacaaaaaaacaaaaatagtttgataaatgaggagcaagaaaaataccttggagagaaaaccatcaaaggcgagtttgtagttgctgtcctcatggtctaatggaacaaccctctcatcgacccaaaaaatgtgccactttgaccattcgatactttcttgatactttggttccaacaattcactgcaaaagttaattaacattggattttaatcatttttatataatataagactaaataaaagaaaaagaagaagatttaaagattttcttatatagtagacctgagccaggagatgaggtcgccaccggaaagaacgacggtgaaatagcctctctccttgcaaaacttggctgagagattggccgtgtacgtggccatagcctccgataattctttctttgtgggaaacacaatcttcttactcttcgttttctccaaaacagatgccattatgagaatctgatcaaggagatgtaatagttagaaaagaagaagaagtggtgttaaatgttttgatgattaggtgatgaacgtgcaattaggataaacatgcgttatttgtaataaaaaaattattatgtattttagtgcttatcgtattttaattatgatttgttttagggttaccactcttcattgttaatgagttttcaactcttctttttgttcctaaacagcttgttaagtttcatagatttctttatttaattatttttttctttatttaattatgctcataacatgggtcgcttttgtttaattatatatgcacaaaactgcaagtcataagaaacccatcaaaacatatataattttatatctcacagcagctcatcgagttatgaaacgattacacaagtaattggaaataaactagtataaaatattaaacacccacttgattgatgatatatctcttaaattaatatgtacctaaactatagttacatcttataaagtagaaaaaaaaaacagatcatacaagaaaatataacacaaaaatgctgtcacttttggcacattctgttgtttaaggtacaaacgtaaccattcggaacctaaaagcacatcccatgaactcgggcttcggcactttactttcttttttttttttgataaaccataagaattctgaatctttgctctataatatttttaagtatcaggaaccacatttcaaatgtaaataccccctttcaagtttcagatggagttgaactagtgatcttgagcattgtcatacactctcaaagcacttttctacttggttaccaatttttcttgtccattaattttaagacatatttcatttgctaacatcagtacatataaatgttaaataaattgtcaacgggtagccaataaattcgttaatttttttttcgtttgatttctgtttagttcatcgggtccgcagttcaaatgttggttaaattcaaatggtaatccctagtaagaagctccggtccatacaagggttgaaggtgagtggctgcatgattttaaaggccgtagatatgtgtaacttataatatttccaaaccaaatttttgtgcaaaaaaactattcaaacaaaaacctaactaccaatcacataatgcgtgagctgtccagagttgtcgttggaacgtcgactctatatgtaattactttaagaaaataaaatagaacgatgctcttcaatactactaatttagtacactactctcttcaaattataaactaataaaatgtcttttctgaacaacgataaactaaataaagtttactactagaatttttgtctccactctacgcttagcttgcttgcacatgattcgacactatcgacagaaacgagtttcaatagtgtatatacaatatattttgcagatgtaacaacttttccttattaaatcgatatttaaaatttagtctttacatttggcttttaaaactttctcatatttgtttgctagagccttatacaatatattcataaataaatcaattgaatgaagataaatgagatataaccaccaaatgggaattataaaaagatagatgcaagaataaaatttatcacatacattcttctttggaacagtagaatcatattttcctctgaattttgttcctagctctttaatggattttttatttcattgcaatgtaacaggtttcattttttttaaagtagatgaatactttagttttcatattatatgactatcatcacaatcaatgaacatcttacaaatgacataatatgttcaccagaaattattagctcaacgggcaaattcatcctcaacacgcaagatcaccacagtgaacaactcaatttgcatcattttacaaaaccattgaaatttttacatctacaagcggtgtttatagactaacaaatcgacagaaaattaccattctcttgagtcttgaaaatgggctcctttttcttaatggttcaacaaccatattaaaatctcaacctacttttttctctttttgttcatacttgataaatattgagcaaatctgacacacttgaaaacagaaacaaatccctagtaaaggccaagaaacctattttctcttctggcacatttttctattataagcgagagtttcgatttaagattttactttagtgtttatttcaaggttagatactggttattggtgcaataattatttgggagattctccgaaaacaggtttatatatggggttgtggtttattctgttgacttgttttttttgtccttgacatgatatacacaaattacttggtatatacaattaatgcttgcattctacgtccatgttttttctgtgtggaaacatattaaaactaacttaatgcatgtcttgcgtatcaactactattggccaacaaaattaccactttgaagtaaatcccattctgtgaattttaaaacgaataatattcttctcatcttctatattattcgtatacgagcgtattgcagcattactatatagtataattatgttatggaggttaattaaaaaaacttacattgggcaggtgttctcatctaatacatgttgattttatataataaaacaaaacaataatatatagtatataagattatcacttgtatatactatgtacaatatatagttaaaaagcatgaataattaatgataaaccctaaaagaaaagtttaattaaacaccattcatgaaatgacagattaaatgaagcccactatatatttttataatgatatatagtcatagccagggactcacatcacaactacaagaaacaactagctcgaatattcaacacattttgtacgaagtaaacgtacgcaaatgtattaaccggttattcaacacaaagcaacgtagagactacaaacaaaacaccaatattaatgtgtttaggctacctctctagagctcggaggcagctgcttggtcaaggtaccaaacattttcgacttgagcactaagatgagcagaaggtaacgagaggttgttgtgcttcatgatctcagccacggatttggccggtgctttgtcacaaatggccataagattgtacaaagtagagttgatgaccggtaaagtgaatgtgattctctttggtggtggttttggagagtcggtgatgtaagtgacccatttctgcttctcattgatctgtggatggtttgggaagagagacgccatgtggccatcaggacccatccctagaagttgtagatcaaactcaggataccctgtctttttcgatattgggataatcttttctttcaccagattctttagacactcctcgtagagcgtcgcgcagtgctcggcgttaccatcagccgccaagtgcttgtcgattgcgtagatgttcttatccggaatcggaacctacgattaccaaaaaaaaaatatgttgataaattttcttcaaacatatgataaaatctttttttggtcttaaggttaagttatgaaaccttagagagaaaaccctccatggcgagtttgtagttactgtctggatcttcccatgcacaaaccctctcatcgacccaaaagacgtgccattttggccattcgattgaatcaatataaggaggttgcaccaacttgctgcaacgtgtgatatattagagagttaatgattagactttttctcttatatacaacattaaatgagagaagagagagattttggaaaccagagccaatcgattaggtcaccgccggagagaacaacggtgaaaaggcctttctctttgatgaacttggcggagagattggcagtgtactcagccattgcttcggacaattcattcttggtgggaaacacaatcatcttcctctgcgccattgttgcctatcagagagaaagaaagagacgtttcgttggatgtaatactcaaaagaagaagaatgtggatattgttgttgtggtgctacaagtgttttgggatttctttgctttttatagtgaaggagaccgagtggataaaggaggcttgtgacttaataccaattagttaggaggacttaggagaggcacgtgttttatgttcatctacttggatttttttaatctttaaataatttatacagtacaatttagattttatacttaagtttagtatagtagtgtataattatgtaaatgtaatatggttgatttgaacttttaatgttattaaactttgtattttctttaccaaatcgaaaatgtgtttttttctctttttttttggatttgtttgttaaattctacttttatatgaaaaagctgatatatttaatagatgttagatctccaaaatgtgtctcaattaatgtataaaagatttctctaccagatagatgtatcaaacagtaacaaaaaatctaaacaatgtttcaaacacatgtaaaacgagtgtaactaactttgcaagaattaactttgccaaaaaaacaagtggttacaacacgagtttatcaatttcaaattacatttcaataattttctaggaatggtaaattagacttgcataataatttacgagttgactgattcatatgaaaagtttgttctataaccacccacttcagtttttctctaccatattttttttgtcctggtaaagatttctctaccaatattctccgcatttttggttacactcacttaacatgtgagagagacatacatgtttgacatgatttagcatttgataaactaaatgtaagcaacgatttaattgccaattcaatcacatttctctggtatgtaatcttaagaccaattcaagaaaccacatcttctttgtttgtctgttctttaaagctgtttagaccacttgtgtcacgcctctcttttgataatgcccctatggattgatgtaatgttctcacctgattttccaataggatttgccaaagccacaaagccagctcctctcacgagcatggggcactccacagtatcattcacaccgaaggactcgtactcacaatacgagtaagaaaaaacactttatcattcctatacactaaatttgacacttgcttcaactatcggctaaaaaacttctatcgccttctgtacacaacatattatcagactaacgaaagtgaaagcagagaataaaaccagaagaacaacacctctccaattccttctataacatatataatatgtttttccttttttagtttgtttcgaaaacaaaatgctcaaagaatcatttacaaaggaaatacctacctgacttcacttccatttcaagtttttttttttaatctttgaatccaaggtctctgacgacgacattgtttaggatgtttcttgaaactcaattcacatgttagaagactttttacatcatggtgtgtcacctaggtctcgagcttgagcttcgtacggtcacaccatgcaagaacttagcgtaccccaagaaactcagctttccatccgaacttcggatccaatccttgagcagaggatatgcactcggtcccacgctcatctcctgctttaaatcacgcccaaatataagaatattgtttttaatcttaagaaagagatggtgattacacgatctcatagatgcttaaattaggaccataccccggcgagttcttggacagatatgattcggtttccttcatgttcaaagtgctcaaatgctgaagttgcaatctgttcccattcttcaagagcctccagttggtaaacactgaccgcagccgcacagaactcttcaaagtcaagcttcttttgcgccagaggttgcatctttataaaaggaaaaaaatggcgtaattcagcacacagtgctaagtccataggagtacggaaaaaaacagcaaagaaacctcaatctcaatatcagagaaaactctggcgatattttggtgattgtagcaagctaaatctaaaaccaatcaatgagaattgtctgctgttgcaagcacagtggtaaaaaatgggaaactcagaattcaaattgaggaattacggtgaaaacagttaccactaaagctcaacgagtcacaatcatttctcaatgtttcccaccctagagaaaatgtacaatcattttcaactagcaacacatgaaaccatatctaacactcataattgatccactcataaacttcaaaagcgaagataaaatatataataagagatgtgttaccgtatttaaaatgtcaggaagccttgattccatcatagcatcagtagcatatcttgttaaagcctgcagttacactcaacgattataaacggtatatattagtttgtgtttattttgaatcaatatttctatctcttgcttcaggaaactatttctattcagaaaatggaatctagagatcaagaagggataaatatactggatctagattcacaaatcaaagtccgagtcaaaatgctatagctaaatcatgaaagacatacttaccattgtgaaacagttaagggataggcctccgtctttaggatccaggagcatgaactgtgccttaaggaacacaagttcttcatcaggtatagctttcgagagagcctgttcaaaagattaacaaatgaaaaactggtcaatataagaaacagaaaaccataggaaaagatgttctcaggaaattattcactgagtgccaaaaagacaagtaacattctgtttgtagcataaattgttcgactattatcataagtaaatcagctatatttaagtagaaagagaaaagaacaatgtacttaataataatatgaggatatcaagaaactaccttaagtgctgatcgtcggaaaggtgaggcacggatataggacttgaccaacttgtagaccgagaaatcaagaagcaaaccggggttttcgtcacgtaaccacggatgagctacaaatatagatcatataatattaccgctaatggaaaaaataaaacagttaacttataagatctaaagccatattattgtttccatttcaagatcatatctgttttaacccacggaaaagaacttacctagagcttgagcagctgtcattcgtttcctatggtccttgttcaaaagccttttcacgaagtctttggcagtaggagatatagaaggccaaggcatatcctcaaaattagggtttgctctaagcacacaacggaatattgcagactcagttcttccatagaaaggtctgcttccacagagaagtatgtaacttatgacaccgatgctccacatatctgcttcagtgctgtaagacctatggagtacttcaggtgcaacatagtatgcacttcctacaacatcattgagacgctgatctgcatatataaaagattaacaaataagaaatgtgagcggaaaacttgtacaaatgagatttggcaagactaataatgccaagggaacatatatggttacgatatcgtaaatgaccattacacattgcagctaaactcattagatatatttaatgtcaaagccagactaatgatatgcagagaatcatgtaacaaaaaaagatcattaccgtatctaatgaaatcagacaagccaaaatctatgaccttgagtatcgcatcctcatttctgctggtaaagagaaaattctggacacacaattgtaccatatgtttaagcaaccatacaaaacaaagaagagggtataggtaataactgaaatatcagcaacttatagaagcaaacagtgtacctccggcttcagatcacggtgcacgacaccttgaaggtgaaaaaatgctgttgcagacaaaatctgcacaagaatacgtttggcatcgacttcagggtatcgtccacctctgcagtaaaatataatacaaggttggaaccatatctaaatgcaaataactaacctacgaaagccgaaataacaataagcactcatataaaagcaagactaagaaaggtaactttggatttacctcgccaaaattctatccaatagctctccaccttcgcataacctgaaaccatatcggagaagaagatttgaatatctaacagtagattcatttaataaagaacaaaccatatagagtcaaacaacttactccataacaacaaagacattatcagcatcctcatatacatcatagaacttaaccatatgcctatgccctgataaagctt

SEQ ID NO: 737 - DNA, 23476 bp, Arabidopsis thaliana
tcagcaatttcacttctctacgaacatcttcaatagataacgtcgacgtcatctgtaaacacaaaattccaattcatcatctaaccaatgatcacagagaacctaactatatcattctacattcctctgaatctgaaatagtgattatgttgtgaatagtaacaaaacaagagtccctacattctgaaaccaaacaaaagagaagacagaccttagctttagagatgattttgacagccacggtttggttcttcatcttgcctttcttcgcttttgcccaacaagtatgaccaaaatgccctcgccctacttctttccctaactcatacttcccttcgaagttcttcccaaacccgaaattcttatctaacctctctccgccgccactgtcaccaccgtgatctactacatcttcactatcctccgggatcggctcatctcgaggctgaggcggagcgccacgtcgtcgtctcaaagccgccataatcggtttcgcaggtgacggtggaggaaacggccatttgaacttccgtcccggagttctcgccggtgatggagctactcccgccggtaacgggctttggaaagggctaatgttatatgagttgacttcaggagtaccagaagcaaccggagactgaggaatcgaagcatgccggtgattttgagatggttgattcgaaacctcgccgttaccggtggggatctcgtcgtcctcgacggcggagatgttccggctgtaacaatgacccatgaccgttgattgtgaagctcaaattgactgattggtcagagtcaaagcatcggacggtgaggaaccgaagatgaatagggaaaaataaaaattgtttttttaatgaatgaagattcaatatatatatttttttttggcaaaaaaacaaatgaagaaaaaagagctcagagatttaaaggaaaaaagagagaaggcgtttgttaaatgaagaccactaagaaggaggcaagagcgcgtagtggcattaatcacttttaattgtatgttaatttcatttaatgactttcacatctaatgatgttgattgttgaattgaaattaacgacgaaagaaattaaaaataatttttctgacctacaaaagtactgaaattagatcaaattttttaaaattatatgtttgcctaattaaggtgaaaattaacttttacattgattctttttctagaaattttttgttttgcattgtaagcatatagaaaataaaataaaaactaatagaggttggtattttttttttatgtggtaaacattaatgggttgatcttaactttcatatttttattagtgaaatcattatcttgcgaggtaagaaactacatatgttaatttaaaataagataagacggttacgttttgtaataatattttaatttttaaaaataattagaagaatttctgtgtcattttgaattataataaataaataaaataaacataagtgacatgtgcttatcttatatttgttgattttaattaattttaactatggattatataaactttaaaaatagtatagcacttgaaaaatacattgtgtttaccatagattttccactcgtagataacatatttgatagcaacttttaaaaaaaaaaaaaaaaaaaaaaaaaatttgatagcaattaaacagaaaattaccaaagatatctttacctaataaattgttccacaatttttattctctttctttcttacaataattaaagacctcataataaaaataagatttttgaaaacatggaacgcggtgattttgatctgtcacaaccatatgcatgaaaaacgcttaaacgagttaatacggtcacctactactactcctccaccgtcaagtactgaaaaagacaacaaaaggccactttttacaccttttaatataaaccgttttggtacaatttggtaagcaagtctctcatttaacatctcaccggtctggttcggtccggtccggtccaaacatttgatagcaaatggtcgtgggtcaaattgtttaaggacgaaaattaaagtagataataaacccactggttcaatggttgaacttaaccaagtggctaagacatgactttgctgccttcaatatagtacgagaatcaatcgtctcttaaccatacggtccggtttgatagttgacttgtgtctcaagaaatatcccacgttgtgttttctcgtaacttttcatatacgtaacttatcttgaccaggttagttagccgacaattgtcttatcagttgacattttcattcccatttctatacttcatttctctgttttttcaacctttgtatacggttctttattcaatatataaaacaggtatagtgtcccaaatttgacaaaaaaaatataagtcttacacaggaggacttggtcaaatagatagataatcttttctttataaacatgggtttatattttaacaaaacgaaagtcaactaaaacttccatatttactgtgcctaatttttgttgtgggttcacatttgagtgtagtttcgtcaatcatatcaaacaaagtaacaaaccaaaccgagtcaatgaaattcagtttagaaatatggggcctttggtttggttgatagattagttttgttttacaaggtattctcgtaagcaatcaaactgatatttattaatacaatgttttgttgaaaatgagttcaagaaaaaaataatctaatatatttatttatttagttacaaactagatatcttctctcgatgatgtgcttttagtcaagtggtaaagtccatttgattccgcttttctcatcagtgttcgattccgttaagttgtgttatctcgcctagtaaaaaagataccaaatcaatgaaactatttgtaaagaaatccaacaactttcacttccatcaaatcaaacactgaataatcataccaaacagaaaagcatggaaattcagagagagagagtaggagaggattttgtccaaaagggtcttaaaatgattcataaagatgaccaaaatgatgtttccaaattattatataagaaacaagatcaatttggttccaaaggagatagtttagcataagttactaagggttcaaaattattatatcggccgggcagcttgagatcgagaagatctttatatgaacaaaaacgcttcaagtatcttaaaatgacttttgatttctttgtctcaatatgaatagatctctttcatcggattgctattagctttagtttaaatcagagtggtgtagcctcactggcgtctttgacgggcttacccttcacacacatagagaaatgcaaatattaatcccacagtgatcagtatacttttatgatcaaccttaagagcactcaagttgttacatttttcttcataaatcggtaattagatttctaataaactaagaaattgaacacaaaaaggacaaatgaagaccacagaaacaaaaacaaaaaaattcttattcgtgagcttaccttattgggagctctcccaagacaacaccactgcaattaagagcagaaattgcactttctgcctgaaacacacgtaaaaataatcatttctcactttaatgtttgtaataaagttgattagggcctaatttgcctcatcaggccaaacaaatattcaatatatagtggatcatgctcattatttcagtgtgtatttatgacgatcatacatatatgttccgagaatgagtacgacttcaaatattcatcacataagtaaaatgaaagatgattttttttttaatccaaaactgattatgtaaacttagtattaagatgatttgatgtcaaaatctttatcacatgatgtaacttatcaaagattgaatagctaagctagtccttgcttatcaagaatcaatactataatgaaaattcatgtatgcaaacagggcaatagaaaaatcaccagcttaaattcgacaaaagcaatgcgggtttggtggtaaaagtctccaagcaacctcagatggtgaacctaaaacgaaatgaaaagatggtgtaaaatgagaaaacacaacatctttataagtgtataaacaatcagcgacagtcaaaaaccaaatctatacctccccacaaactgttttaaagaaattttccaactccatcttagtgacctgcaattaaaaaccaaaaaataaaattggtaaaatttaaatttcaccaatgtctaacaaatgacataataaagctacctccttgtcaatgttggtacaataaacagtctttccacacttctctagctcgtccttggactgaaggaagaaaacaacgttatgcatataccacattattgataagaacaagattgattcaaaattatctagtcaagcctagctaagattggtttagacatgattatctcaacttacttgtggaaggaaagacgggttaacaggcgcaatagctgttttggacataaaaaccctaataggatgagaaccaaacatagtaccggattttcgtaaagcagacctagctccctctgagacatcacttcactgattaataaaaaaacagcaagaacatctcaactcataagaaaattggcgcataattgagtacctgcatcggtgaactcaatgaaggcgaaacgaagaatggacttatagtcaccgcacatacggcaatcaacaacctttaacccaaaaaaaaatggcaagaaaacttatgagaaatgagtttgcataaaatcaaaacgaagatcattaagtaagtacctggccacaagaaagaaagagacttgcaagctgctcctcagtaacctacaaaaagaacaagagggtttttgttatgtatatatgattagattctttatgaaaacgtgttttcttgagacaatatttctctgttttgtacttggttatcgatgtctgagacatatacagttctcttgatcatatcttcattctgaaccaagtttgtttttttggttatccatggcctccctttgccaaagttccttctctgtgttaattgacaagacttagagagcaagcacaaagaagaattacaatcatatttttcaataagcaaattgaaaagctgatcctaacatgacaatctatcaccatctaaacctcgaaatggcgaaaaatgtgtgttatgttaacaaattgattaaattcctcaacaccaagacatctaaaatgaaaaatatatgcaaaaagagtcataaccatttagagcagatatttcatgaacacataacatagttcacagaaaatagtatagatgaaatatataccattgtagcaaactggccaataagaaaaatagtttgctttggaaaatggttagtaaaccagaatctatttccccaaaactcagagtggtgggtttgagccagaaaagaagggacaaattccttagccatcggattcaaatgacttatctcactcttgagattcacttcactggttctttggatcaattcgtttgttagaacagaggatttggatttaggtgtctgatcatcagaacatgatggttttgtctctactaatgaagtagtgttgttgtctatattctgattattagaagagtccaccttcacaccaacattttccgcgacagccatgatcaaaccaaaagatcaatgaatctttagatgttggtaataaaatataaaaaaacaactcatgcactggagaaaggttagaggatttaaggagatgattaaaatagaggaaaaattattatgctctttatagctaaaacaattagattttctagtcaagatttttatttcatttttttttgacattagtcaagaaaataagcaaatacaataaattataattatttaaattttctttgtgtcagcacaatttctgcatttttttcttactacatataaagttattattacattaataggattctgtttatttttttaattatctctatcttatttatctagttttggtaagagagaaaaaaaaaatcgaaccggttaatcaattcaataccggtcggccaagtgtctctcagaatttgaccccaattcgatccgatattctgaaaacgacaacgttagcatttcgccatttagaacaggaaatagtttccgtgcaaaagcttcggtggctcttctcccaccgccgtatgttcttccagcgctccggaccgccgtctggtctgactttaatttgagatctattccgatccctaacagctacttctggtatactatcgttctctctctctaacacctctgcgtatttggatcgtattgactagagtcttcccattatacttgcatcgttctctcttccatggtttcgaacttgtttaagcttatagtcttcaataccttctaactatctaaaaggtttcgtgtttcaatttgcttctggtgcgatttgctcagtgttttctttctctaccggaatcagctctagacaaattgtttgctatgttattgtattcactgggattttggatagtcccagtgaaaatctttcaatcttgttcgtgttacattttctgatttatgagaggaataaaagtctaccactttaggtaataacttatctcttttgattcttgtatcacagcaagtttcaacttggaaagaaacaatgggaatcattgaaaacggaactatctcgggtaacttgcctagcaaggaggcgtttgtggttcactatcctggctatccatcatctatttcccgagccgtggagactctcgggggaatccaaggaatcacaaccgtaaagccttttcctaagactcttgtttctttgcctgctagttattactaggaatccctgatttgtatgctgattatccatatagctcttttgtagcgttgtttgggtttcttttgcttgatgcattccatgatttagcaaattggtcacatttctaaaatgttcgacaagtaaaacataaacttgattagtagcaaacttgtacacaagggttggacggtttaatcactttgaaagtttttttttcgtaggcaagagaatcaacgtcaaacaagcttgagctgcatttccgccctgaagacccttctgcacatcctgcctatggagaacgacgtcattgtaatggttttctgttaaaaatttcgaaggaggatgttaagaaagattctctgcctgaaagtcaacctgttatttccactagcgatgcatgcttaccagaagtgcgcccagctctatgtgctgatattgtagctcgtgtgtctgaatcgtattgctttgatggtaagaatatttctctccaatttctggggtcttgtcttatacagtgagccttggcttaaaatgatacttattcatgtgggtattgcgaaggcatggtcgactaccagcatgtaattcctattcacgctgatattgcacagcagaagaagagaaaatggatggaggtgaagtcgcttgcaggtgtttgtctccattcatttggttttcattatattgcaaatctttagctgtaataacataaattaaaatgaatcctctcgagtatcatgcaggaaaaaatgatctaatggacatggctgatgaagatgtaatgatgttattgccacagttcttttcacccaaagataggccagacaacctggtgtaagattaaactttcttatttttcccctacaaaacaacctataactaagaatgaaggagaacatagttgattataattttagaagttctattgttaattctactttcgttgtttgattcacaggctgagacttccagtaacatcaagcccaaaaaagaaagatgaggaactaactcagaatctttatgaggtaaaaacaagaaatgaaaccatttgacgtttctggataaacttaaatcagactgttggaaaaaattgactcaaacatataatctactgatatggcaagcttttttctttttctgtaactagtaaaatggaattcttaattactgcaagtctgtaacggtaaggtttgagacttgaaagaggtggattctgcttaggttttcttacaggaatgtcggtagtttgcaaatgttttttctaaagcctgtagttgcagagttaatgattctgaagcatgtaaaagctcgcagttcacacttttaaaacattgagggaactgctgttctgtttatttatattgatagttaaagattccatgacagtttacttgtggttgttacttctccatttgctaattgatctactgatgatgcagatagatattggcccagtatttgcaattgattttagtgtcaaagatatccttttctccgttttactaatcttccaaatcttattattgctgagtatgaagccatgtttgtttgatgatttttgtcattttggatatctttgatcagtccttagcattcatacagatcccaaagatattaaaatgggaagactatatcgttcccacctccaaccaatggaaatggcaggtagcagtgtctgcattgtttgaagagcgacctgtgtggacaagagattccatagtccaacgactactcgataaaggtcttacatgcacacatcatatgttaaacaggtgaacaaattttatgcatttcttatgtgtattattactgcaataaccaactttctggagttttctctgcaggtttcttcttagggctgcatattatttctcgggtggtccatttcttaggttctggattaaaagaggctatgatccacggaaagatcctgaatctcgtgtgtgagttctatctctttaagtttattcatattacaaatgcatggtctatgacacggtaatgtagaattgtcatttgtacacctcaaaatagaacagaaataggccggttttacacctctgaacttcctcgtcttctgcaaagtgtttcgagaatgatacatattctacttggctcatttgagagcgtatttatcttccaatgcagaaagtgttggtgctgacattatccgggttttggaaacttgcttgacatgaaattttcttctgtagttcatattttcctgcatccagactgcagctgtatgtcaaacctcttcacctctaaccttttttatattttgtttttttcagattccagagaatggaattcagggttccacctgaattaaagggttattgtgattccaatgcaactaacaagtaagattttccatttttccttgtaaactcaagatatttttctactcaagattctcaatttgtaatatatatggacagataaacatatatcatgataacattttctttgcaagtattgatttgtggtcaattgtatgagaacattataatttttaaaacaatgcgaagtgtgtctgaattctctagaaacgtgtcattttccgattttcagtcactttccgaggatagcaacctaaatgttctcttttaacagtttcaagatagtttctcagggaacatatatatgaatttacatggagaaattgcaaataaaacattggatatatgtttgaagaaacggtccaattataaaggtgatgttttctttctttcttatttgtgacaggtcaaagccaagctgggatgacatttgtgcgtttaaagtatttcctttcaaatgccaaacatttctacagttatttgaacttgacgatgagtacattcaacaagagataagaaagcctcccaagcagactacttgtaatgtgagttatcagctaaagcttttgttaatgaagtagattccaaaaaaattagagtcttgcttattacagatcaaacctatacatgcacttgcaaaaaataccactaccaaaacactgcgtcatcaatcacacacaaatgatatattgagtggaaaattgttttatgtgaggtcttggttatctgtactgatttgtttttgttgctagtataaaacaggatggttctctgaagcgctgcttgacaatttgagactccgtgtagctgtgaggtttgtatctgtgtttcctgagccaggtttcgaagacgtttttaaatctattcaagaagagtttgagaggtctgaaaagacacgtattcagaaagatgcactgcaaccaagtcaacggaatcaccaggaaacaactaaaggtaagatagacaaagcaatttcagttcttttcatctttacatgttaggcagcctagttagtgattgttgacatgcatggagccaagtgcttctttttcaaatctcaatggtctcaaaattgtgttaaagcatggtgaacttgactggagttaatttgttggacatattgtacgacgaatttgtaagtaaatatataagggtgcacaatcacatgtgccagccaaaatcgaatgaggcaggcattttatattgtcatacatctcatgctctgcttattatcatttgtcatcaaacacattctccttaaaagaagtatggattaacagttgttggtgtaaaattatccgcagatatgaaaaagtgtaaaaacacaaacaaggagaaagatgatgatgttaatgcggatgaggattctgaagacttggatgatgaatacgaggaggtaaccatgcttacaaactacttcttgtttacttcacccattagttttcccgaaaggcttgttcatcgtttctctgttaatctaatgtgttgtgttgcaggctgcaaatgatgatgacatatcaataagttctcatggatgtatccttcaaagcataaactttcataacataagcaccaattagtcattagtacatgcagattctaggggattaggagagaatttagagcttgatctggtttggtttaaagtttttcttaaacaatgataagatggtgacatggagaacaactccagaacctatctgcaaggtttgttcaataggtttccaagcagcgcatcagctttgtatggtagtgccaatgatgataatgatagcgatggagagtatccgatttacgagcaagaatccaacgctctcgacgatgacgaggaggatgatgagtgaagaagtttgaatataacgtgtatttacattgtaaatacgaaactcggtgtgtgtagctaaatgtaaagagactagattttaacccccgtataccgcgggacgatttattttttaaaagtaatataaattaaaacttgcaaattttatttttataaaatatttatattttgcaatttataattgttattaagtaacgctataccacgaatccatgagacaattgttaaaaaaattgaagttttaacccttattaaaacaacatattaacaatattttcaaattttataaatattgattcaaatacatccaccatataacccaattccaaaataaaacccgttttgtaatttcttcacccatcccgtgatttttttttaaagtagtaatttttaaaattttagaattattaattatatatataaattttgcaaattgtatcattgtttaatacatttaatacatgtatattttatagtttaattttatatatagtaacattatacatacaaacatatcatttttggttttatataatctttttttaaattatgatgatttgatatgtttagtattagtggtcttaaaaaaataataaattaaagatttaatccgtattgaaacggttaattaattatattttaattttttattaatgttgattcaaaaacccgtctctccaaattcgtcttgccaaaaagccatttattttattaatattaattttatttatgatatgactctaaattataatctaaacattttagctaataacataggagtgcaccatatttatttaatagggaaatgtatcatatgacccgaatgcacttttacccaaatccaccaaaaaggtcttgcaaaaatactatagagataagaaacgatagttagttttgataggtataagattagcaaatatattagttagcttaaattagttaaagaatacaaattgaaaaggtatattacactttattcgaatatagtatcaaaatttatgtaacacagagatttgataaatttttaattgttgaatacttttttttttgctaatttttatgtaattaagatttaattgatttcgtatataaaatatgaaattattttacgaacttatttgtttataatttggtaacagatagatatttgaatattcagtatattttgcttcagattaggaaatctttgatgacccgtctttagatccaataagccctataattaagagatgaatattgtcgttaaatgattttggtaaccttaatgacgtcataaaaggattttgtttttgattaaatttttctaatggcattgttatgtaattaattataaaagttaaggttatatataaaatatactttccaaataatatagtaggattaggtaacggttaattgtaatttcaaacgtgagattcattgtgcaaattaaagagaatctagtaaaaaataaaactaaagggtaaaaagttaaattataaaaagataagatccattgtgcaattaaagagaatctagttattaaagattagatatgcgaataatcgtcgtcacaatctcttcctcatatttatttctctggtcttatttatttattaataggcctctctgaatcttcttcggtacgagtatgagccacgatagagagttggtttcgatcgttaggggtattttggtcaattgacatgttcgttggcccatctccgccgcacacaccactcgttaaccgccgtaacatcaacaaccaccggcctcgtaacgcaaccgtcacctccgctttacctgatattttcctcgcggcggtctctctccttttcctctggtcatctcctaaacctctagtctctcttcctccgaacagattctctttccctctaaatcctcgccgtcgatccatcaccgccatgtctcgccgatctcctcctcctcctcctcctactcaacgcttcgctaatcctcaatctctctccgattggctcgaatcgcgattaccttccgattcattcgccgcttggggagtcaaaccgggaaccaaaaacgttcataacctctggctagaactctccgacggcgaaacttctctcgccgattcaactcctccagtacgcaccgtcaacgtcgtcaccgttcgagtaatcggaaaaaacggacgaatcctagtggaagctcatcaggaattatccgatgggagtattcgtgaaagatttcgtcctttatcagagaaaatgaagcctgaagaatctcccgacgaagcagtttttcgcgccataaaagaagagctcggatctatcttcaatggcgatggtgataacattggacagagaattaagattcttcccggaacttataacagaagagttgaagaaaggaactcgctatcgtatccaggattaccggcgcgttacgctcttcactctgtgaatgcaacggtggagggattaccggagcaagatttctgtacggaggaaaaagagtacgagggaggagactcgacgaaagattcggttgaaacactcgccgctgggaatgctgtaactgtgaaacgacattactggaaatgggttagtcctgattcgattcgatcttaaaaaaaatctcaaaacaaagcttttcacaaattttatcaatcttgcttttgatacatgaataatcagagagccatgtagagatacatatacacatttatatatgttcataatcatcttcttcgtttggctatttttgtgttagtggatactattctccagaagttttgatctcactatagcttatcttcttcgagttcattgttttgtgctgaaatttgtttagctgagattttgtcaatctttctaattcgtcttgcaagttacagaaacgtaatccaaatgtatgtagttacagatctaacgtagattctaactaaaactcaacaacaagctcgaaagatgtgtatgtacacacaaatgtgtcaccaaatctaacgtatgtggaattagttgtacaaagaacagctcctgcatcggagaaaacaaaattcctctagttgatgatacaaaattgaactgtatataatatatcaatttgttggatcactatggagcttgtgtggattggacttgacgaacgaattggcctttgattcgtggtcgttgctctgctaatttcttccggctctcgtaacgaacctgttaagtcattcaaaggttcctttagtatcattacgttatgagttcatctatgtgatggaaccatcgaagttaagtttttacctttttctcataacatctgtcctttcgcttcattcggaatttggttaaagcggcttctcgttgaagagattgctgaattttcccgacggataatgaatagccatcttcgttcttcttctcaataagctgatcaatgtgattgcctattgcactatgttcggttgcagaagagacgtatctcctctcatctacatccatggaacaatcccggtcttgtaacccctcgggtttactgttgaatgggtgaaacatggaactgtactcatgcgggctaacggaactagggcttggggagagtgaagcaggagccattgcagatgtataagctgtgttgggatctctgaactgtatattgttgataggggttggcgtagggtatgaactctgtcccggccaagaattcagctgattactaaacggtggaccaggtgagtcagctccagtgtaaaagctggtgtcgtttcttcttggagcatttggaggcggttcagatgtattgtattggttcattagcacaatgttatcatcttgacttgctgcaacattctttctttgatcagtaaccactggggaggctgaacattgtgtctgcaacggcctgtgaacgtacctgcaacaagaacataacacacacaatcagcagaaagaacgacaactattgaacgattaatagaaagaagaattgagaaattagacaactcaccgtgtgaaagctgaggcactagaaggatgaagagaaggccggtctccagaagattggttctcagaagcattaggtcttctcagagaaagatcaagctctatccgagattcgtattgagcaacactttcttctctgttacgtcgtccagttcttctaaacgatgctcccatgaagtcaatggcttctgcttgcttactctgcaactcatttgctagaagccgtgtctcattaaactgagactttgcgcactccatctgtactgcgtctctcgcactaacctccacgtctgcgctctcaccttccatctctggtcttgtacacgagctctgggcatcaccaccattcccactcacaacatgatcgtctctctttccgttcgagttgtttgcagacgcaccctcggctttctgctgtccaacactctcattccatggaaagctatcaggagcaagtgactgtaaaagataatcaaaaccaaaaacaaatctgagaactcaatcatcttttcaagacaacgaaatttcccagaacttatataagaacgggtttaagttgtagagataattcatcacacataaagcttaaaacaaaagatggatatgaaacatacagtttgtcttctccagacatgctgccaaagatttctaagctcattcctcctcaacggcttaacaagataatcagccgcacctttcaacatacacttatacacagtattcaccgagtcctgtgtcgacatcactggaaaaaaaaacaatacataatgagccaaaaaatcatttcaaaacgatggaagaaaaagatgtatatatcaacgtacttataacaggaatgttcttgcaaatatcatgctccatgataagtgttagcagagcatatccagatattgaaggtagatcaacctctgttaatatcaaatcaacactttcaggctttccttttagcatctcccaagcttttaagccatcaggtactgcagcaactgatcaatacacaaaaccaaaccacattaatacaaatccttttagcttgttgtagaaactaagcgttgataaagatttctatatgaacacaaaaccgacaaaaaaatcgttgacttttctaaatttgactttgaattgtaacatttagccgcacgcgaatcagattcaaaacattagcatctcaatcgaattcataattctcagattctatacaaacaaaacctaaatctcaagcattgaaaccagaaactaacctctgtaactacatttcctgagaagagcagcgataatctgtctagtagaatcatcagcttcaacgagcaaaactctaagcgcgattttcgggagaaatctctcccacttcaccaaaccatcaacaccggcgtctttcttccgaatcttccgacgtgataactttcctccgccagcttcaggtgctttaaccaccgtcacttcaactacttcctcgctactagtcattatcacaacacaaacacttagctttgaaaaacctaaatcgattattgaagaagaagaagaaagctccagagaaagagaaacagttacaaaacaaatcaaaatatttgtgagtggagagataaatgagaagagagcaaaaaaaagaactttattctttctataatagtgtggagaaaagaaaatatctagaaaaaatctagcgaatgttttaacggttatgattgaaagtgggtggcgaaccgaccatgatctaacggttgtggaaagagtatttggatttgaaaaaatatctagtagaattggctgacgtggccacgtttgccacatcagcaaaatactgtatacgagacaaaagagatccaatacgccaaataaccttcttttaagaaaaaattggtgtggtggctagcctttggtttttctatgtggttcatatttaaagttggatttaattttttattatactttaccaaaatatttattgcaattgatgtttatgtatttgtgatggagaaatatttagtgaatttcttgtttatttttcttttaataagagatcaacactaaacattgaaactattacttatttgatgcttctaaattttacttttattttaaaatgtattttatattattgttcagacattttagcttttgagtacctataaaaatcccactcgtgacttttgggataataccaaacccaaaaaatatctaatgctagtgggaaaaagtatctatacaaatttatccaaaaacaattgtattattttctgtttggtacataggtttgcaatttgtttattttaaaaacaataaggatatttcaattttttttcacataagaaaatcaaggacacatggtataatttattttctgaaataacaaataagaactttttgttaatgaattaattatacatatatttcaatattattttttggcacaaaaaacatttgcttacaccaaatgatcactggtgctaactaatagcaaatgtcatatattattttatattttttcggccagccatatattttagtcacgaaataagaacactttaatattgatttgcattagaaaagaaatggaacaatcaaacaaatgaatatcgatcatagagattcatagtttaccaaatttttatcaacattttggttttttctattgctactattttggttgcgtggtggaataaatcaaatggaacatgcacgagtcaagagtagggacaaagggtgatgaattttaaagtaattttccgcggctagatattttgttgttgggtgggattagattagagacacttgtttaaaaacctcgtggttctttggtggataggaatatgacacgtgtatggttattatctgacacagtctttcacctttaaatggtagctgtcactgtcagagactaaatatcttcttttttccttgtctctttacgcgcccgcgagtgtaatatatctctcctactcgctctcttgtaacaagagtcttgtcctacgctatgactttcttttttattgactggaccctatggttttcttctcttaatcaaacttagtaaactactaggtaataaaaaaggacaattagtgtaatgatcaatcaaacaaatgaagaaaatggttaataataagccaggtggtttagttccttgtactagcacttcatgcgttaaactgagaaataggtttaggccggcgtgttttattgacaaaagaaaaataagtgctatataggaaaactatgtcagtgacaaatttttattgttgttagatgggtttaattaacattgttttactatattgttgctggtcacataattgacagcatatattagaaattttattatgatgttgctaatagaaatgatataaaatagacaaaataattaagtcgcattcgtccaataataaaccagaaaataattattcgtcatttggatttcagtaatattggtcaccgaagttcgaattttaacatagttttttcgggcttgaagattactctttggacataaaaaaccattaaaatcatctgaattatcaaaaaaaatttgtataatgatgataacgatatataatgtcaaataatttttacggataacaactttactgtggtatctaaataataagttatttttttataatatgtaatagaaagtacgaaattcgagaaagaattacatttttaaaacattagcaactgtttttaaaagtaatcactgttctatgatcaatacttatttgataaattacaactatttgaaagtatatttattttattaatcaaaaagataatatgtggggcaaaattaaaattcaactacacaacatgatactttgaaacaaattttttactatttttgttttgtcgcccaaactttaaattacttgaactcgaacctatgatatacagacgagcgtaataaccacaattgactaataactcaacgatatataagaaaaagaaaatgtttgattaattggttggatgatgctctacgcaccggtgttgaagtgtagtggatcaatgacttttggcttgaggaataaaatctaaagatattttggcctaacttacactgaacatgctccatcttttttcaaacagatattttttgtctgtgtgatatttccatggcctctctttttgtgtggccaactttgatatttccttttttttttgttctttacagtatgtgtatgatgtttttcttcatttttaggccacttgagatatttccatcttataatatcataaatggctaatggtctgctctatgaacaaacaaacaaaaaggctaatggcttatccattttcccaaaaaacttaagctagttggcattaatggtcttcaaaacatccatacaatcaaacattatctacgttagataatctaaccaatccgttaatctaattaaagattatatgtaaatcttgagataggccgatattgatatcatggtggataaaaaaacttcaaattaattttgctgagttgcatgaaaacaatgttttgccgatgttttaggtaatgattttttttttgagtcaattccatctaatatatttaatcgtcatcaacatgttgttctatctagaccacaaatgaattttgtctttctatggttaaatgttttcactgatatgtaatagtaatataatgggttagtaatattagatagatatttttgaaaagatatctttataaaaatgatgcgtgacaaaatcttaaattaataaattatttttatctataaaaaccaaaactatagtagatttgatcaataaagatataccttagatttgttatttcctaatagccctaatgttccttgtatgtagcagtaggcgactacaagttagaagaaaccttgatacatatgttcagggccagccctgacattttgtgggtcaaaactcaaaaaaagaaaatttaaggttaagttagaaggttaaaaaatttggggcaattattggaaaatgagtaaaataaaggatgctttgtaaataagctttgctgaaaaaaatggaggtcacagcaaatgttttatcctgctgtgtccagatgtgtcgaagatcagctctgcatatgctaacgaaggatctaaaaaagaatatgtaattggaaaatgcttagtttctacgagacaagtcgtactataataaatactaatgccaaatttaaaacatattattagaaggaaaaaagaatcagtaagtaaaaaacaaataggaatgtctaattattactagattaacccaaaaacaaataggaatgtcactaagtaaaaaacaaaactctttggaatggatgatttgaatgaatttcatggttagtttacaatagccaacaacacatggatctctaattgtccacaaaacccgtgattcctaagcttattcaagatcccaacatgcaatagcttttttctatctatttgtttacgatgattgagattattaatcattattacaaattaataaatgtcatttttacaacaaaaatcattaaaatacagtgcatatcatataaaacaaattttgtacaatcaatttcaatttgttatcatctattgtgaatattatttttctaaaccgatgcaagattgatagtatccaaaatattactattacatgatttatattgtctaaactagtgtattttaaaaatcttattgtgaaatgccttacaataacaaaatttaaaattttcactttaaatattaatctcccaatattattaatttagagaggttttagttttactgtaattagtatatttgacacatattttgtttcttacttataattttgattaaagattaaacaaatcactaaaattaataatgttgggaccatgaatttctattaatttatagaagtattaatttatagagagtttagactaattttataattttaaaaaaatattgagtttgaaataattttgttttatttataatcattatttttctaaaagtaattgtaaataagaataacttattgtgtctatcaaataacaaaaaagtgttttcgatgtagtaaaaatattaaaattgaacattgccaagaattagtataataaaaataaaaataatagcaaattcataatttactaatttttctaacatataacatatatatattttaaaatttttttttcaattattaatttatgttattaatgggaccatatatttacatagaatttttaaaataagtataatcttattaatttatcgatttgtgttattttttacactggtaccaactcgggaccgaaattttttattaatttatacagattattaatttattaaatattaatttatagaggttatactgtagttagcataatcaattattatgttagctaattaatgactaaatcacacgcatataaaataaactatgttgagaagaaaacaaaacacaaaataaagtaatgaccaaattgaattagtaagaaaagcattgtccacatatattctcactattattgacggaaaacaaaatcttaatatgtaatcgagctcaaaaatcaaaatacaatactaatttttttaaaaaccgtataacctttcatgaatcattgtttagatttttatccttgacatcacttggtgcatgcttatgacgtgtaatgaagattttggtcgatatcttgttgcgatatcacttatgaattttctttttgtcaaacaagccttttgcatttcattcattttatcccctaagagcaaaggttacaaaattttcgagtataaaaaggttacaacaacttcagagaactagaattaacaacaagaaaaggtcgatagcttttataatccatagaggaacagagacagaagcaatcaaacaacaagccacatatgacctcatgatgtatcatagacactttcgcgaccaagtcagggagctttggtgtagtcacgatcaagaaaacttgatcttttgactttgaaaatgtgtcctttgccacatggcttgccggcacgaagcgcaataaggacgtaaggaccaatggtggagactcatgggaggtaaaggttttttcgggtttggtttggggctctaggtttaggattaacgggtaaaaatgattagagaagatttggtaaccaccgttccttggagacgggatcataatgccattcttcatcaaacttttactttcaagagtagtgcccaaggtgtagctaattatctcaaggatgaagtcaataagcaaatgaatcggagatgaacacttaaagaagcttcggtaatcatcgctccttagagacgggatcataatgtcgatcatcttcaaacatttagcaacatgaataagacacctatgtgattctaaagacaaggttctcaagagatttttgtaccaacctagcagcaatgtgtgattaagactcaatcgatgtccattagcaattggtatcatgaatcgacacaaatgcaaactaaaagaaggcaaacatcaagttgaatcaaacctatgattttgcggaaacgctttggaggggccgggccaagtcattaaaggagatgggtcattgcttttggggataggcctagaattggttaatgggctcaaacatgagtggcccattaagagaaaccgtagcaaggcttccgttgaacagaggacggtgatggtacgacggatctgtggtgacagataggacctccgatgaaagctaagcgatgtcgttgggactgagatcatcaacgacgaggtacacacataaaagagatcggaggtaagggtggtgatggatgagatcggatcggatttagatcggaagagatggggttgttctgttggagaacacttcaaaaaggtcgatgcagacaaaggctgaggagaaggaagggtcgccggccaactcctctgccctctgtcactggtcaatgagcagtcgaaaaaatgaatcgattgaaaatgtggtcgggatgattgagagaagagccaaagcataaataaaaagagaaagaggtaacaaaatgtgtgaagcaacggaaagaaatcccgacgccggtgagcagaagcttcaccggatgacgtagtaagggtagactcttcgatattagtgcttggaagagttttagtgattatttagtttgtgatatacacttacgaattttctaatgttgaacattagtcaatgaaaaggtttatgaacgtcagtactagtacatactaaactaaatttactacactaagaaattaccacaaaaattatgtagaattatcaaattttatttgtggaaatgtgaatgtaagaccttaattttatgaaaattttacaacaaagaattcatgtaactaactaatttctcatatagaaactaaattaatcttgtaagtaaattaagtctcatactttcatgtaatgccaaaagaattaaagaagtgatagtgaacacacatctcaaattaaagggactaatttgtaagaaatggaaagaaaggggtttatttcacaattcttctcgttttgcatatgtcatcatccttatccatttttcaccttatccaaaatattttccacttcctttctcactacttcagtcttc

SEQ ID NO: 738 - DNA, 74589 bp, Arabidopsis thaliana
aagcttcacttctcagaagaaagtaagatctgcgaatctctctcactctcacaaatggcaacgcttttaggtttctctcagactaagtttcaccattgcggcgtctggatttctacgccgccgtgctcatcttcttccacggtagtctcaatggtgggcttgaatcggactgattcgaaaaagctccgttcagatttcctcggccagattggttacgaagatcggagacaagtaagacacagttactgtagaagctcattagctgtgaaaatgtcgtgggacggtcctcttgcttccgtcaagttgatcatccaaggaaaaaacctcgaggtttggattctgctattacacacttgaaattgattggattctgaacaaaatgttgaattttatgttgagtttttctgggtttcgattattgaggaatgttcattagaaaagttttgaactttctggatactgattctgttaggtttatgatagtgactcttgactcttactcagtgggatttatgtgttcaacattttggttttgatagttgaagtttgttgtcttcaatcaattggttaactttgatactgttgtggcagttatcagagccaattaagcagcatgttgaagagaaagtaggcaaatctgttcagaaacacagtcatcttgtgagagaagttgatgtaagactctctgttcgtggtggagagtttggtaaaggccctaggattcgaagatgtgaggtaaacatgtcgtttttattgatttgttgtgacttgatctcgatattagaaacgctttcagaagctaatatgtagttccctatggtacttaaggtgacattgtttacaaagaagcatggtgttgtgcgtgctgaggaagatgctgagacagtatacgcttgtatcgacttggtatcaacgataatacagaggaagctgaggaagatcaaggagaaggactcagaccatggaaggcacatgaaaggtttcaacagattgaaggtaagggaaccagtgattgagccggttgtggaggatgttgaggacagtactgactcgagcgtaggagaagaagaagaagaggatgatttgatcaaggaggttggtccagacttacctaataggctaatgccttatcattggagtttgctgatcttatgatgacgttttctgttattgcgggtttttctacagattgtccgtaccaagactttcgagatgccaccattgactgtcgctgaggcagtcgagcagctggaactagtcagtcacgacttctatggcttccaaaatgaagaaactggtatgcatgtgacaattttattttcttccataaatactcgattgcttaaacctcagaggagtcggaggaagatcaacaggaatacttacattttgatattgtttttggtttgcaggtgagataaacatagtgtacaagagaaaagaaggaggttacggtctgataatcccaaagaaagacgggaaggccgagaaggttgagccgcttccaaccgagcaattgaatgaacactctttcgccgagtagactgcctctgctcacaccaaaaccgataagctcatctctccttacagtttacctgtgtaggagttagggttcttgaataaacaatgcaacaaagattgtagaagtcagtgtacataaaaaaatggccaaccactctttgttacttttgtggtgaaaaggaagatcttaattctctttccatcagatgatagcaatacattttttcataaacaagaatgttacataataatcatacaacagtcatcatcatatacataaatgccaaacttggtttggtttagtgactctattaggccaaagaccgataaccttgagccgctgcttcgctgttcttcttgcttgtatgtataccgaaagaaccttcttttctaggcttagagagcaacctggataagagaagaagagatgccattaatatacagtaggagtagaagccattgaacacagctaacgaacttgccttcggctgacattgctgctttctggttcatcatgaatctcttcgacgttatagcgtggattctgcaatgaaaatgagacatattaacaacacagttcgattcgcatcgcatcggtgaacactgcagagacctaatccagttctactgctagtaataacctaatacattatgactatcaatgccattggaatcacataacgtaaggatatgcaatagtcatgatcactcacattgtctgaaactgatgttgaaatcttcatcttcttgctttttttccgagcaattccaccatcatcatcatcaacatcatcacatttcctctttttcttcttcttcttcttcatcaacttcttcaacttcgaaacaactcttgatttacctttcttctctctcactttccaaacatttctcctcctgaaaacaagtttctcagatttccaaatcttaaagctagtatcaatcacggtcacttcacttctcgaaaacccaactagatctttctctcctttctcttcttcctcatccacaccatcaccttccactacacttcttctcctctccctaatctccggcgccggaggtttcttattgtatgaactacgcgacgatgaagtagcgaattcacgaacactagggagacaattagcgtcgtcgcttttctgatttaccaacggaacaacaacgtcttcaggagtctctaaagagcaatgcctagggtttgattgtttccttggtaacttcttcttcccgggaattgtggaagatttagaggagccgctgaaattgaatagctcgaagagaacatcgctcatcacgccgtaccattctccaggaactggctcctccgatggactttcagctaattctggatctgaaggaattggagcagatggaggtgaatcggaagcggaactagtggcggcgatttccgtgtggtggttgcggcggagaaagtcgtcgagagtaagtggattgccagaagcatcgtcatcgtcggttgtgaggcctctgtttaatcggaggcggttgagccaagtggaggaggcaggtttgtcgtcgatgatggagcttagcatcggagacgacgaagatacaaatcttggctcgtctttgttttgttttttttctctctgctgtgaatttaaaaacagtgcgccgtttggattacaggaaaactacaaatgaaaatcctgagttcaactacgcgtcgtcttcttattatcatttttttttttggtaacaataaatacgtcttcatatggttttgtttttataaatccaaaaatactaaaaccaaaaaacattgaaaagcggatttttctctatctttaatctctcgtagtactaatgttaaagcggattttttggcacgaaaagttcgtacccaaccgcttcatattatatttgtaaacaacattcctcaggattggctcgtttgagtcctaattaattttcggatgacaaaaaaaaaaaaaacattgaaaaagaaattcccccatatttttgttgttgtatatatttattaaacaatagccaataatagatttgatttatttttgttgtctctcataaacaatcaaataaattgtaaataatcaaaatattcatatgaggcaaaattcataaaatttggaagcaaagaaaaagaagctcttctagtcaaataatccgattatcatgtcatcttcactctcttctttgatcacctcctaagattataaaacaattataccatttagtatttgatttagtagtttgttgtaattaataatgtgataataaataccatctcattcttcttctcctcgggaatagagactgattgagaagcggtaggagcagcagtggtaactggacgagccacaccacaaccaccggctcctacattcatgatgagatcgtcgatgttcttcttctcacatagcttagcaaagaggctaggccagtatgactcgacattcacgttggctgttttcaccagttttgatatgttctcagcctaataattttacattattacaacacttaagtgagatcagtttgaaaccacaaggcaagaaaagagagatgacgattctagagactaaaacataggctaaacagtgtctcaatagctagaaaacaaatttgaagaaagagagaagagaagaaaactaacggtgatctcgattccatcatcgtggaggatgagagcagcataagtgcaggcgagctcactggtcgacattctatctacctttaacctctttgtactctaagttgtattattatcgcttgcattttaagttttgaggacgtaggtattttatatttgggctagaattttgtaaaatttaacccatcacataaaatctgacaagtagcttgatcttaattgtaacaagatcacaacaaatttaaaaacattttgacacatgtcaaatagttacattttagagtatacatttgttcctaaatctaaaagatttcataagctaaattttctattttgatcatcttataaattgaaaaaaatatgagtatccatgttttccaaatcacttctcaaaccattagaaaaactctatttatatacaaagaaacacattgtgattattagaataaaataaataaaattttaagtatggtatgatattatggagacaaaagttaaaaagtaaaattttcatttatagtatatagatttataacattttggaattctactattaatggtttatagattcttatatttctagaggagattatcggatcagtgatttaaattaattctcattttttataattttcaagattgaaaattttgctacgatttataagacttcagatgtgaagattctaaaatatttgtgtcaaacattggattgtttataataatttactcaccaaattcccattggagttcatttcaaatctttgtgtcacatagtcgactgaaactccattgaaattcaatttaaatctgtgtcaaataaacaaataagtcttccaatggaatttatactgcaaatctttgtgttaattatgcaaagaagttaattcaaactgacaaactccattggaattcattgcaagctgatttatcttagagacgtccaataaagcaagacagggttgcattgtactaagctccaattaccaaatctaaacaccagaaaccgcaatatatcctggttgggttttatacacaacataagataatagtatcatttggttcatcaaatgaattcagttttagttacaatcagatagatacagagtcattgcggacctaaaagcgagagggagcgcaaaccaaacctacttacgcacatgacgattatacgggtctatgctaaaatccttattgatcacttcacatctgcacctgacatcaagtgaaatgtatagtaattataaggaaaggttatttgattttctaggttgcatatgtgcgtgtatatatgcaatgctgttgtctaaatgagttacaaaaacctgaagcacacatacaaagatgttcaaaccagcatgaagtttccaattccacttctatatgtttctgagggcatacagcacagtcagcagtaaacaattctcagatacttcgttaaattaacaatatttgtatacgtagctagtggcttcgttaaattaagaatagattgtctcaaaaaaaaatagactgaagaattatgggtaaaaattagaacctgacgagtgtacaactattcatcatatgatacatcaacttagatgaaagccaacatatgactactacactatcagccattacagcaagtgtgagacctgtcgctaataagagccaatatatatgactactaaactgtgatttatgtatgcataacaaagtaattgattttaacagagatattgattcaggtaaatctaaaacgagttagtgtcaaatctctagtggctttgttatcaagaatcgaaaaaacgtttagttaccaaacctagaagactatctgtaatgcaacacaatctaaaccaataatcaatgcttcctcattagaatctaggcctagcaaatgagaattatgtagcgaaacagaaactctcacctcaaactctaaggagctgcattttgttagcaaaagcaataccaatccaatcaggctgcgaagaagaccactgcaactgattaatctccgaaccagccgaataaaccgacatcggatcaatcccattgggtccagcaacagtaggaagctcccaaataagagcctgtgtatcatcaccaccagaacaaatatgtttacagctctgaggcgcccaagctatagcattcacactagcctgatgtctttcaagctcagcaacaggcatagtcggcgaacgaatatcgagaatcacaaccttattagaatccatcaaaatcgtagccatatatctaagatcttgtttgttccaagcaagtcttaacaaaggcgtatcaggctgaggactctcgtaaatgattgtagaatgttccttatcacgtaaatcaaagatcctaacggatccatcagcagagactgatgcgaaaaccctagcttctccccaagcaatgtcatgaacctctttatcatgagctataagctgagtctcaacaacagacttctcaatatcccaaatcgtacacgtcgtatcaatactacaagttccgagacgtttcggctctacatcgttccaatcgaaggaagtcaacggcgcacaaaactcgctcgttttgctgttgttgagaaccgagattggctcgacggttgatgaatcttcgttaatttcccaaagacggaggaaatcgccggaggaagcgaggagatctccggaggaaggacgacggagagaaggaggactgaacattagctttgttggaggataaggatgctcgaaggagagattcgggagaggcttaacggtcattgaatcggaatcgaaagagagaatgtcgatgcggttgttgtaatcttcgaggaagcttccgacggcgattctgtgaccggaggatgagcggagagaagagaaagccatggcgtagagtggatatggtgagtcgtatgtgacggcggtttccgatctggataacgaatctggagctgaattatccatggaaatgtgtggtgctgattcgattcgagatttggcttcttcacgacgaaagtgagaggagagttttgaggtcagtgtcagtcggatttttcaagagacggagaaataatcaatggagacggcgtagatataaaccctctggattaatcagtatcttttaatgtatctattgataatgggcttctgtatattcagataatgggccttttattttaacgttaagagctatagaatggcctaattattggatcactaggatgacatgaaacactaacaacattaatatgtgacactctaatcattttactaacaattgtctaattcagctaaaataaattgtttgtgattaagataatcaacaatccttttttattattattattaagaaaatgtaaaatttattcgaaaaaagcttttaacattcggtaaataatttgcatacaatttttcaagaaagttctactcccctttagtgtttatattaaagcaaaccaagcttccatgcattcatcgtagcttctatctccttgttcacgaatagagaagatccagattcaaatttgtttgtcaatatttggaagcagttgcgccggcggtaatggtgcctctccatgtctcgtattgttgctctctctccatatggaataaacgcgatctcaaaggtgtaacgtgctaaaaagagatttagtcttcccaatgacgtgtctgtgagggttctttcaacatcactccaccttgcaagtgaataataagcttagttagtctgctaatctttatctgaaatttggttgttggcatttatcataagacatcgaagttgtaaatttggagacaatataaatctagcattaaacacatgtcaaatggaggatttatcaagtggtaacataaattcttatcataatctagcataagtcatgaatcaataaataaataataaaaactaaccactaaatatgatgaaaagcataaacataactaaagaatataaataaaagataagagattaaaaggtgaaaaaatcttttactaattggaatgagaatatgaagatcttgatccaaaatgtaagaacattatatagatctcaaaatttatgaagggagaagaaaacttaggttaaaaatgtctaaagcttacttaaataagaaaagattcaaattaaacatgactagaatatgtgtagaaaactcgaaataatgttttttaaaacacatttatgggttattacgatttttctgtacaatgacagaggttcaaatttagaggaaagggacataacgaaagacgccctactttgacatgccctacctgcttcaaccccaaacccacgtttactccaaattcatactatttgatattacatcaatcaatacaaatagatacatccaataattcgtacatactcgtgatattcacttatttagaataatagtcaatagttcatactgtaattaataaattagcccattgacgacaaaaaaaaatgagctcattaattagctacctagtatattatcttgatcaaatgttggtaattcaattagctagtttttggggagaataaagtatggaagaatagggtgcggttcataagagagttagctaaggaggtattggaggcgagagctagtagcggaaaggcaacacaaagggctggtcgggttgagaagctgataaaatggcttatctcgtctatgggctggtttaaattaaatactgatggggtattttatggcaattcgagactcgcggctggtggtggtctgatacgtaatgaggagggtgaatggtgtggaggctatgcgctaaacataaggatgcttattttatggcctatctaccaacttgacattaagaatgcttatttacaacgtatgagaccgtttgcctgttttcatccccatatttgtggtaaatggtggttgagattttgaagacaaggttatgggactctcatctgctatcatttccagtacgtttgcgctatagttttttatcgaaaaactagattgaccgtgtttcacatatagagaggctaatcattttacggacatgttaacaaactatgcttgtctttaagcttttatgctcttgtttatgttctccggtgtgcggatgaaatcttacgggatgatgtttctagacctgtttgttcaagacgagtgattgtgtaattgttatttttgttttttaatagaagtcgggagacattctctcggttattcaccaaaaatgatttagtaactatgatcaaaaacttttgtttgagattctttggtttaacaaaaagaaaaagagtatgttaccgaattcaaattattaatatccacgtagcaattgaatacttaattttggtataccatatgaaataaatattatttgattataactagtttctacataatttatgatttttatatgcgattatgaaatctaaggctataccaagatatacctgattaaaatcgataagatcataaaatttgatatcacataagaagacaaaaaagaaagtttaacacatatgtaacatctcgatttttaaaatataatgatgcatctggaagagttttaaataattaatttggtcatatatattattaaaatgtatttatatttttggtctaatattctgaaaagactttaaaaataaagatttttaggttggaacaattttaaaatgaatagcttttaataagtgatttttggaatcatatgaataaaagcaaaacacgaatatattatgtgataatttgtaatattgataaacaaatatttaaagtctcttggatatgtatgaataaaaacaaaacatgaaaaagatcatgtgataatttgtaatattgataaacaaatatttaaaatcttttggatataatagactgacatttggacagaaaaaaatttatatattgggttcactcctagaggtgaacctcttttatttacccctttttaattaaataataataataaacaatatgacatatcatactatatttaaaataaatcaaaactaaaataaaaataaaataaaacaaattatagaaacaaaatctctacaaacccaagccgacatatatatttaattataaattctaaatcctaatcattctttcataaacttaaaccaagatataattttatttaattgtaaaatctaaacctaattttaataaatccaaattaacatataatttgtttaaatgtcaaatataaatcctaaacatttttctataaatccaaactaacatctactttctttaaatctataaccctaaacacttttttaaactcaaaccgatatataattttgtttaattttaaatctaaactctagtgacttatttataaacccaaacctaaaaataatttcgttttattgtaaatttaaactctaatttatatttataaatctaaactgacttataattttgtttaattgtaaaatctaaattttaaatataattaatcttgtttaattaaaagtatacagatttgttattttagtttattatataatatgatataataactagtttaaattaaaagtaagagtttattcttagaggtaaatgcaagtattgtccgaaaaaacaaatctaattcaagtagtgtccgaaaaaaaattctaactagtttgatagttaaaattttgatttaaaaaaggaaaaaaatcaaacaagatattaattagaagtgtgagacacggcacaagagtcacatgagtgtacgtacttatcaagattgactctgtctgagtctgaagtcccaaaccatgatggcaccacttccacatacgatcgtgccccgtattttggatagaatacggacagtggttttcgtttggacacgtgtcctgctttatctcttcgtcgccccaaaaaataccacaatgtcttatctcaaccacacgtgttctgcttatcccaacctcacaatttgtaccaaaatacacactttgcatggaagattttctaattatacaactcacattattcgaatttaaatttcgattttttagtttcaagaaaatcattctttgatgggtacttgtcttatttaacaggttgtatacttgtattcattgttctgccaaatgaaaataaaaatgaaaatgatgttcattgtttaataaaagtactaagataacaatcacgacaaatttctgtctagttcattaaatatttaatcaaactctaaacgattttcaaacaatttttataattcaaaaaataagttacatatctttgtttaacataatataataaaaataacatgaataaattattttaacataaaaaattcagtttttcaaaaataagtttagaagtttacgttctaaaataaggtaaaatatgaatgctgttttaagacgcaatctagataattttttttaataaaaaccgagatacatttaaatctatctaaataacttataactacctaattgttacataatctaccaatttaactctatgtaaaataaaactgattttagtaacatttaagcagtacgagaatgctagcgcctaattaaacgatcttctaatccactttcttgaatatttgttttaactaaatctaaacaaaaatatagttatataaccacaaatattaatgaaatttaaacttatagtaactgaaatacccaaaactaaaaaaaaaaaccaaaattataataattataaataagaagatattagtttatgtttacaatcgaaataatcaaataaatgattgtctttatttaggactacgatcaagaaccgaatgggcttttccaaaccaaaccgagatttgaattttatggtgcggattcggttaactggagaatagctatcaacaacaatttaaaatagatttagctagatcggtttggttcggttcgttttgtattctctgtcactcctcacaatcgcttatattttatattgtatgtttaaaagtcaacatcgaaatattgtacgttagtatgtcacttatgataatgtttattcgtaaacacaatttgaaaaggtcaaagaaagaggaaagatagttaatcaagcccttgttgtcaaaaataattattttatttactgtcatcgtaatgtttatcaatgcagttattaatctcatttttttctcttccgaagtcgacgaacaataaaaaaaaccaatctcattcgaagtacttattactgatatgatgctgagctgacacagtcgtaagccttggacaacaatcattcatgacgtcactgctgtgacgctagaatgatgacattatatcaatgtttttttgtctgaattttgttatggtaaaaataatgaaaatgtagagcttgagtattttgattttcgttttattgtaaactagctgaatctgaatcttgagcagttaattaatttcgtaatttattaattctattctgactttttaaaatataatatatattaactttggtagatgcttaaggtaattcttttttaataaataagatggttagagtatcttaaagttagcttataagaaaatcggaaaaattacttttggtgggttaattgtttctgtttgaagtaatgtgtgtagatttttcttatgaatttagattaaaaactatttgtttttcagatgttttaagaaaaaaattgtcattcatagcttgtccattcttacataccttaataagaaaaattataaagttttgtggattcacggaagctaatctaggttatgtatttgcccaaaaaataatctaggttttgttatggaattaagaaggaaaaaaaaattgagataaatagtatataaaaacaatttaaactaagtattattagcttaattgataaagattttaggtgaaacttaaaaatagttggttaaagagattacaaacattaaccaaattaaccaagaacctcctagtatttaaaaaaaacacttaaaaatatccaaacatttaattttttaatcataaatcttataaaacccacagctgtcctttcgaaaatccactatattcggtggattaagaattaaaaatcattcgaataatatgcatacttatataacaaaaacaattcacttgaaaacataatcaattgagagtaggaccgagtaacactgcattgttttatatatatcatcgatgcacatcgcatacataatatactcaaagtcgagccttccttcctttatctcttataccctttttgattcttcttcaattttctgacatcaaatggcggcaaagctgatatccaccggtttccgtcatactactttgccggaaaactatgtccggccaatctccgaccgtccacgtctctctgaagtctctcaactcgaagatttccctctcatcgatctctcttccactgatcgatcttttctcatccaacaaatccaccaagcttgtgcccgattcggattttttcaggtacctaattataattatatatacgtttagatcacgcatgagctttttgcttctattaaaaagatatgtgtgttttcttttgttgtatttggttaaaaagtggtacataattagcatgaaccttctctaatcaaatagattatatataaaattctacaaaaaaaacaacaactttatgatggttgactagttctatgctgactattatcattcggaacttatatacaaagtggttaattttttttattttcgtggttaatcattcgaggtcataaatcacggagttaacaaacaaataatagatgagatggtgagtgttgcgcgtgagttctttagcatgtctatggaagaaaaaatgaagctatattcagacgatccaacgaagacaacaagattatcgacgagcttcaatgtgaagaaagaagaagtcaacaattggagagactatctaagactccattgttatcctatccacaagtatgtcaatgagtggccgtcaaaccctccttctttcaagtaagcacttaaacttacctctaattttcttttgataaattctaattttactttacattttctttctctaatactttctagtaactattctattgattttataacgttccatagtgaataaaaacatatacttgcatgtgcttaaataggtaaaacgatctatcaggtttatggcatatctcacgtctttaatataattgttgatttttgatgtgtcagaattgccaaaaataggatattattagctatttgtagactatctttaccggaatagatttagattctattgtaaacccatgtatatatataatcatattataccctaaattattaataataccaaatgcttttaaagcatctaggctacctatcaaaaatatataagggtgaggtatgtcttcttaacattttctgtttgtcatgattcctataaagtttttgttgaaatgtttaattgattgatcagaactgaaaaaaatatgtacaagagtggagtgtttcctacgatgcttcattataaaaactagagcaaacattcacaacattataaaattcacaacaaagcaaaacaaaacaaaacaaaactggagcaagaattgccttttctcttcagatgtataagcatctattgtcaacattataaaacatacgagcatatgatcttcgcaccagcatattttctatttctgtcttttatcaacaacatatctatgaaacttttaatttcgatacaatataccatatcactataactatttattgtgttctgtttttttaataactagaatattggaatattcatatgaatatgttcgattcgatttgtttgaaggaaaattcgaccttcatttgagtcaactgtttttgttcttttttgaaaccgacttacaaagaaaataacacagattgtggtaaagataagttaacttgtggtcccatttggtttatattttctgatttggctcgccatgtgatcacatggttgctaagatttataaaatctttacatgcatacatcaattagtatacatgtacttgtggctattggacttggacatatattttttataaaggtgttattgggataaagaagtgtgcaccatatttttttgatcttttataaaaccgtgtgaactactacaaccgacttgttcggtagacaacaaactgattataaaccagcaacgtgtttttgttatatagtacatgtatcatctattagtaaataagtgaagataaaatatataaacagaattaatcatgaacagtaaaagattcgataaagatgtgttggtgaaaaaagacatgcagagattaaaacagaaccacacgatgaaaaaagtatcatgaaaacttccaaactctttaaactgtgtcattccgacagatctccaactgaactgttacagaattaagagtcaacaccggccaaaacccggcgacatcgtgcttatcgaaaggttagttaggtagaggacaattaccataaattaggacaataataatgatgtgacaactattattatatatgatttttgtctcttcaagttatttaatttttgtcgttttattgttgcataacgcaaaaaaaattcgtataccattattttgtagtgttgagccgattaattccttaatatttgaagaacttagacatggttaaaatatcacaacgcgtcaaaaatatgatttataagtaaaatggttaaatcataactttataaaatagtatatgatatatgtgtggttatggggaagagacgtcactgtacaccgcgttggcgtcagcgtcgtgatatcatgccaatctcttaattacatttttaaaaattgtaaaaaaattcattttcattgactcggtcttcaattttacagatcgatgctcttatcttattttataatttgtaatatattcgccacaaattcttcgggtaagttcgaagctgacaagtgacaacgtgagttacgtgctccactattcctttaaaactaacatagctaagtataataatgcagatttctcgagatatatgtgttacattattaaatcttaattatatgatatacactattagaatgacgtctaaatatcataaaaattacaataatcataagctcttagaaaataacttttcatttttaatgaaatatttacattcttagcaaaaaaaaagaaaaaaaaactatattagttattgacaatctaaacaatttgagtagctaataagtctttgtcatgttgttgttgcagggaaatagtaagtaaatacagtagagaagtaagagaagtgggatttaaaatagaggaattaatatcagagagcttaggtttagaaaaagattacatgaagaaagtgcttggtgaacaaggtcaacacatggcagtcaactattatcctccatgtcctgaacctgagctcacttacggtttacctgctcataccgacccaaacgccctaaccattcttcttcaagacactactgtttgcggtctccagatcttgatcgacggtcagtggttcgccgttaatccacatcctgatgcttttgtcatcaacataggtgaccagttacaggtaccttgattacctttaattcctccatttgacttgtgatattaaaatttctagtttaaaccaaaaaaataccaaccattactaaaagagtggtgggttggtttcgacttcaactttagaaatagatggtttatgttgtatcaacctgcctagtttcaaaccatttaaataaatgtgatccggcccatgaacttcggacttaaaaagaaaagaattctagtctttacgtaatagtttctctctactcaactaccccaataaattgagatctttaaaacaattacagagaattagttataggatttcaaaaagtacatctaaaaatcttaggcaggaagagtgtaaaatatttttaaaatatttatttttaaaaatgtattctggacgtttatttattttaaaaagttcgggtactgttagaagttaaaagttttaacattgattaaaaatatgatttttttctttttcttataagacataaagtgttgtaagaaatatcatcatttaaacattactacagttatgaacatattatagatttgtttagttaataaagggttagagaattttccgagaataatagccaatcatcaagatcgaatgtttgtctagaattaagatcttaattaactgtgtgtattttcaggcattaagtaatggagtatacaaaagtgtttggcatcgcgctgtaacaaacacagaaaatccgagactatcggtcgcatcgtttctgtgcccagctgactgtgctgtcatgagcccggccaagcccttgtgggaagctgaggacgatgaaacgaaaccagtctacaaagatttcacttatgcagagtattacaagaagttttggagtaggaatctggaccaagaacattgcctcgagaattttctaaacaactaagatacatatatctttggcctttgtgtttgtctagtaggcatatatatacaagtcaataacagcattgatgttcgattctacattcctaccaacattttgttctagacgtatgataatagtaggaatcatgatcatatgtcttgataataactatcatgggcatatttgtttgtgtgttaaataatttcttaccttttatttttctatatgcttcaaaacttttaactttagaaaatgtttcgtatttcttcgatgacgagattatataaccaactagtttcaaaacaacccggttaaggttagattactctttaaggcccaacaaaatatcatagtccaaactgagcctatccatgtatgatgggtggatttcgtgaaagtctactaatgagatttatatatacaaagagctttccacgactaaattagaggaaagttgcaaattgcaaacaatcaaacaagctccaattctgatgattacactgaacaaactttgaagtcttatgtaattagcggaggagaattagcaatactagttttttttttctcttcttcttgatattagatttatatattgaatgcaatctctgtttgcaatattaaacctagaaacaaatcatgaaaatgaatagctgaagaaatagatgtcttggcatttgggataacaaaatgaaatgagatacatattagtcaaattcaaacaattcagataagttttctgtctttcgtctatttaactgaatctaattttcccacaaaacaagcttaaatcatctataacatagaccaccaattattgacactcttaaacaaatccaacggcattggcttctggatctttgaagaaaatgtttgaaattttgaatcatttggctgagtttttagcatgtcttcttagacaatctgactagtcaacgtattacagtccaaatttcatagtatatatatccatgttccattcaaaatcattcaacgacgaccatgtgaaatagcaattcacgaaaaaatttactacctaaattgttttatttccctattttaaacagtccacaacaaaaaaaacaaaaaaaaaaacgtacacggttttgcagaacactcttgaaaaactaagcaatatgttggtcgattttgactgtatttttaaaattggtgccaactaatgatcaaacatttttataaacctaaaattattcttaaaatatatgtatgtctgaagactgaaaccttagattctcgtccgacaacagaagaactagcatgttcattataatactctatcaactagtgttctgttttcaacttagtttcttgcttttgttcgtattccacttttcttctatattaaattcttgtaaggcctctgttgactgcacatgtatccatttattatattactaatatacataaaaccgtttaacatttcccttaccatgttgacaatattttcccttatggtaagaagatttactcatggctctcataacatgcaataaaatatatcttatgggctttcatatgctaaaatgatgatttttatacatgaaaagaccaaactatagatacaagaatgatgtcacaaaaacctttaggaagaaattagaaaacttaacaatatacaaatatatctcaatatcaacaaacatttatcccataagttaccaataactatataaagaataagttacttttaataattgaattttatcttcctccgagcgagcttaaatcatctgtaatgtagaccaccatctcttgacactcttaaacagatccatcggcattggctttccggatctctcaagaaaatgtttgaaccacatagctgaatgtttagcatgtcgttgaagaccatttttatagtcaacgtagtacaaaccaaatctcactgcatatccatgttcccattcaaaattatccaataacgaccatgtgaagtagcctttcacgtcacacccatcctcactgcatatttgtatccatactattgattaattgattttactgattaattttatatagtaatcggtttttattgatatatggtgaattctcttacgtgatcgctttctggagttcttgaagatgtttttggtggtactctattctctttgtgtcttctagtatctcttcacgtgtcaccgttccattttcgtagtcatcgaaacctataaattatcaggtggttactaatattaaacaaaaaatagatatagaattaatgatgattagtaagaattatcgaatagttcaagactatgtttctaacgtccttaccgttttcagttatgtagatagttggattgttgtacttatttttgatataattaagaatctttcgtaacccttccggatatgaccagagaattttggtaccatcctgaaatttaagggaaaaatagaaaaagaatggttatgattacgtatttttaaacttacaaaaacacaaaataaagttggagaatataaataaagttcgtaccgattccaatgagatggtgtcgccggtacgatttgtcactaaaaaaagtgataaagggaatctcattagttgttaatccataagtattttcttgataagaaaattcgaaagccaaataaagttgcataaatatgatataggtactttaatttacatttgtattggaggtgttggtcggtcatgaagcgaggccgtgaaatatcgacgttaagatcgtgagcaacaaaccgtgcagtgtagtaatttacaccgataaaatcaaacgaatttttaaccatcatagattgctctttggtaaaagatggcagtctatttccagcgcttatctttatcgtctctggatagtctccgaaaactagagggctgagatgcctagacaaaaatattagataaacaagattagataaccatatttttattgactttagataatgaattaacaacacataatgaactaaaataaatgacaacttaccaaccaatattgaaagcaagagccctttcaactgcttctttatcagcattagaagcactgtcatatggctcgaaccaataaggagacaacactatgcctatcttggaatcttgcgaaatctgttttacaaatacaatcaatttaaacaccagttcctttgcatttattcaattccttttcttagattaaataaaacaaaccaatcaactcttttttgaattggatattcatattatttttaaactactatattttagaaagacatagttacgttttaataccttgtcacatttcctgaactcttcaacagcagcagcgtgagcgagaagaaggtggtgggagactaaataaggctccgtgcccgagtcaccggcgatacataaactgtttacccatttagaacatcgacccattgccttattacccgcatcataacccgaaacgctataaacatatggctcgttgaaagttgtccacatactgaccttgtccccaaactcttggaaacaaaatctggcatagtttcgaaaatcatctctgtatatatgaaaaaacaacaaaaatgtcagaagaacaatttttaaaactcatacatggtatgcatagcatgtatggataacgatttttacttacatgattcgaggacttaaaaagctaccatactcatcatcaagagcttgagggatatcccagtgataaattgttacaaaaggtttgatacctgcatgtatgtttaaatatatagtgtgatgagtaacattgcaaactacacaaaattaagagttgatgtgtaaattgattatgcatatgattctgaccgttctcgataagttcatcaataagattcttgtagaattgaacaccttctttattgaccccatcacttagttttccacctgtaaattaaaaactcgaaaatgtaaattaaaaattcttatagaataattagtccatcctaagaaagtaggagatctaagaaaagttcattctaaaaggttgttataaatagaaattatacttacttggtaatattcttgaccaggacagggaaaatctgaaactatccatattcatttcctttattagtttgatgtcttcctgctcatttagtccatttacattaatataagtcattgcattcaggaaaaaaaaaagtaaggtaaagcttgattattcagatattcatatgccccacacataatatttctgaaaagtatgcacttttttcccatttataaaagcatgcacgaaccttataacgatggtaaaaatcaacggcaacatctccattgtccatgttcgtcctttctgcaaaaacattacttactatttttaattgatctttatatgaatataacctttgaacaaaaataattaatagaaaaatttaacaacatggatgaagtagaaagtgaacctggaaatgcatgtgtgaaattgtcccatatgcttagactcctccctccttcttctactgcaccttcatactgcatttcgtatacgcttacgtaaatataactcaatacggttttaactatttctaaactatgtaatttacgattcaaaaaagaaaaagaatattttcttttaatctatatacagaatgctagttttaaaatgaattaaaaagggttattgagaccaaacacaaaaaaaaaggttattgagacatgaccctaagaccagtccgaaatatagttgcacttgtgaaacctattgttacaagcagcatcattcgtacattacataaagtataactaacgaacctgataagcggaagaggcaacaccaaaatcaaaatgaggagggaagctataacgatttagaggagttgtagaaaatcttaaagatctgccctgtgcaacatcccatgatgctacacatagtgtgattactagtgcaatgagcttaattgccatattccttgacgttaattagttataacaaattcttagttttgcttttatttgagagagactgaagatgtttagaggaatttgagaaatgttaatgcatccattttctcttatatagagaaagaggtagctagggcacacgcgtcctattgaatctttaaaatagtatttttttgttagcaattaaataatcatttcttgactgaactgggttgccttttaacgactaaatgaagttcaagtggaatgattcaaacggttatttccattttgtgttggtgctttttaagaaaacactattgcagcatatcgcgccaactacgtaaacacagaacaagtattttgatatattttattacgcaacatcaataagaggaaaagcttattttagaagacttaccaaggtgtgtgtttcaaaatgtctcggtcgcgtgtattagaaaacgtgtacgagatttgtcaacaaaacaatattcttgaagtttattactagttgaaaaagttaaaagaatgaagattaaataattacataagaacagaaactgaatcatatatataaatagttcacttgttaagagatcaaaataatagataataaatagagttaactaagttcaaagtcactagtggccaaaacattcattaaaacacattatatttgcaatcttaaatgagaacacatctattcaacataataaaacgtgtgatgaaatgttatgttctaattaccactaacaaaaaaatattatctattcattgttgtttaaaataaaatgttatgtgggtaactttaaaatgatatcgttttattctatggtttcttaatagactaacatgttatgttaatgattaaaatagatatcattcagatgttttaatttgtaatagaaggatgtattctcactcaaaatttttgtgtgttcgttctaaaaaaataaacgaaaatatattcaaaaagctaaaccaaatattgcaaaattaaccaaaatatatgcaaaaagaaaaatatattatttagtagaatcgtggagataattcaatttatataaaaagatcaaagctaaaatattttatttgacatcgagttcaggataaaataaaggataaacgttttaaacatataggagaatcaaaaaaaaaaaagagaaagaacaggtaaagatgatgtgtaaaagaggacgtcagtcttaagtctattatactcattttcctgtgaccatctatgcattacatggtcattgggtcaattgtagtttcttatgattaaatgggaatttggtaagtttctgttagtaaatgacagatagctaaaaaacaaaaaaaaaggtttaaattaaagacgccattttaattttaatttttttaatcatttgatatgctaaatagtaaagtggaattaaaatgaaattgcgtgtttaaatcatatgataaaattgtccaaactattttatttgaatttatgattggtcactagctaagatttgttttacaaactaccatattttaaatttctacatttttttttgccataatgatttagaaatttcgaaggacttgaagactttaatcaaaattaagctaactgtaagtcattatgtttctcgtttccatgggtaaatattgatgccaatcgatacataagagttccatgtaaatcgtatcttagcagcgttaatattgatgcatatacagtatacacggtcgtcaaaaaaggtacaatagacagtcaataataagtaatcattttggatatagataattgtgggcacaagtctcccactttccatgcaaggtcgtccagtagaatagtcattagtcaatctctattatgctgggttgacggcacattttaaatttttaatactgaaaatatttcttttaatgaagactttttatatctgtccaaaaaaaaacaattttacatcatgtgtcttgaatcagagcttgaatgatcattaaacatgcttcatccaatagaagatacacagaaaaaatgaaactcctgagtgttgacaaggaaattgcctcacacggacaaagaaactcacatgagattctttgacaaaaaaaaaacaaaaaaaactcacatgagataaggatatggttctttttttttttttttttttttgatcaaaggatatggttctttaagatatttctttgctgctaaaaaaaaaaaaagaggaagatatttttttgaccgaaaagtaactagtatagtacaataaatgtttctttgattgaagatgcttttttttgtttaccattctgattccccaaatttgatttttttttttgaatcatttttcttaggttaaatatatttttcttcgagaaaaaaccatttgattaaaaataatcttatttcttgtgggctctaatgttgaaaattcccaaatctctccttttttctccctttgaaaaaatttacccattcactcccaaattctacttgaccttaggtatatcaaatctaccaaatatacatagattttcttggtcccttttcaaattagtttattgaccgtttacttggtctaagtaaaattttaaacatttttatattatcatggtgttatttgcattaattaactcgttttgcttttagtagttaacttataaagcttaacaaaagcttacatcttccatattaaaaatatgattaaaacacaaatagatttgcttatataaatataaattctaaaactaagaatttatataattttcacactttactaaaatacaaataggtgaatgaccctcgaactgttgcacgactacactattttcttaaaattttgtttgcatgaaaatcataacttatatacagggatgggaccacaatagaaaaatcacccaaaaaaaataaaatatcgccagtgggactatccggacaaagaaaaagaggcaacaaagaaattgtcttctaccggacaaggaaaagatcatatgagataagaatatttgtatcagtaaattgtcttctctcactcgcttgctttccaagtgaacaaagatcattccatgtttaatagttgcttgtaacgtttctcatggtttattaacaattttatgaaacaactaaaatttgtcagtagttaatagaaaataaaagcgtttaaaaagtaactaatgtatcacaataaatatttcatatctacaaagttagtatttttgttcaaaaaaattataaactataacaatattgctgaataatagatggtttctaaacctcaagagtcaagacgcttatcaaatcagagcaagtaagcataagttttagttttaagagtctaccaaacatcaagcgagtacgtgaagattgaaagtttttggtgaggtttttggttccatagacatcaaaacaattatttttttcgttgaaaaatcgatgaatatgtttaagatttaataagtaaaaacttagctttagcagttttgtagttttttccaaacttatctctctctttaaagttattatctaacattttctgttggtttagttttctggaatatttatctttccagctgaagtatgtttcatccctttaaatatatttcagatgacaaaaacactacacaagaatttttatgcctcccctaagacaatcacgcatataaaatcctcaaattataaagatgaaaacttaaccataatataagggtagggtgttttgtaattgtttttctatgtatgtgttacctagtcccaacaattgcaagccaaaatgtgcactgggttaatgctcaatttttaaaatggaatcatgattttttattcatgagaagaaaaattatacatagatagtaccaaaaaataaagtacaaaattattttgaccaaaaaattacatgtatatagatactacaagaattaggtcaaaagaccttaagaaaaaaggaaacttaacaatacacaaatatacacaaatgtatatggtatttctaaatattaaaaaattcttaatcttatcccgtaatttttatcaaaattaaataaagaatcagttatttaatttcccccaccatatgagtttaaatcatcggtattgcagaccaccaattcttgacactcttaaacagatccaagggcattggttttccagatctctgaaggaaatgtttgaaccacttggctgagtttttagcatgtcgtgatagaccatttttatagtcaacgtagtacaaaccaaatctcactgcatatccatgttcccattcaaaattatccaacaatgaccatgtgaaatagcctttcacgttacacccatcctcactgcatattcgtttacataaaataaatcaattttcctcgaattttatcaatcaatcatatactaatcaattttatttttcatatatagtgaaatagtcttacgtgatcgctttctggagttgttgaagatggttttggtggtactctattctctttgtgtcttctattatctcttcacgtgtcactgatccattttcgtagtcatcgaaacctatacatttttacgtggttacatatattaaataaagagaatagataaaacatctattgatgataagttagacattattgacatgttcaagattatgtttctaacgttcttaccgttttcagttatgtaaatagttggattgttatatttatttttgatatagttaagaagctttcgtaggccttccggatatgaccagagaatttttgtcccatcctgaaaatgaaggaaaaatgaagaaaattatttatggttaagcattgtttaatatactaataatttttaaagaaagtaggaataataatttgtgcgaaaagtgcataccgattctgatgagatgtggtcgccgctacgatttgtcactaaaaaagagtgataaatgtaatgtcattaggtgtaggttcattagtattttcttaatgctagaaaacaaaagaaaagttttttttttaaggacagccaaataaaagttacataactcggtcatggtacttacatttgtattggaggtgttggtcagtcgtgaagcgaggtcgggaaagatcgacgtgaagatcgtgagcgacaaatcgtgccgtgtagtaatttattccgataaaatcaaatgaattttgtaacatcatagattgctctttggtgaaagaaggcaatctatttccagctgttgtcttaatcgtttcagggtagtctccaaatactaaagggctgagatgcctagatattattgtaaaataaagaaaattagataataatttttttttctaactttagatattgatttaataacacgaaatggatcatatatatcacaacttaccaaccaatattgaaaacaagagctcgttcaactgcttctttatcagattcggaatcaatgtcataaggctcaaaccaataaggggacaacactatgcctatcttagcatcttgtgaaatctgttttaaaaatatcataaatcaaaatgttacttttttgctttcaaatcctttataatagataaaatgacacgaaccaatccatttttttttttgttgtgttaaaaaatcttgaaaattgaaagtaattatatatattttaggataacatagttattcttatttaccttgtcacatttcctgaactcttcgacggcagcagcgtgagcaagaagaaggttgtgagagactaaataaggttctgtgcccgaatcaccagcaatacacaaactgtttacccattttgaacatcgaccaattgccttattgcccgcgtcataacccgaaacactataaacatatggctcgttgaaggttgtccacatactgaccttgtctccaaactcttggaaacaaaatctggcgaagtttctaaaatcatctctgcatgaaaccacataaaaaaaatgtcaaaagaacaatttttaaaaaactgatacatggtatgcatatcatgtatgatctaagatttttgcttacatgattcgaggacttaaaaagctaccatactcgtcatcaagagcttgaggaatatcccaatgataaattgttacaaaaggtttgatacctgcaagtatgtttaaaaatagtgtgatgagaaacatttcagacacaatatttaacaattcactttagatcaaggagtttatttattttatttatctataattatgtgaattctctttgaaaatgttaaatcaaagagttgacgtgtaaaatttaataggtggcattataattaactaattaagcatatggtcgatgctgaccattcttgataagttcatctataagattcttgtagaattgaacaccttctttatttaccccatcgcttaattttccacctgataattaaaaaaaaatggaaagatagaaagcatttcttatcagaaaaggttaaaacaaaaaaaagcaagttccatctataaaagaaagatcttaaactgtatacttacttggtagtattcttgaccaggacagggaaaatctgaaactatccatattcatttcctttattagtttgatgtcgtcctgtcaatacataagttgttgccattagaaaacaagagaaacattacttaaagctttgattattcagatatgtcccacccatttgttaagataatatatcacagttacgtcacgtttaaatgagcaaagatgctgataagtaggtatttttttcatttcaactaaaccatagtcacttacaaagccaaaatatatattaaataaaattccatgcacaaaccttataacgatgataaaagtctacagcaacatctccattatccatgtttgtcctttctgaaaaaaatatttaaaatgttacgtgcaattatagaaaactgttgatagatatattaataaaaaaaaaagttaattaacaacgtggatgaataaaaaagtgtacctgggaatgcatgtgtgaaattgtcccatatactcggactcctccctccttcttctactgcaccttcatactgcattttgtatacgtacgttataactcaatatggttttaactaaagcctttaacccaaataaaataaaatttaaagttacacttgtgaaactcaatgttataattagtaacattagtacattactaattataaaaaaaaaaaaagaggaaaaacaatagtacattacaaacaaacctgataagcagaagaagcaacaccaaaatcaaaatgaggaggaaagctatatcgatttagaggagtcgtagaaaatcttaaagatcttccttgtgcactatcccatgatgctacacaaattgtgattactagtgcaattagcttaattgccattttcttggtcgttacttctttaaaattttatttatagattgtacgtttatttgagactgaaagagtgaaggtgtttagaggattgtgagaaattttaatgcatccatttcctcttatatagagagacatagctagggcacacgcgtaccaatggaatcttgcgcatagtttttgttaattattaagtaatcctaattttgactgaaccggttgccttttgatgacttttgtttaaataattggatgatagtcgtgagtctcgtgactaaacaaacttagactggaattattcaaacggtttattcccatcgcgttataaaataagaccaattacaacatatcacgtttaagtccgtaatttaacataaatcaagtgttttcaaatatattatttaacatacacacaacttcaatcaagacgaaagtagaatttctaaagactcaccaatggggtttgtttgaaaggttcccggtcattcaaataaaacgtgttttcactaataatcacatatctattactctaccattttacattttcaaaatgttcaaagcaatactttttgtttagtaggaatgtaggatcgtggaaataaatcaactaattatatgaagagatcaaaaccaaaatatatgtgatgggattaagaagatcgagcaaggaaggaggctatttggagaaaaaatctagacttagggtttagtttaagaaaacactaatagtttgcattcgacttttggtttaaatctaagctgaacgaataaccaaactatttttacttttcaatcgaacgatttatattactaaacagaactttaaccgatccaatcaaactttgtttcgtccagtttggctagtttggatttaaaacaaaatttgttaaggatcttcataataaattagataaggcatattatttttttattttgattattatttttattcttctatagtttctaaactatccaaatgaaaaaaataagaataagaattaatatacaataattaggtcttaagtatattattttgaaaacatgaataagtactgtattttcaaaaaacaaaaaaaaacaaaattttctctttaataattaagtgttaattgggttagtccgctctaattttcccacaacgcatatattttgctgtttgccacgtatcaaggtcatcaaaccacgagtattttttgtttggtaaggaccacgagtattaacataacatgtcttatgaccgcgtttttttttagttctgtaaaaaaaaaatgctttcaaatttattaaatataattgtttctatcgagtcagttttcaaaagttagttaattggatataaaaattcaaaatatctatatttagaaataaatatgaatatttttttataattaatattaatatcatggatcatcttactatccacacaatttaactcttttgaaacgcaatatgcagaactcagtaaactaaaaatcaaaaccagattccttttttgttttaatctaaaatcgtaatcttaacatgttatggtgaaacagttgatgcctattaaaaaaacagttgatgcctaatcttggactgtttattctaaccaacgcacatatttaaaaccctacacaatcatataaaaacatcactcttaaaaaataaatcacgacgatgttcaattttgactgtatttttcaagattggtgattactaatgatttgaatacgttttgaaaaaaataaatagtattcctcatttatttcttatgaaaccctagattcccgcccgacaacataagatgtagcatgttcttgtattatcttagttatgcttttgctaaaatattttatctcaattattgacagaacatagattattcacgctttttctttcgtttgatcatttaatattttcaaatttttactgcgtttttgggaaaatttgtgttcttatcttcatgctacagttcataaatatttaaattacttttggtcattatgttaaacaagattaacacgttaaacatgataggaacgaaacatatgttaaaaattgttttttttatttattttaaacataaaacatgttagaacttaatcataaagggaaatggtaaacatgaaaaaaaaaaaaaactaaatgaagatcaatgaaaatttattgaatgtgaggtggaaactagaagaaacttttccaatatattcatttctctccaatttatagtagatgaacatttctttttatctctttttttagcataatgaacataattctttttcgacgagtttttttttttttttttttttttgggacaacaatttcgacgagttatagtgtaaaatagtaatcttttattcaacttgttgtatttctctaaaaacaccaccagttgagttggcgcactataaatcttatatactcaacaagaagagaaaagagaatattattcatttcatctagtcagatgtgccataatgtaattgtaatttggtatatttgttaattacaatatgttacaattaaaaaaaaacaattaattacttgcagtttatcatcccgaactagcgacgaagccttcgtgtatgtttggactagctggcccaagtcaagccagccctgtggtgcctttttttttttttttttttcttttttttctctctgcagctgccttcaagtattcctttccttacgtacgaaatatatgatggtttagaaacacatacggatgagaatgatatctagaagaggataatttgccaaggtaagatgtgcaaccgtatccaaccagtccagataagtttgtttgttttttttttttttttttttttttgataaaccctatcggctgatccggtcagctccggtagaaacgcaccgaagtacttcagagtagacttcttcccgaaggaccaccacactgtctgtcccgagtttggatgctttccgactaatgccagggggtagtcaggccgcctgcatttctgactaccaggtaaaccaattgggccaaagcccaactgacagacttcccaaacaaatgtgatttttgttttcagggaggatcgaacccaggtctggaagttttaccctttcccaaatctagtccagataagtgtcgagccaagaaattctccgataagggcaagccaagtggtgtaagagtaaggtcgacatgtacaaaataagtgatctttagttttgttacgctctctacaaaaacacagcctttttttttccgcactcttatacgattacatgtagacaatctagtgtttagagcaagccacacaatgaaaagttagcgaagaactccctgagcaaaccgtatgagttgactccaagccaccttattcgtttaggcccaagtgcatttcaaacatacgaaatttcgtatagctaatattcttctaagaacgtttcttaaaaccagaaaaaggaaaactaatgaaatgctaagttacgttgctaatttaaccaaaatataaatgtaaatttactaattgcatattactcctctgccaaatttcacatgctcactaattcagtcatgtgtgcttctcaaatgtctttctttaaatccttttcttaattgctccgtgtacgcttcatttcaagtacattagaaacctgagagtccttcttattaatcttttcttctatttgtgttctccttttcttctataggccggtgagattaattctaacaaaaccaagccacttatgatacttacatggtacctatcactctctagctatttacacatcatgtctttctttttttttggttctcttttcattatagaacagtcttcctttccttcgttttggttacaaccttacagcctctctttcttgcgaaaacccattagacattgcttgcaagccctcgaacactctccttttaattttaaaaaaaaaaaaaaaaaaaaaacctaaaacaatcgcttatattttaaaatgtgaaaaaagaaagcgggagttcaacctcgaggtttgttccttacatgcaaatatgactcgagcaattgctaattcgtgaaatcagaggctaaattgactgttaatatttgtagagatattgtgttcaaccgcaagaatttatggtattcactaaccagtgaaaaaggttgcgtaattagtggtagtggcacacaaagtctttgtgacaaagacgacaatgaagcgcaaaagtacatgattgtatagtccttggcttttttttgaatattccttggctttgctattcgctgtataccaattatgatatattgaagtatgatggtatatatattcttttcagaattgggctataaggatccaaccttggctaccatgttatgctaacatcgcaattgagttacatattcttattatgtggtttggctcaactaatgttgggggttatgtaccactttgtcattgaattttagataatttccgacctgttttttttttctgataaaaggttttcagttaaaagtaagcaaccataacaagctatgacaattaattcataaagtttgaaagtagtgagagagttacgcaaaaccttaatctagtcttcttataagctaacaaacatagtagaaaaagagaaaggagaaagagtcgaatgtctaggagctttacaaattgaaaagtccacggccaccacgaccccctcttccaaccgtaatccaattgtcttggatcttttgggttgtctttagaagccttcccacacgggaactcgtgacagattcctcctcatattgcaaggtttctagatccaaatgtgactcacttattcccatattgtatcaattttgtcccatcattatatatattttcattctccatgatgcacacaacaaaattttctgacacatcttaacaagcttccaaaaagagaaaaaggtgttggagttggagatccggtttaactggtttggtttacaaacttggctacaaagttgcgtgaagaggaagttggcgttaaatcaggaatgtatatcagagttactccataaaatctgtattgttaatattgtttcttctcacctccactgtcgggttcgggttcgggttcgctgccatcgtcactcttcgtttcaaaagaaaatcaaaattgatttctcaagatctgataccatgaaataaacagagtttcaagagtttgttcttgtttattatgaatgattacatgtacatatatagcttttagagaacacaatctctgtgctatcacgatatcgtatcttacagaaaatatagaaacaatattaacaacagattttatggagtaactctgatatacattcctgatttaacgccaacttcctcttcacgcaactttgtagccaagtttgtaaaccaaaccagttaaaccggatctccaactccaacaaaagggttagaaataattaccatatgtacatcaggtaaagtttggacaatggtagaaccatttccatcctttatagatgcagattgtattagagcagactttttggatgaatgagacatcagttttggttggagcaatatttgtgggagctggtgtggctagttgagtaagagactaggtgatacgagtgtataaagaaatgtttcgttttaattaaagtaccattcatatttataaacacagttagtattttacatttgataaaacaacataaacgaaatttccttttatccctcccttaacaaagactactaaatatttcaaaatgtttggaggagctagtaaggccattcagatagtgagcgttgttttgtttagttagattttgctctgtgctagccgacctcggggaatgagcttggtagagtgagctagcgctttcgttttctttggttcgtgtggttccgctctgagagagctcatggatagttcaaagagtcactctcacgcgacgcgggtggagttggtgatcgagtgctttatgttctataccgttgacggctcagttttctcgggctaccggtgaaaggcttccaatccttttggttttgatgaaacggtcatggtcgtttgacaacttgtaacttcttcctcgaggtgtcatctagaaaaacttcagaatcggtttatcgcttcattgattccgaaagtgtaattgcttttgtgatatcgatggatcgattgttatttgcttccatgttttttattcttttttgccatggaaccaaattataggatttactcatgtaattcctaaatattttcatttttaatgaaatatttacattcttagcaaaaaaaaaaaaaaaatcaaaatggggaaacttaatatgtctatggtttttattgttgtcatctttgttaccgcgagtgaacacgttcgatcatttgctgtggaattaagtgaaacaaatacattatggaatcaaatgtattgttaagatcaggccaaatgtaagttggatataactgctcaagttttttgaaatggaagcgtctcggattcttgttgcaaggaacttatgaaagaaggaaaatagtgtcatgatgatcttatcaaagatattgccaatagattatagacctactttaatcggaagcgaacccaaatatttgaaaacgagaaatggtttatgggttcaatgtatttttgtttccaaaatcctgtagatggcttaattatgttttgacataataatatataattttgaataagactagttgatactattccaattataatgcactaattaaacctacatctaactctatgtgcggctaaaaaatcgaaataaataaatatctaactccatcaaaatccaaatgaatatttacttttttgcggtaacagaaaaaagaaaggttttacctctttttcaggtgatctagaggcgttaataaatagactaaaagtttctaaacgattgttccacacgcattataaccatatctacgttttcaacttattacaatggagatgaattttcttgatttaccagaggaatgcatcgccaccatgatttctttcaccagccccttcgacgcatgccgtatctctgctgtctctaaattgcttcgctccgcggcggattccaataccacttgggagagatttcttccatcagattatcgtatgtatatcgataattctttatctagattttccaacaagcagctcttcctacgtttttgtgaatcccctcttctcatcgaggatggaagaacggtaattttacactatcccatgttctttttgttgctcaataatatgcattatgcgggtttgaattcgaatggtgacacgacccataattaaactactaggttaactaccatgttttttagataaatatattctagaaatttattgtttgagaggaatgtgatatggacgatgcatgcaaccaaataattgaacaaaaattatagaagtgttatttggtcagaaaatgtagagcttttggatggaaaagagaagcgggaagaaatgttggatgttatctgcaaggaaactagatattgtttgggttgatagtcctgaattctggatatgggtttcgattccggactcgaggttaataaatttcatctccatcttttgcctcttctaatcaaaagttcttattgttgattttggttagtttgtaacagatttgaggaagttgcagggcttctaatggtatgttggtttgaaatccgaggtaaaataagcacatcccttctctccaaagccactaattacagtgcttaccttgttttcaaagaacaagaaatgggatcctttggatttgagtctctgcctttggaggttagctttcgttctacaagaactgaagtttataacaatagaagagtttttcttaagtcaggaacacaagagtctagagaagatgggtggttggagattgaacttggtgaatattatgttggttttgatgatgaggagatcgaaatgagcgtattggagactagagaaggcggttggaaaggcggaatcatcgttcaagggatcgagattaggccaaaagaattgttgtgattaggtaactccttttccaatgtgatttctagtttcttgtataataaaaagtctacattttttcatatcactttaacaatcatgcatagatgatgcatgctattggatatgtatattgacatattgttaggtagagtgttgatcatgttatcatcatttttttttattagtttgactattttgtattctccattttgttattggttgaatgatttttttgacgagatgcatgcgttcgctattgcatccaagaaaatgtacatacgtgaagtagatgaaagagtaatgatcccataaatgtgtgtgtctaatcaataaacaagtcacatcaactgcataaacctcatacttgtgtacgaggtgtcacaccaatcaacacaattattttctgtaacaaaaaaagaagcgtaataattaaattttggataggtgaatattgaccgtcaatctgtttatataaatgaaagaggttgtcaacaactgattgacattataagtgaagaacggacaaataatgttggagaaactaattttacacaaatacaacaatgtcgatatatatatatatatatatatatatatatatatatatatatatatgttcttgatcatgaattcaataaggatacaaataaccaggcagattcagcccagcagcaagcttctcacactcgtgacggtcacggatgaattatagttgttttattttcttcatcaaagaaattatacttgttgaactctttttgaatgtgactgacaaatgttgctagtttactacggtgccaggtagttaactataaaaatgatattaaacaattaaaaatgcaaataatatatttatttaacaaaatgacaaattatttgacaggaacatatcattacaaactgaaaaatttgtaatattttaaaacttttgtaatttgtaaaggaattttttcacgaattacaaattttttacatattttccttgatcattttgttataaaaaaaaaagaatatttttaaaaatgaccaataaaaaagaatattgttgcgaagatacagtcacggataaattataatcggtatactaaatatattttaatttatacaaataaaatgaaatataacatatttatttttcagttcgtcacagtaatcttcccttgtctctgcgtctgtaccctttatttttagggtaatattagtagataaccaaataaaacatacaaattaagaaattagcagagagaaagttttttgttacaaaataaccatgaacccacgttgtcggaagaaaggaaataataaagctacccttcatttgttgtaagatgaacagtaaacgaaacacatccgtgtaattttttaaaatagcatgtaacattaaaatttcacatgttatatttagtttaaaaacatgatatttcaaaaaacgttatgaatttttaagaaaaaacattattataaaattattttacatgaacagaatcttaaaaaaaaaattatatgtgattttagtaaaaaccatgtattactaaaaaataagaatatatttttaaagaaatcaagtgagatcttaataaaaaaacgtgtattactacaaaatatcatgataaaaaaagatattaaacggaatagaatgtttttttcaaaaaataccatgtgctttttataaatactatgtaataagagaaaataacaagataaaaaaagcatattatgttatcgcatgtatttcggaaaaataacatgttacaaaggacatttacgtaattacacgtgttctctaatatgtttccgacaaaatactgtgactcaaagttaatttgtaattcttttcaaatctatagtcatttattataaatactcttgtttctaaatgaactgtcatgtgattcggtccccttctcatcatgtcggtttcctttttcacaagatacaaatccctaaagaaaaaaatctcaataataacccttacatcgttacatgaaaacaaaatgggcatctttagttagggtccccccaaaacacacaatcaatatatttttaatctctcaataccaaaattatcattttgagtttgcgtgacgactttcattgaacatcgtacacacttcttattttaaactaattacctttttcatatgatcatgctggataatatcaatcatctaacaaaagaaaaataaaccaaaatgactgaaaatatacaaaactacgaaaagaaatgagatatccatatttttgcttttttaactttaaaaatgatttattatgtaatttttatatgtcctttgaatatatcttcatacttatccacaatgtttctttcgttatctatatcatgaatgatatatgaatcgttaaactctcttatatatatattagtttaatgaaataaaacttattatatgctttcatgtttcagttttctaatgattactgtagaaaaacatcaatgaaataatatcgaaaataaatagaaagttccaattgaataacacaaacattattacagtcaagacaaagaaaattcgaaaatctcttcgtctattaaaaaaatactcagaaatttaagagaaaagcggtgtaatttggagcgcatgatgatgagttgttatcgttacgaggcaaggaagagtcagctcggccgctagtaggagctcggacacttcgacggtgacttgtaggtggtggagggaggagtgtggcggtgatgcgtgtgagcgccgccgtatattcttcaagcaactcggctgcgatggctactgttatcatgatgatttgaagattgctccgatgatgatttgctttgacgtttgttagaaaagctctaaacctttttatgatcttaatttgcttgcaagacaggacaatgtaagttaccttttatgagacggcatcgtatttatagagcatgagctcttgaagctagtggccataaattttggtaggttctggttataaattattgtagccgtcagatctaccgactttatcatatctatattttatttctactttttatgcagcttttggatatcggattttattccctaaaaaagatcataccaatttttattttacttcttcacttagcattgggtgtcaatgctaaaaagatagaagaaaactagaaaattattttatgaaaactttcaaaaaaatttgcatatgtataaaagtttcagtttttttaataaatataatgtaacgttaaattttaaaaaataaagcaatgggtgtacaaagttgttttgttgttttgaaacaaaatgtaaaattaaatggaaaaggataacgttagaatgtagatgatcgtgtttatcaaataattataggaatctagctaacgttggatttttaatcctgataaaacaaaaagtagcattaacaagtaacagaaaattcaataacattttatagtaaaactaaatatatgaaatggatgaacaaggtatttttcaaaaatgatgatcagctagcctatcatataacaagtgctacttataatatattaaaactatatataatgttttattgatgttcattaaatatgtgacaaagagggtgggatgggcaagattgtgaatggtgattctgaatgggcaagaagcaggggagactaactccagaagagtatgagtgcgacacgatgatttgggcaatgcaatcaatgtggatatagagctacattatgatgacaaagaacatttgaagttgcacattaacatcaaggcaatcagaacttgggagcaaagattaaggaacttgtgccatttacattttaacgaatggaaggaaattgttgtgctgattgcatggcaaaatatgtcatagttaattatgtttgatagaatctaaaatggtaaagatgatgaattagcttcgtatagtaagaaaatatattgggacattaatagttaccggtaaacaaataattgaaaatagtctatttgaataaatatttgccaataattagtccaacgacttgtatgattgtagaccctaggaaaataaagacatcctgcgtgatgttcaagtattatataacttaatgctcatgatatgttttttgtttcgaaggaaaataacaaatgtctttcttttttttctaaaattcttttgttaaaagtaagtcgtgtaccatatagattcaaactcttcactaaaataacaatgataaaatggaaaagagtcgaggttttgtcaattttaggaaacagagaacccgattggcacaaacgacatctacatacgttaactataatagcaatataacatgtttttttttctgacaacgatttcttatagtttgaattatggagaccatgaacgtagtatttgtgctcaaactgatatatattaagataattgatatttacatatagataagggtgttggtttctgaaaaaatcctctttcgcagtatctgtcattttcaaattataggcttacaacattttggcaaagtttggctaattaaaacatgtggtaacaaaatcgataataaatagtgtaatttaaactataatagttcgatatcataaaaatagggtttaccaaaaagaataatattgttgaaaacttttgtgaaattaattcaaaaagtacatttggcaacagatataactcatttacaattttattatccatagttttacaaataaggaattaaaatttgtatttagtacatattctttaagttttagtgctctcaagttgaaaaacaatcaaaggtaatattttacccaattttaaatttaatctgaattttatagagcttacatacggtatatctaggggagaaaaatctatcgcactattgggccaagtaatatattagtttaaataaaaaaaactactaaaagaaagtaatttttattttaaaaaatagacttttgttttttggttttaatgttaagaaaatttagactttatgttataacaagaatacgtggagggtttgaggagttatcataaacagctgtaacacatttaatatgttcctaaaaataatcacaatcataatacatctcccatttctgtgttttcatcccccagctgtaaaatatatatatataaaaaccgattaaatgtatgaaataagcgggtgagtagcatacatatttgcaaatggccgcagcccgcaggccatttaagttcgtattgattctacctacttgaagttacttgaacttgcttgcttctattgctactattgattctagttacttgaagtttggtttatggtttctgttttttcttaaacaagtttctagcaaaaagaacacatctactaaatttatatgttatatagatatttatagaagttttaaccaaaatgataaattatttatcgaatataacggcattaattgtttgttatataaatttattgtttttgtgtatatctaatatcttggccaatggccatatgttgttaaatatatatagacgttatgctacaagaaacttaatatatctatttgtatgaaacatacatgaaaagaagataacacactaacacagatcgaatctaacggtttctacaaaatacggagttttcaatggataatcttaaatctttcgtgggcttgttatctacggcccaactcgtggaatcatcacctcactcgatacgctgacttccagttcactgcaaaacaaagttaagtgtacctctacacctttaccaatgcaaatatcaatcacaattttggattacttttataaaaaaacatttttggtgtgtatgaacatctcccaaatctatttattatgaattttgaagagttctatgactagactaaaaaacctgaaacgagcagttaaattcacaaggagttttatgacaagtttataaaaaatgaaacgacaagataatcacctcgtgcatgtaattgatatagatctcaacaaccagagtaaacatgctcaaatggcaagattacttattcagaaatactattttggcgcacctttgaagctttgatagtatagttttgttcaattaatgcataagaaatgtgttagaaaacatttggttcgggtatgtatatgggagtttttttagatgcatgataggaagcttgttcaagtacataaactattgtttgttcaggaacaaaacctgaataaagaagtgggccatataatttaagtatgctttaggccaatattctgtgttgaatccagaagagatggatcacatgtgaactctggacccatgaaaattagggatttcggctttaaatttcgttgttaaaaataaaaataaaaatatattatgaaagtgtttcatagatgtatttaaacgaataaccttaaaacataaagaacaacgacaactagaattggggattcaaactgaaatctcctacgtctcactagagaatcccttccaaaacattccactgacacttgttgaaatttctatgtttctctctactagctaggatcgctcaaattacttcactgactctctctttctctcataacacacactcgttcaaaagcaagcaaacttcgaacgactaattaattaatgactcacgagtgcttctcacgtggtgtcgacttaaacctctttcaagtgagtactttaacgagaaacttcaacctttatagcacaagtcttccatcaattttttttatcgtttctctaaaaagaaaagacattcacaaaatttgagaggttgagaagaaatagacaaggtatgctggaaaagcctgccacgtccgaaaaatggagattgacgtagcaaaagaaaaaagaagcatgccatgtgcagacccacctagatctccaaattcccactagaatctctttgtctttataaatcctttttacattatgacatataaattttcctctagaatatacaaaacaaattcgtgtcacactttgtattcttacatgaatttaagtagattccgtatcgatcgttgttaattgttatagttgcgattacgtatataccaacgcgtaacgtatccaccgataattaaagataccaaacacacgtacattatattaaaaaataaatagtttacaaattctttacctattttctttcttttcttacctaattattaattcctctaattatattttccatagacatatacgaaaccaaatttaattaagaaatgcaacaagcattagggttctcgtcgctaaaaagctgcggcggaggaatcctctctatgacgtatgaaggttgatagtaatacatcatcctcttcatcccttcttcttgggccatagccgtcatttcattgtctcgtctctcttcctccgtagccgccgcctcttctccaccaccttcctctccattttcctctccctccttcttcttctcttcttccttttcctctccggtctctggtggtttttcattgccttcaccgctctcctccttcttttcttcctgcgcggccgcgggggcttcaggttccgggtcaggttggggtacgattcgggcttgctttttggtccgacggtagacgtaatccacaagcttctcagcgtccattgtcccagtcactattacttttcccgtggtgtgctctgtcacagttgtttggacccctaaccaacaatattagttagtcctttaagctcaatattaattactactaaaaaaaaatagaaacttcgcaaaatctaattgtcatcaacaaatttagcttaaacatgcatgtgacgtaatgcataacgagatatatagtaacttcttctttttgacatgatatataatgaattcttaggtgacatctataccaaatgatatattattttaatatggatgcgtatgtttaattaaaaacggtgggaaatatatattattatttttatttaacgattattgcgattcatgcagaacaacaaattataaaacaaaataccgttttcaatacaaccaaaaacttttaaccatccttaaaattatgtacattgaaaaagagtattttggttttgactagatccacaaatatatatatatatatatatatatgcatgtacctctcattttgagaatcttcttcttgagctggtcagcacaagcttggcagtgcatgttaacgctgagctcgacggtggtgaggccgccggagacctgagaggttatgattggtggcagaggctctccctcagctgccggaagcggcgagaggactttggccattcttttagtcttcttcttgattttgttgcacactgcttgcggatccaacactccctttatcgtcacttggttctcattcatatccatcaccacttcttccacacctagacatttttaatatgttaaaaaaaagaattaaaatttcccttttgagctttataaaataatattaggtagttgggattttgagaatgaagctaatggtttttatatattagaaagagaatttgttttgttgattaaaagtgttgaacaattattcttagcagaatctaatcctccatccattcatatattcttttacctctaatttttagaatagatctttcaatcttcttagcgcatccaacacaatgcaagtcgacgtagagtatgaagggtggaggcggtggtggtggttgcggctcctcttcctcctttggtttctcctcctcagccgccactttcttctcctccgctacatctttcttcttctcctcctcctcagcggggacggcctgtggagcagaggctgcctcctttgcctcctaataatgaaaagttgaaaacatcaatcaccaattagttacaaaataggtacttaatttgttgtggtttaaaagtattgaaggaactttagatcttactggttttacttcttctcccatgttttagaatctgtggttataagacgattatgaatgaaacgaagaagaaatatatgttatggagggaatgagtagagagagcgagtatttatatgaaacactagtatattaaaaaacgaaggagaattagaattattgatgaataattaaagttatagtataaggtaggagctaaacagaacataaagcataagaggttgattccatagcacatggcagaaactaatcatccaacatatatagacacacaccccttcacccccttgtaccttatatttagatttattctcaccactaattatgttttgtaattattttacaaacaaccttttcgattttctttcttttgcaatttactattttttgaagagggcccggaacaagatggtccgaggtcggtaggttttataggcatagaatgtgggtgtgctttgatcatgtaccttgaatgattgtataatgggcatcgtattagttatgtccggatgttgttcgttttgttgagtcagtttttttcagttaggcttccaaaatatgaaatttaatcttgttaattttagttgtaagatatgtgatcttttactgtattcaaaatctacaagtttttgcatgataatttagtttttcacacctcaacatgagaaatcaaattctaagtttgatataaaaaccacatatgtattacaatattctaagaaaacaatttattacttgcaaattcctaccacttagcttgttccttttcttttcatgttatgtggattactcccttctgatatgtatattttttttttcatgggagaaacgtatattcatgataacgcggaaaactatgtataaataaaaggaacgtaccatgagaaaataatttttggcatcgaaaaggacaatactttgcatcatactcaccgactttattggttacatttatattgttcctccttaattttctatagtaatttaatctttcctattcttaattttaatataacttctaacccaatgttagttcgagaaaaagatgataagatgacgtgtcatcatctctacccaacattatgttgtcagctaaataatttatttactaagaaaatacttatcatttacaatacgaagaggttttatttttatgttttataagtaatacattacaaagttaaaagctaaatttcacacacaaactattttgtttgtagtgtgtaatgtaatcgaaaaaaaaaaaatagttcagaaagtatactatttatttctcattgcaagtaatttctatagttcgaagtggttagaaaagacaaatcaaactatagttgcatacattgtatgaaaccattagattagtttctctttgttcgttaaagcggatttggtagatttgatttatctccttttagcagaggcatcaaaatcctttaaccacaagtttcggttacttgtattctcgatactaagaacaatctaatcagtagaaaactcactaaacaatgtgttctatattttcataaaaatagaaaaatagtattcacatttcttcaaaagcaatttttggggatagatgcaacatggggtgcccaataaaatgaaaactattaaaaatatatttgggtagattaaagtgtttgtaaaaaccccttggcatggtggaaaaagtagaaatcacgtgggatgctttagattaaatttggacaaatgagagaataatttcattttgtttggcagtcaagacttaagacaactcttgtagaccagtagatgtttgttactcgattatgcgactaatgttagtttacgtgattatgtgaagttaatgaataaattaggggcgttttatagacaacacgtatatcatatatttctggttgatatcaccatcaatgtgtgttcttatccgtcgtgccctatttgatatatcgcaactcagacattatgacatattacaactatcatataaagtataaaacaaataagctcgatagttggaagaactatttagaaattaaagtgaacctttagaggcatttacggttcgccactaagacaaaattagctataagaaaatgatagatgaaagtgttcagagaattcactcagattcttaatgtacgtagttgaccggtttataatccatgtttggtaactttctagttaactatatcttttttacttttataattttgttttgtttttggaattataatcctttttatagtctttgtgaagtaatctaattttattttaaaaacttataacagaaaaagaggtaaaaaggtcgggtccatgtttacatgtgcccaaacacctggagctgactcagcttacacaatatgctgaatgtatacatttttgtgcgtatctatgagtccatcttttatccaaatatgatttaacaaaaaagtacatttatttccatatttcttggtgagtttggcaataatttttaataagtcttaaagagttacaaaattttaaatttagtatatccactgtattgcttataagaatgaaagtattcgtaaataacaaaaatctcatttttactatgtaattgtttggagtggattaggtaatgaaattgaagaatttttcaggcaaatgattttttttttgttacagaggtaaatgatatttttagtgtttgttataaaaatattaaaacggtacaatagaaatgtatttttttcataataacctgcaacgaaattttttttaatgtaaaatgttgaatatccgtttcgaacgaataaaagtaacatataaaacaatttttcatacacaacagctgaaaaatgaatcacttgtattttaccttgtgtccatctctaaattagtttatactttctatattatgctacaaactaaaattggtctccatcgtttggtaaaactgatgatattatcactttacttgtagtaaaaaattcctctaaaactgcgaatttggacttaactttttggtatacctgctataaaatgaactttaagtaataataattgacatgtaatttgtatccgatcgttttcacagtttgagtctcaatgtataatttacttttgacgcgcactatctttatgggtttcaactattgttttatccaaatggacctgaaaaaatctcaatgttgagacttgagtggtttgtataactcaaaactcagcagatgttatcgcagatcaaaaatcaagacaataaataacctctggttttttataggttaattttacgtactaatggtttttgcatttgttaaataaaattgatttatggaagatttttcagatcgttctggaattaacatgaagttccttttataccaaccggcaatatgcgactttaatctgattcaaaagtatatccaaaaagtcaaaaatacaaaaagccatattgactaaaccatataaaaaaataactctatgccacaaccgaattagtttctctgctaaaataagtttatagactctcttttcttgtcatccgtttttaataaaacttaaaagaaatttatagacttttgttttatgtaatgtgccatgttaatgatcaagcatcgagtcattcatatccactattgtatatttacgctttaaaagtgtgcatcaccttctttggtcattataaatttataatcgaaatattaaattgattaaagaacatgatacgtgaattctaaaaatagttgagataaagttagttggtgttcggtgcatcgcatgtggagacatgagtccaactgcaatggcgttaagattcgaatgcacatattttatgcatttacgatgtttttatatattggaaagaattgtattttcttttcttactcacacataattttgagttttattcaaagtatgatacaacattgatatatactacttatatcagctaacacatttaaaaagtctaataattgttttggtacttacgtattttgggttttattccaaagcaacacgacagtaatattgatacaaactgcttcctatgtcttattgtaagtgttgtttaattttttttacagatatcaagaaaacaactaaattttgaaattttattcttggtccatacaattaagtagtaaggatacaattattcttgtagaagccggatttgccagaagaggaccggccatctttgctaacaaagccaaaaagatgtcgggcaaaagcccaaaacttgggacggcagtttaccagaataatccggtcggcagaattcaacagttcctctctctaaaagatatgaaggagagaaaagagaggtgatcatattatttgaactattcaaatatgcattcttttgtccaaaaattttgtaatatattactgggcatacttaatgccataaaatacccaaatgacatgtttaacagtccataccctcaatcaaaccgtcctatcatactaaacatgtttaatgatatacgaaataaacacacctctaataaatatctctacccggtcggttcgtactaacatgtttgacaccgttttcattacggtgctaccattcgaactcgtagtttgtttctgattgtacaaggctactaaaaatgtcaaaaacgcaatctcaagacacatgtggtcaggaataaaaaaatttccaaacattaccatctgaatattatgagtcgtcgtacatgttaactacaagtctactacactcctaaaccgaccatggttaagcttaagccgacaaaaacaacaacaataacaacagatgcagaaccaggccaaaacccctgttatacacacaaatccgcgctctctccacccgtaaaaaccactttctttattcttactatatgaattgatcggaacaaacatcacattcagcggatttatgcgactagactgcagaccgacatcacacacacaaccgctaccacaccgactctgaaaagccctctgtatgaacatcccatggctgcaattttcttgaatatgaaactagtcctgctctttgatcttgtgaaatttccacatcctttcgtcatagtttccgttgttgtgtccttaacctatatacattttatcgcataaatataaggatcataaattgtaatacatgagaaggtatgaaaacaaacttcttctcacctctttcttgataaattgaagttgtgtactgtcagtttctgacttgtggctgttaaggttaacctgaagacgcagccttcttgaggcatcgccctgcattacaaactgctcagcacaacccggggcttgtgctcgtcgagctctaatcttaattcctctcttagattcatcattgatcttgttgcatgagctaagattctgtggctcatatgggatctgttctggctcatagggaatgtcaagaaaagaatccaagaacttggacatatattcatccgcatcatttgtaccgtactgagtctgaatgtaatcctcattgtggtttttgaacaattcactagactcagattgtaagccattgaaagaggaaccgagctcagattgcacctgagagtgcaacggagagaacagcttcggggaatcaaactccataaacgagagccaatcgatatcgtcaagctgttgagtaaaatgaagtttgtaagtttacaaagcggttgtaccgcctcctgtaatgaaaagaatgtattttgttcatccttaccccggtggttgtaacctcagggacagagtatccactacgacattcgctggggattacaagagaagactctgcgacgtcacaaggattagtctcttctgttttagggaaaacaggagatacctcagacatttcaacctcgtccacaacagttggagacgataccgctggttcaacttcacatgactttgactcttctggttcagcagctccgttcacaatatcttgcttcttaaacaacttacaaacaacaaacggattctgcaaccaaaaacaatcaaacaaacacaatcagaaacacaaaagacctacacacacaagttaatgccatcatttgccaagttggtttttacctggccagactttgttccatcaagatccttctcagtagcacgatactcatgcataatccaacaagttcgtgtccctttaggagcacgacctgtataaaacactagagtcctcttaacacctataatcttagtctttcctgatttgatcttacggtcttttcccgtcgccttccagtatccagccacagtagctctattcattcgacttccactcggatatttccggtccaaaggacaaaagaagagccactctgagtctgttgtcttcaccacagaaaaatctacaccacaaatactaaagtataaatctttactcaaattcactaagtccactacctaagctaagaagttattgatcatattgttccaaattcaaacatgcataaaccggaattgaagcctgggaattgctaaaccgagactaaagagctaaagatgaatcaacgaattgatttgatgaagaaaggaattaccaggcaaatcccaaggctcccatttgcagatatcgatctcacgaattactctaacgtcgttatcgtgaccgttgatcttgagccggagatagtaccggactaactcttcgtccgttggactaaatctgaacccaaccggtagtgaagcgagcgatagtacttccatgtcttctttcatagttgcgtgagactttgagaattcgagaggaaaagaaaaaatcacaaattcgacttcaaggtgatatctaaaatgaatttggatcaaagatgcgattcaaaggtatatagaagaaaactaagaaaaaaccagattccagaatttgatgaagtacgaaaagaaaaaaccctaaaatttgacacgatttggtaaagtggagaagaaggagatgtgacacgatttggtcagacaagagagatatcaaagacaaagagatgaaaaagtggcgcgtggataggcgtaccactgtttcccagaaagtcataaaacacaaaaccacgttcgttacgcgtaaaaggcaaaacagaatgtaaatacctattttacccctgaagtattgcagtaaaatagttacggaaataggggttatatgagtcaaaaggtgaggatgtctgaacgagagatgtcacctagcgaatcatatattgacacgttgatgctataaaggaagcttcgtgatagttgtacggaagttaaagaagaattaaataaacttaattggtatcatattgatttaccaatatgaaacagtttacacaactggccagcccatcttactaatagtgtttgttgttaaagcccaatagatgagaacccaattcaaccatttttttttcttggtcgtgtgaagtctgaatcaatttatttaaaccaaataatgtaaatcaaataggtttaaactttaaaacgtttgatatcgaagtccgttggtactcaaaactaaacctcaaaaacagagaagaaagtagcgagcgaaaaggaagatcttatttatctaaacttaacgttcggccgtttacaagatatgtttacagccaagcctcgttttaagagatacaacaagaataaaactacacaagtcaattgtcgagcttatgtctttgaatccgaatgagaatgttcttgtactattctcgtccgacttcaggtgtccttttctggcattcctctgtcaatatttatagtacttcaatgaaagtacacagtaccattttctgagcgatatgaaacttctatggcggctgatcctttccagaaaatgggcctcatctcgcaatgggctgcggctttctcaggggggctggtcttcatcattcttaactgaggttttcaatgactctttgtttgggcctccgaatgttaaatggggcgaagcccatatccaacaaagtttatctaagtcattgctttttgttttgtttttgggtttagacctctgcgtttctagtttgaggatagtctcttatagtgtttgattagttggaatgtaatcttttacaaccataattgtttttgtgaagaccaaattgttgtgaattagttttagaaaaaaaaaaaatcttgtgaccgtaaatcttatatttctacaacctaaaaccatatgttgttataagttctataagttatatttttaatttaatctctcttttattttaattttatttcctcatgatcattttttatgtgttgcttatataatgtacactaggcactagatggatatatactaatagtataaataccatgtatagttttgtttgttaatgtatacttatgtataaattttgaacaacatttgaacaaaaaatttatatgtatatattcttttcaactaatatgtagttattatccgactaacatataaactattttacatgtttatatagattccatttaacctatatgtgcatcacaaaatttgtgttgttgtttattatatagtttggttaactataatattttataaaatatttactaatcatattttaagatacgactaataaatttacttctaagactttatatccctaatatctacacgtataacaataaaatacacggttgcattttacacgctgacggtcaaaattttacagcgaataatttacggtgacatgccaaccaatcacttagttactaaagacgtttactttctatctcaaagttcagtttctggaaatattttattttccgttgtttaaaatcataaatgtatgtagcttttaaaatagtttttggctttcgaattttagtttgtaatttttttttttggtgtaaatgttagttgtttgaaaaatttgaatggtaattagatgtggattttagtttagttttaatttatttgaaaaacaaagaaaaaatattaaaacttgaatatgtggaaatctctctttttatttttattttatttagaaaattatgtatttcctcatgatcctacttagtggctatgttctatctgatcaaaatttaagaagtcaccaaaactacaagttgttaaattactaaatatctcatgatgatccgaccctacccaattgctcttttcattttattattttgttacactaccaatattaaacatatcgaatcaagattgtgcgaaacacaaattgtcccacggtatatcgtgggttaaatcctatatcaacgttagttaaaaaaatatagaaaaccacccactatatatatagtgttttaaaaaaagattaaaaataaaagctccaaaaataaatacatatttagttttactattatggattcttaacatttgtcctaactacaaaagggttaaagagatctcaaacaattaatgtggttgacagaaaaaataagaaaaatgttacctccgaataccatatattataaacggggaaagaaaaagctatagaagtagaatttatgaacatttttgatccaagtccatatttgtaatttgttctaaattcttcgtaacttttaaagtaaagggttgaaaataaacatggaatatatatgatccatatataccatatgcatatgcaaaattaccaaaaaaatatatatatctttgacatcagtaaaattgacaattttacggttaaatgacaacaaatttcttcacttggttacagagtgacactttgacacggttcaactaccattgaacctgaatcaatacaacttacaagatttgtatgttccattgaacaaaactctcttcaatatatctgaacccctaaccattatcaaattaaaaaaaaactactaaacattctgagctaagcttctaatctcgggctcctccgcgtctgcggctccaacgctacatttcatcgagtcaaacgttaaatcaaggaagtacaacgaacaaacaagaacgcaacaagttatgaacattgggatgggaccaaagatccataggaataaaggcgaggagaagtagaacgctcgtagtcctaacgaccagaagtaactcccacggttaaccgttgcagccacataatcttggtttatcataagactaccattaccacgaccacctgaagaaacagccatgagctgtttaaaggggacattgataaggatgcttgcatggctgtaataacgaattgattggacattgaggagaaacgcgactaggaaacacacgaggattgcgaagaacttgagcgagaaggctcggtcgcttttgtctccaaacacaaaccagactgatcgctctcctgtagcgctagtcattagtaccgcgattagtgaacataacattattgcggttgatgctaatagagttgatgccattatgttgttccttagcgtttgaaccgctaaaacgccgtttttggatgagtcctgtttacaatagttgttaacggaacataagttagtacaagaaatctcaaatccaacaaaaagtgaaaaaaattggtggaggaaataatgtaattataaacatttttttcaaaaaaaagtttcccaaaaatgcaaagcatcttttgagtgttgttagctttcacacttgcggattcatttagtaaggaaatgttcaaaatcttgcattaacgtaaagaactttaacataattatgttcacatagaaaagaaaaaatctgagcaaaagaagaaagaaaaacaacttgatactgtttcaactttcaatattagtatcaatttatgaggtgcatgcatgatgattatacttagaattatactcatatttatatataaaccatatactaaactttatatatgcacatagtgagatagaatctcaacctcacatcctccaatccaatacaaaaggacctgaaactgttgtcagtattttctttcccaggaaaatctctacacatgcatacacttatcatttatcacttcttattcaattaattcatctttatcgttatgtgtaaatcaacactataagcaatttatataaacaagattctccttagttatcatctccaacaaccctcaaaatataaaaccaaatgagctaaaataattttgcattttccaggaaaaaaatgatcatataactcatgtaaaattaagtagagagatcaatcatatatatttgactagaaaaaacaaatctacatatgcatttttataaccaaaagcaaataaatatgattaaaaaatagtaaaaagatagacctccatcatggcttggacccaaaggcggcgattgaaggcgttaaggccaacaacagtcgaagaaggacggtggatgatacggtagagaagccatagatgataaaagaccatcaaagcaagccctaaaggcacaagtgtataatctaaatactcacgcttcatcttcttagatcaaagattgatcacaaaaaaaatctagaaaaaaattgaaggagattgagagaatcaaagtagagtacgggtcttacgtggaccttcccgtatctaatgctatatttttctctcaatttttgttttgagctttccggattcttaggcgtttcctttcactctatacctctatttatagatttgagtctttatgtataaacgtgtgtgtgtgtgcgttattaaatatgtgtacaaatctccaacttgtaaaggaagaaccctatagctgttaagtttggaccagccgttgccatttggcattcggatttaccaatgtttttgttaccaaacatatactatatttaaaagtaatcgactaattgatatatatttgacatctagttgaattttttgaaagaactcctaaaatcctaaaatccttcatcattttaagttttcactcttattattggatgcaaaaatctagtgttacaatttacaaataattgctgtaaccacaaatactaaaagtcagtagcaattcatgggatttccgaagcaatgttaaactataaggactagaaaaatcatacattttattaattttacaaaaaaaaaaacaaatcagaatttattaaaatggtgaaacatttcgaacccaatttggttttcttggatcttccatatttaacatatatatatgaaatagaggtattctaaaacatagaattgattttttatattaattcaaaattaccacaaaatatttaaaacatcttcaaaacttttattgataagtcctaaatcatttgtaggaattttagaaaataatatatgaaaatatgaattttataggtttactctatatatagattattcaaaatacaaaaagtaaacaatactattaaattaactagtttcgtatccacaacctttaatttatttatgttaaccatttgtaaatctaaaggtccattaattagtgaattaagaaaaagaaaaaaaaagcatgcaaaagatgtatttaattttgtttgtcaacaactcacactctaaaagtttttttcttcaacaactcacaacacaaagcatgcgaaaagtttctttcactattttcaaaaaatgcaaaagatatagtatctattaatactatgacataatcaaataataaacaaattttaaattaaaaattttcattgcaaaagatatatattttataataataaaaaatactctatcttgaaaaacgaggatacggaaaacatttgtttggcaagtttatatcaaaataaataaattacagcctttcattacaaaagatatattttctaataacaaacattctataataataaaaataaaaatttgataaactttacaatagatttaaaatagctaagtttgcaacaaaataaaaataaaaatgaatgtggcgtttaattgaaaaagaccaaaaaaggagaaaaatgtgaggaaagtggaaaacttttgagaacatgcacggcccactagaggcccacctactttctatgacgtctctctcttcatttcacagctgatttggcatcggtatattcctcgaggattccccaccataacaatgttgccatttttataattattattagaacaacaataacaactcacttacataagttttcgaaaaagacagtaaattatggtgatcaaaagttgctcaaggcattaagaaaatgtatgattctgaaaattgtttgttctaaatcacataaagtctgtttgttctaaatcacataaagttttgggcttttagcaattactatatatataacccggacgttaaaagaagacccggacgttaaaagaagagtaaacttgtttcttctttgacttggaggaaatattcttttaagaatttaatttatttgtgtacgtttttctttttgttaaatttttatttgtgtacgttgtggtaccacttggtagaaagtagagccgtatatgtaatatgtgtcacttgcatgttcatcaaatttcaacaactactatcaccaagtcttaaagagtaatcctatgggaggctcgaggagctaagaaaaatgcttattaagatttgagattagcatttaattgggagcgtgtgacatgttaccgttaccattaataaaagactttcgttgacttgttatgaaggaaatttaatcagtccgtgttattttcaactattattggatcggtcttgaagttagcatccatacctctcttcacgtgggtttatctattaggtttacacgtggtttatacatacatgactctttgtagatacattatttagggtctgattggataacattagagtaattgagagtacagtaattgggaaaagatgtatcaggaggaaaagaaaagtgataattagagtaaaagagagtaaaaatatataatagattttttaaagtaattggtagttaataagaattgggagttattagaaagattgattaaaaatatatttttgtaatcaaattgtaaactatattaaataaaagtaaatagcttacattaacaaaatttaaaatatgttccattataataaatataattttaagttatagtctactaacgacgttgaagtttacgtttgtttatagacgataattattatgcaatatgatcacatactatacgcatatatattcctgactctaatatatattcgtttttgttctcagtttgacttgatgtctattttgagaagagtttcttgcatgtttaactagtagtctgttgctttgaaaagatgagaagatttttctggtccgaactttttcactttcattgatttatgagttcaagttagagatatcctctttccttatttctctgaactaactatgcgttttattacaggtatttttggacctgtttttgagttggattataatgaagagactacaacttatataacctttatccatgttaagattagaattatgatcacatatcgtcttatattttttcgaagagttcaatttaaatccatggaatgagctatgctaggatttgggaatgaaaggcttcagagaatttgtaccaattgttgccttataaatcatcatgccaataattgtccccttttagttgctcatgtggttcaagatgatgaaaaagatgttctagttgtgggcctgtttggaaagaaggtattggatcaaacaatcttactcatcaaactcttgtaaataattctgaatcgacatctcctcatactcaccaatatcctagcctcctcctcctacttcaccacctttacatgacaatgagtttaatgggggtcttcaccctccgaggtttcctgcttcaagttccacatctatgcattccttttcattctcttcttctggtcgaagattttatggtaaaacacgttatgacataaatgaaagctctaaacgtaagaaagagaaacaaatttattcacatctatgcaagcatttatgcatccaacatataaattcaagttggatgcgataagatcagctgcaatcttttaagtttcagttgttggtctcattgagatttgttatgattttgctatttatcaagttaccaatttacagctgttctttaatgttagaatgtcttgtatttacttatctttgttagtttatatatgttattgtaatttgtatttgtctctccaccttgaattctctaatgatagatgacgttgtttggatattatatatatcaaaggtttactaggtaaaatgaaaacgattttataaatttaggttatctatcaaaacgattataaaaatttctttattaaaataacatgtgttctaaaaactattcacatgttaagtctttttacttactgtattgggatttctaaattctgaaaattgaagaattatttgactttttttttttgtgtgtttgaaatcagttgacaaaatcacaaaaacatgataaagtgcaataggacatgatcctcccgattcaaggtcctaattttgtagaattgcaagtgggctttaaaaaagcccaagtcagataaacattgaccacaataaagtcaaaactttgttagacgttaacagagtgaaaaatgatgtgaaggagcaaagaagacgggtagagaagttaggtaggccaaagtcatcgcactcttcttaccgtttctccttttctttcgttttcatattcttttttctctatgaattaactaatattaattttacggcaccacttaatttttctatgaattaattagtcttaatttagcaaaaaattaccgtttattcacttcatttaacatggttctctcactatcataaatcataaaaataattactattttaaccatcgcatagagtcaaataggtaattataaaatgataggaaaaaaataggtgaaatttgggtggggatttttttgtatcttttaatttttgattccgcgcgggtttggtttaaaatattaccaaggaataactgacacgtgatatattatctctctaactctcgataagacaaaacaaaaacgaaataagtagacgaattcaaaatttaattaagtgcatacaatacatgtcctcaaaaaatgaattaacaatgaatataaaagagaaaaaaaatcactggtgggacccgtttagtgggaccgttaattaacggagttaggatcatattatccgttagaagacagtgttagttctctctctctaatctataaatatcttcttcatcttcttcttcccccactctgctcttcttcctcttgttgctatcgtctctctctctcgggtcaaaattagggtttcgtttcactatccaggtatgtctctctctctctctctctctctctctctctctctctctctctctctctctctctctctctctctctatcttacctttcttctctgtgtaatttgcttctgaaatttctaatttcgtggagaatcttcttcatcttaccatcggatctggtagctctcacttcgattcatttcaaatttggatttcaaatttcgttcttagagatgtataatcgtggaatttgtaatctatagcttaattacgttcaagtagattcgagatttgatgtgattttgaagaattgattagctgaaaatgtggagtgatctacgttgtctgtgatgatgatattgatggttttcttcttcttcggctttcttcggttctgcagagtgtatacaaaggttgttgtggagcttttatcagatcacaggaataagatggaggtatttggaaaatctcccatggttgttacatctgccaatgttatttacttgtctgcaattctgggtcgcgattgcgatggacacaaatgtgattggaaatgtgagaatgaaaatgtttgtgggaatatgtatcgctgcaaactaactggactaactcatgtctgcgacaagaactgtaaccagcggattctctatgataaccatagctctttgtgccgagccagtgggaggattttccctctctcgtccgtcgaggagcaggcggttaaaggtgttcggaggaagcttgacgccgctgagagtcatccttctgagagctgttcgtttaagcgtcgtcgtcgtgatgctcagttccatgcttctcctttcgagaggtcttttactgctgtgagccctatctgcagcccggctggagacggaatggagttggtttagattccatgttgatctccgcaaatcctgagactgagaggcctctttatcttacgtagaataacttcccttttctctttcttttggacaactatggatatgagacattgtgctattgctctcgcagggaggtctaggcatatcctccctgccttaaagagagcttttatcttagtaatgttgaactttatgtagtacttatgtaggagagactttataattctaatgctttattctggatcttactgctgtcgtatttaggtgatgtttgatatctcttcttgtccacctttagttttttcttgtgattggacacgatatttaggcaggcttttattcagctatgtatcttgttttggctactattacgcagagcctgacacaccatggttgatttctgtaagtgtggtgctacagggttttacacattgctaaccaattcccttgatcctttctgatcgaaacctaattctaacaaattatgtgtttatttccagctttccatttccttgattgatgagtatttggggttctgaaattgttttctgtttgtgcaggtttcaaatgttgcaattcaggagagtttaattgtgtttcttttatgtgtactgatttgtctgtttgaattttctttatcaaaggagtaaatctaactgatggaagtttaaaccttactttgtaggtcctcttgtgtttgtgctcagcaggaaacaacaatcatggtgtgattcattgtcattggcaacataagctgttactccttaactgtgagaagaaggcgggcattgaataggtatgaactacccaaagaggatgcggttggccaactgtgttcaaaactatcaacgaaacatggtaattatgtgtattgatgatcaaagaattgttaccgttagttacccttcgtttttcatttacctgtgggctctgcttctgtaccaatacctggctatatctgaggttctgatatttttccaatatctatgaccaggtacaatctctttaagtttctgatgaagacaacttccatgagtcccatctaaatcgcagtcttggtaagtcatagcgtacttacaaccttcttgttcctaactgcttgttatagtcctaggctacagccttacaacatcccctactctgaagtatatttacaatggtgaactaaattaactcaacaataaaaaaaactattaatcgtcatatagaaaataatctccaggtttgcttcataagtagaactgagaatggaaatgttgcttcaagttgttgtttttcagcgtggatttaatgcaatagtttagctgacagaaaggtgaatgtctaggcattcgatggtttcctgggatcgttgaagattctcttctgaagaagttggcaaagtatcaaatgttgactctgccgctacgataagataacggtacgggaatatttctccctaatagctaacgaaaataacaatcactattttactttttgttgattttttctaatttctactatacaaatttgattaccaggaaaatattttatttttattttttatcatttgtttttttttttaccaaagatatatttggttactttattcaactcaattgtcaaggaacctggatctagtgtaaattctcttacatgagacatcacttcattagttctataataatataataaaccgatgaaaagatggggaagtaaggcaaagaattgccttgtcggagaggccagtgtccttagagtaatgctaaaccctaacatattgtcttggggcttgaagctctctaaagcaacttcaccgcttaaacattgcatccttctctccctctacattttatttgttataaaccctggtccatggacttcccagcaaatccatatttcagaaatcttaaacgtttatacgataatgggaagatcaccaatggttcctatggctgttcttgtttatgtttctctactgttctctgtttcttattcctccacgttcgtcatcacaaataactgtccctttactatatggcctggaactcttgcaggctctggcacccagccactacccaccacagggttcaggcttgatgtgggacagtctgttagaattcccacggctctaggctggtcaggtcgtatttgggctaggactggctgcaactttgatgctaacggcgcgggaaaatgtatgactggagactgcggcggaaagctggagtgtgctggtaatggcgctgctccgccgacatctcttttcgagatcacactcggtcacggttctgatgacaaagatttctatgatgtcagtctcgttgatgggtataaccttcccatagttgctctcccgacgggtggtggactggttggcgcttgtaatgctacaggatgtgttgctgatatcaatattagctgtccaaaggagcttcaagtgatgggagaggaagaggctgaaagaggaggggttgttgcatgcaagagcgcttgtgaggcctttgggttggaccagtactgttgcagcggtcagtttgctaacccgaccacatgccgaccgtctttatactcttccatcttcaagagagcttgtcccagagcttatagctatgccttcgatgatggaaccagtactttcacctgcaaggcttctgaatatgcaattatcttctgccctggcaggtatatatgatatgccctttctcattttaatttgttacaatgctctctgcaacctttcaaaaactgtctgcatattctgattgattatctttccccgtattgaatccagggtaaaaagaccagacagtctgaactcggatcctcccagcccacctcagaatcagttagggcaacctatggctcccccaactcaaaatcagtatggtcaacctatggctcctgcacctcagtatcagtacggtcaacctatggctccaccgactcaaaatcagtatggtcaacctctggctcctccgactcaaaatcaatacgatcaacctctggctcctccgactcaaaatcaatatggtcaacctatggctccaccaactccgcccccacccggaccaaacgaggattcaatgactcccccacctcagaatcagaatggggatgggcagttcatgcctcctcccactttggaccaagatccaaacgaccagtatatgaatcccccaattcaggatcagagtcaaagagagactcaatcttcatccgatcttcttcgaccttaccctgtcttgttgcttcttggctttagtctaactgctttgaggcaatctggcacgacatgaaacataatcattctactttttaattagaaatgctacataactgtgtagaggaatcaaacagaccatgtttaatgtcttctcagagattttttatactccaataatcaatgtccttagatttaccttgaattgtttgaattgacatgtaaaactctatttcatgtatataatgtcgtctcaactgaataaatgaaatgttgcgtttaaggagtgggagatatcaaaatcataactcatttcttggcttttggcttcttaggggcagaatttctagccttctttgctggtggctgcttctctttagatggtcttcctctcttttttcctataacctgcaaatattccacatgtaacaaatattcttttactgtaatggatttacatcgatttcataggaggaaattctaagttttgtcatcgtacagtttcgccttttgctttggctttgggtttggcttttgtgttggtttcttcctctgtgcctacactttgatcagctggctttacagcagtcttggcgtttttgttactttcatcatctgattcgaacgtaaatccttccagagtgcctaaatgggttattgtattagccagagaagtagacatttgcgtaaaatcagtttactatatccagaatagggcttcaagaagactggcaataatgaagtcacttggaacagaaacagagaaaacgagctgaccttccaccattgtttctgcctcgtagacattagattgtggtatcagctgtatgaagtcattcataatagcttcaatctgacaagggaacatataatccaaaaattaggctatccctccaatttatgttttagtttcccaaccaaatgctaaaaagtttagagtgcacatagagtcgcgatctatgagcaatatacaacttaagatggtatctgcatacatatacattgaaacaagaaagcgcaatagaaattaccaaccttagcctctgtctgacctacgttaacctgaaatacaagatcgctggtatgaataattgtaccacaagttcccttacaatccgagaaggtacaagaagaactaaaaacatacaacgcaaaatgttctggatggaatgattgttgatttatatatggttcctgaaacattaagtgaaaaagggttactaaagagactccagtcatggtaaactaattctgtaacctgttacttgtaactgaatcagctctgttacacacaagaggcatagctgattctgctacatgttttgcaaaagagtacgagaactatttttggagtttcaatgggagaaatcgaaaattcaaaagcataaagagttaagccagcaatatatatatatatatatatatatatatatatatatatatatatatttgagtgaacatacctttcaagtccaagtacatgtccccggttgtgtctgaaacaaccacgcgtccaacagcccccatgtctccactcaaatctatcgagtcaccttcacattcaacgagtacctgtaaatatagttcattgtttttgttaaccactgtgctttatcaacaaataaaactctaaaaatagatgcagtttggcctttccagaacataagtgtcaccagcttccataacaatgatatataaacgtagagtgtaaaaccatgtgcaaagaaacatagttgtattacctttgtacgattaaccttctcagaaagtaccaaaggcaatcttgaacttgagccctgcaaatttaaagctgatcattaggaagaaccagagaagaaacaacaatagtggtcctcatacaaaggtccttacagaagaaggcttgatcttctgatccgttgttacttcctcggctataatggtatctgtatctgtatctttatctttatctgcatgatagaggaaccgttgtgttcctttagaaaaatcctaaaaattcacaaacactgatacaattcttaccttcagtttttaaaatttcttgtgcacaattttcttccttgggtgtcttgcgactgctttttgactttgtttttggagatttttccggtgttacttgctcggctatagtggtatctgtatctttatctgcatgatagaggaaccgttacattacttaagaaaaatcctaaattaaaaaaaaaaaaacattgatacaattcttaccttcagtttttaaaatttcctgtgcactatttccttccttgggtgtcttgcgactgctttttgactttgtttttggagatttttcctttcgaactgtcttaactgctggttcttcctctgtagcttcaagaacaaaatccgcatccttttcagttgacacagtcacttcctgctttataggagaggatggctcagaatcagatgagacaagccatacagaatcagctcctccctgctaatgatacatttaaataatgttaacatatcttctcaacactataccaaattaagagttagtagttttacacccctacgatattatattccataaattaaactgatccatgcagacacaaaaccttgaaataaaaaactaagacagataagagtgctggcgatagatcaccaactaatttcatcatatctcatagaagtccaaagctgtcctagagttagtttataactagtataccactatcttgacaatacaatccatttatcaggcagatacattctgacaagaaacacttgaatcacaatatcgacccactaaagcaagtagaggcaacagaaacactaaggagtacgatggagacagtgtccaaaaggttcttacttgagcatccttatgcttgctagagagtttttcacagtcaacgttgtttccattctccttccctgcacacgaatctgcccgagtcaaatacatgcttttaagagctcaacagttgaacaatactcccctaaattcataaattgatattctctccctcgccctccaagaaggaaatgacccataaatgtttgttcctctaatctcaaagcaaaacaacacagaaaatcttccataccttcaaggttgagactagcatctgctttcttctttctagaaaacacctgctcgatactcacttgcttcgtcacaaccttcgtttcggaattcttcctagtcagtaactccacagattctgtctcaagaaccacaatgtcgtcaccgtcatcatcaggcaaaggaagagacgaaatgacttcagattccctataaggactatcatcatctgaagatgatagcgacaacaatgaagtagtcatgggtgcctgcgtaacaaaaccatccactttcaattgttaatttctatatatttcaaacaaatatataaaatagaaacagaaatcagattgaatctggaacctcgtaagagcgaagccaatctggagatccctctctagagctgctgctcataatttcacttcttcagagctcaaaacaacaatctaagcttcttcccagcttcaatatccactcaattacaacaaaatcaggtcgtacattcaggatttacttcgcaatatcaaaaccctaaaaagagatcttaaaagctataaattcgattgaaaatcacatgaaatcgaagctcacatgaagaagaagaagacaaaattgagtgattgacgaatctaatgaggttaaaacccggcgaggagacgtggaaaaggcatctgaattgactgaggcctgagggaagaagcaatgatttcgccggcggagagattgaagtgtgtgaaagacgcgggaagaagattggggcataaactgcttgttcgagtttccaagtgtttggtcacaagagcaatactatccccaacgtcgacgtaaaatttactaaaagcccaatatgttttaatagaaaaattaacataaagcccaaattcgatgtaatgggctttcatctttcaggaaaaattaacattagcccagatatgccaatagagtagagataatgacgagtgacgacataaaaaaaggcacgcaaagaatataatattaatttcttggtggacaagcatgtttgaccattctcattttcttgtgcccaaacttatatttggtatgctcctcctacatatagacaagacaatggtaattcgacaattcatcaagtctcaaatctaaataagtaaacatgaagagtgaaggtcgtcatcaaggcgtcgtaaggacaggaatgattcatccgcggggctttaatcctcgacacaccaaccgactcgattcaccaccagtttttggagattttaccaaaatgcaaccaaagactaccaaccattcaaatatcatcggagaaagtgagcggtccaagtacagtaattgtcatgtgtcgccggctatcaagtcgggccataaatctaagggtcgccgtaagctacaaccgacaagttggtggagtgaggataagctagaccggctcatcgggtcggattcatcctctgctaaggatattttggatatgttatgtagtgaagatcatgatgagtattaataattatcatgatgattaaccatctcgtttaagatgtatgaagattattgttttttattttatatatgtttgaactttcatagaaatgataataattatgggaagaaatgtaattatacttttgtgtcaaaagcaatctaacgattttttttacaaaattgtaaaatgaataacatggtgttggcaacggtaaaaaaacatgtagctattattattatgggccgaataaagtaatgtagtattataatgggcaaatgaggcccaataatacatccggtagaaacacggaaccggcataaatgagggagataaggagaagaagaagcgaaagaataaaagtgtgacaaattaagaagagagaaatggggaaagacggagaaggagacaagaagcgagaaacaatggcggtgatgagcttaatgaaggatcaacagaatccaattcaacagtttcaagtcaaattcaaggagattgagactggtttcaagtcgtggttatcaaaacagaagttaccggtggaagccgccgttgtcacggccatgggtggtgttcagggagcttttatcggtggtttaatgggaactttatctcctgaaatgcctcaggctggtattgaccctcaagctatggcttcgctaaagcaaactcaggtttaatttaaaccctaattttgatttactggttatgtcactttcagccatttattgctattttttgaagtttttgatttttgactgaatttattgtaggctcttgttggtgggcctttggttcaagctcggaactttgctgctataactggtgttaatgctggtattgcttgtgttatgaaacggattagaggcaaggaggatttagaatctgcgtaagttttcatttttgatccttgaatattgtagcttaatcttaaagcatgtattgtgtgtgtgtgtgtgtgtgaattgttgtttcctggttcttacatttcatcaatgatctaggacttaacgaattctagaaactgaattctggagctgtttttagagacaattagtgtctgcaaaactgcaactagtgtttatgtttttgcaattgtcatttttctgatcaacagtaagattttgaatagctgacataagttacaggtcttaatcagattctctgtcacaagattgattccatgacaggaaaaaaagatgacttcgtttgttttttcatcatttattgcttcatagagttacaatctctttctcgaatcagctgttatgatcattctgatacttataatgattcactgttcatgtagggctttatccacttgtgtgtgtttacttttgaaagaatctagatacaatctttgatgcgtgcagattctcagtggcttatttgtagcttgtttgtttgttgaaactcgatgtgtgaaaaagagtcatgtttttcgactgtgtagtgtggtcgcagcattcggatctggagttgcatattctcttgtgagcgcaggattacaaggacagcctatgaatgcaatcaccactgctgctggtttcgctgtttttcaaggagtgtttttcaaggtaagtgatcatatatataaataggagataagactcttcttgaaactaggcaggcatgtcattaaacatctgtttctattttcttcttttcggtcttgttcagttgggtgaaaggttctctaaaccaagtgttgaagatccatattacacccggggaagatctatgttgttgaaactgggtctagagaagtatgagaagaacttcaagaaaggtttattagctgacccaactctgccattgctcactgataggtaactatactgttttgagctccagaggtttcatactctgttccaactaaagttaattgtcttagatcaaaatcttatgcccgctaaattgtgtgtccagcgcgctaagagacgtgagcatcccgcctggaccaaggctactgatacttgatcacatccaaaggttcgaatctaactgctcatcgccctattttgagagacatgaatctgcgaaatgactgaagtgaattgaattgtggtgattatttatacagggaccctgagctaaagggcaagcggggaagtcgtggttgagacttgagagcctctctccttcttctgcagaatctttgttgttgtaagatgttataaggatctcaagcacctattattcttaaatattattggttgatgttgctagcaagaaaaattgaatacaaccttaaaatatggtcgcgatatctaaaagttcacacaaagttttctatatgtacctggaaatagttgaattaatgtatgtataacccaataaaagctcttaatccagcagtaatgtgatcatttaaagccaaactttaaattaccatgttattaattatttaatttaacagaaaccaaaacacatggattttgagtttttaacaaatttgttgatgggtcacccaacatttatgtggttatcaaaattcctatacagctttgcatcatctttcttactcaaactaaaaaatattttccaccgtcgggatttgaacccggaaatggaagaatgttctttaattttaaccattgtaatacaacggatattttgtttagatttgaatttatagtgtatatatacaattatgtaaatattattaatttaaaaaaaaaatccgcagccgggatttgaacccggaaatagaagaatgtcctcaattttaacctttgtgctactacggatcttttgtttagatttgaatttatagtgtatatatataattatgttaagcttttatcataagattttgttacagatttttaggactgaatacaaacttgtaaaatgaattaaagatagatggtcgttagatgaccatcctgaatttccctaaaaaaccgtttacgtttcaccattccaaattttggttgtagtttaggattgtatattttctactttatttatgttaggcatcacatccacatctaaaatcaattgttataaacatatattcttgaaaatgactcaaattgaaggcatgtagatgtgaggtcatatctcacatattggactacttttttatttgcccacgacttagcatatatacaactttctttttttgctaagaatataaatatttcataaaaatgaaaacaatttaagttacaatcgatgattatagacctatagaaatggttccatggcaaaaaaaagtaaaagcatggaagcataaacaataactaaaattcggtccatccactcaaccaaagcagtaaggctaaaggcgttagatgaagcgatgacgattttagttgttctttacgatattgttgctggagaagaagggtttaaagcaaggagaaggagcctaattgcatatatacaactttctatttgggttttacctttcgaatttttttctggtaaagatcacattagctccttataggtcgccgaatcttttgataagaaacaagctt

SEQ ID NO: 739 - DNA, 27263 bp, Arabidopsis thaliana
ccagctcgatgtcaagctccttctttagaaaatttagaattatttcaaaataaaatgcatatattttgttttatttaaacgtcatcaaactctacaaagactgaaaaccaatgttgcatgggcagagaagtcaacgattcaacggaagacgcatggatgaaatggtccctaaataatctaggaacactaaaatctttatttgtaaataaacgatcaaactaatcgttatttcaattactctagattattcaacaaatgggatatgaaaagaagagaaacatattttttttattaattgctttcaaaatataaaaggaatttagttgtcttttaaacaaagtttgagttattactaaccaaaaatcgaatatcttttgctttattttcaacaagatcgattgtttttaaagatttactacgtgatatttggattttgttgaagcgcccgactaatcccaagatgagccagtaacaacaatgatttttttttgtttatatagaaattttccaaggagaaattcaagatttagacaaaaataaaaacctctacatatttggcaatgatataaaccaatttgaggatacatatatgatccaacaatctaagaacctatcctttacacaaatatctattctagggagaggcagagtcggaggagaaacgagagagctggtttgttagaaagatgatgcgagtgtggtaatcacgagcctggtctaaagattcggcttcaagctcggcaagctgagagcaaagatgctcctcagcctcctcagccacctgtgtcctcctccacaactgcaacatctctttcctcatctcctccaccgctttctccatctctccgttcttctgtcgtagctcctctacctccgaagccgccaccatcacatagtttcctccttttcccattttctctctttttattttatggtttttgatgatttctcttttctttgtttttgtgtctctttactttttgttgttgttcttcttcttttggtaattgattgttccttatatagccgtttctgcgactagtctttgggtggtgggtatatgtctagattcattgatatctcttgtttttcgttcttatttatggttagttattttccttcctctagaacattttgtttttttaattatgttccgatatacacgttggatccaataatataacatgtgaattctttttagcaaaactattttgtagatttgggtaggatattcgaaaactttagaccaatccttttaaaggagactatattactaatgaatctattgtaggctttaataatagggaggccataaaatgtacttctttcattttcttttaatatttgattttaaagtttttgcataccgattaacgaattatttttgatcattgtgggttgaagtattaaattgttgcacataatattgtagtatttggtaattttgactcttatgttacgtaataatagtactacagagtaatgaatctccttgtaattcttattttcacatctcattaagctttatgacaaagataacgtaataaatcatatgaaatgtcattgacggtggctcgtgagtggtcgttgtgtttgaaagagaaaaaaagaaagaaagaaaaacttgtagtgtttcggttatacagacgttatataaatcttatattcatgacgttctctattttgtttcactcaagtattttacataaacgtttagcatataatatgttttcaaaaagaaaagctaatagtctaattagtgacacaaatgacaaaccaatatatatttctaagactatataagatatcaataaaagatgacgatatatttacaaaaggtaaaactagtggtaaggtagcaatacgataaataaaaacatgatgataccacccgtctatatactaccattttcttaccgtctcactgaatggttatgtacaagaagtagtacacgtttataccaacgacggtaaaacattatcagtgaaaaaatgcagtttggccatcctaaatttcctaaagagaccgattacgtttcatcattcaaaactttacttgtagttagaaaaatggattattgttttgtttatgttaggtatcacatagatatctagaccaattaatataaaacacatactcatgaaaatgactcaaaggccatatatcatatatgtgatctttttatttgcctaccaattagcaaatccttctctttcgggtttagctttccaattatttcagaaaaagatcacatgaaattagctccaccatccaataggtcgccaaatctctagcctctctgttttttgctaagaaattatgaatgtaaacttgaattgcacataattggttttttgtgcacaacttgcttatataaattaagttggtattacaaaagtacacttaaacacaaaacattttgtcagaaaatccgttttatatggttagaaagaaatacaagataactattatcattctcataattcaaagagatctcctctcggatcatcagtttccaagtctctccaaagacaattctagttatacttcaaaaaaaaaaacattataaatatttgtttgttttaattgcatcacaatttatgaaaaattaaagggttttggttaacaaaaaaaaaagactagacttgtttgcccacgtcaggtcacctggttctgtcagaaactagatttgttcaaaaacaaaccctttgtttatatttgtacatagtacactggcgttggatccgtatattcgtttcccttttttctcccaaaagcaaaccaagttctccaattttactatgtcaaactctagaaagaccaaaaccactgttgcaatgtcaatgattcagtagaattcaaacacttcttcatataatacgcaaaaatctaaaagcaaaatctttatttgtaatttggtcatttcacatataataataggaaacatgaccataattgctttaaattttctttctgttaaagtaatttacacgtcttacaaacaaaattccattttagtcaaaccaaacatcgaatatcatttactttaaattgttttcaagacttttcattcatcattaatcgcaaaaatcaatcggtaacaacatcgatttttttttttgattgaaacttccatatttgttttaaagacaactctacatattggcattgatatgagccgataagaggatacatcaaacaatctaaaaaacctatctttctttaaaagcaaatatctatctaattctacggagaggcagaggcagagtctgaagaaagacgagagagctcgttcatgagaaagatgatacgagagtggtaatcacgagcctggtctaaagattctgcttcaagctcggctagctgtgagcagagacgctcctccgcttcttccgccacctgtgtccgccgccacaactgcaacatctctttcttcatctcctccacagctttctccatctctccgttcttccgtcgtagctcgtccacttcggaagccgccaccgtcacatagtttcctcctttccccatttttaagaacttttaaaggttttctaaagatttctccttttggttattttggtcactttgagtttttttgtgttttgttttggttcttgaacgttccttattaataggcgtctttgagactggggtttgggtgggttttatgtctaggttcaatgtatctatatctcttcttcttctttcttatttctggtgagttattttcttcctctagattctagaacattttctcttttaaattattttcgatatacacgttgggtccaattaatattttggaatattttagtggtaccatataattgttttattggttagagacaaatttgtttttagaggagacacgagataagttataataaaaatttatcaatcaatatagtaaaatgtattggttcagtcataataactcttgtcatttcaataatacatatggcaacggatttaaaatgaaaaatatttgtttaaactgatattttttttttaaaatggagtatttgctttctaagaatgaataaatttctttgtctaattgaataaagtggattaaaacatattttggaccattttactttgatctaattgctatacatataaagtaatgaatatttcatatttactggaccataaatactagtaattcaatctatttatacaagtctaaactgtagctcgtaagtaaaagtaatgaacaattcttacattatagccccaatgagctgtcaatttcatcaaagacaactatatgttaatagatcataataatacatcgtcttaataatggtcctaaactcaggaataagttgtgcaaatatgttttcatatacgcatgtaaagaaaagattgtgactattattgaaataacatgagttatatttatatccaccaactctttatcctcaaagaggatatatatatccgctgtattatgctaacattaccattcttgcacttgaaaaatgactttaattaattgaacattttattaccatgaattgaacaaaatttctgaaaattgcttctgaagcatccaattttcaagattttatatattcattctaaaaacttaattcaataaactcatgtaacaacaaactaatcgttgaatatattttcttctcgagaacgttgactggacactaaaagaatgaaagagtagtactatttgaattttcaatgaaaccccacttatttcaaaggggaacttcttttttttcttttttctttcttttctgttttgctatttcatagaatatagagaaaataattgttttccactatttctcttaattgctaaaaggcatgtagaaatcattttctcacctttatattttccactaatatattccgccaattatagccattaattaacttggagcaaagcctttgtcgatgtaacccacattcccacttctttctcttaactggagtattggacaatatctcccaaagtcaagggctgtcacgattatacagctattcttgtatagttaaagttacggctacgattcatagttcttaaattacttattagctatttctttagtatctttattggtgtgtatggggaaaactaagaagactttggttatgaatggtgtcatgaagcataataaaataatacggtgcggtttgattttactcttggtcatgtttttgtgaatcatatttggacaacacaccaacctcaagaagtagggtgattcaagtataaactgaaaaatcataagcgttaaataccgattaatacaatcatatatatatttcgaaacttcaaaacattagtcaaaatttgataactcatttatccgttactcgcaccaaactaattaagatatctattcagcttttgttctattcgttctacaccatttattctttacaaactacatctgttatgctttatttgtctgttcgttttgttctatacgtcaccttatgatgtgtatcttcgttttcctagcaaaggttggtccaaaaaaattgatggcccgaatcaatattgtttttttctctctttttagctataattcaaaatcttaaacaatattggttataaaattatgtaaagttgtgttaaatatattggaaaacacagagggaccggtcaccaactgttgaaatctttagttggaatatgctctatggatgctgatcagtgaccactatctaattgactaaaaaaataatcatcattcatccaaaatatcctaaatagattttaaaacacccaattacatcagcaactatatatgttacgtgagcaacagcgctatacatgtagaaaataatttccagtttttataacattacaagatcaccataaaaagtacggatgttaaaatgggctaaacatttagagtcggcccaggtccgctaaaataaataaaagcccggtcccgattaaatcaaaggagaaacgtttgggcttaaatatggttttgcagaaaaggtttcgggcttttatagggctggccctattatactacggttctgttcgtttctccatttgacagatccatccaattgatccattcaacatgtccatctagatgattcattcgactcttgttcgttttatttttagtcggttcatttgactggaccatccgaatgagatgttgttcgtttacttatctctatctccatccaaatgatttgcaataatacaaatacctaaaatacccatgctttcatctaattcttaatctaaaatatatttaaaagtaaataaatttcaaataatagttttttatatttataaatttattttacggttttggcgggaaaacgtgattttatgatttgacgggaaaactcgattttacagttttggcggaaaacaaaattttacgtttttggcgggaaaacgtgattttacggttttggcgggaaaacgtgattttacggttttggcgggaaaacgtgatttttgcggttttggcggaaaaacacgattttacggttttggtggaaaaacgtaattttttggttttggcaggaaatcacggttttacgggtttgccgggaaaccgtgattttgcggttttggcgggaaaatagaattttacgatttttgcgaggaaaaaatgattttgcggttttggcgggaaaacgtaattgtacgggttttgctgaaaaacgaattttacggttttagcaaaaaaaatgattttgcggttttagcagaaaatttaattttttattttttaaaaaataattgtaaaataagatttaaatctatttatttattttatctaaaaatacatctaaataatcaattgaaataattagggtatttttgtcatttgttattttagattgaatcatctccatccaaatgatccaatttagttcagtcaaatgagtttcaaaatttagcctaaattttcaaactcatccagatgattcatttggatggatcatctgaatgaaccgtttttggcaccaaacgaacatcaaaactcatctccatcgaaatgatccatcttactgatgaaacgaacatgcctacaaacttttttttttcttctttaacactaaacgacgacgtctcttttttttttctttttttttttctttcttcttcttcttcaatcttctttcttcgatctcttattttttaaactctcttctttgattgtgagaagccataaaaaaaggttcgatatctctctcttaatctttcatctttctcatttttctattctcatagattgatatattctctatctttggaatctgattcataggattggggtttaatggttttcgaagaaatctgggttaaagtgtgttcgtgtgttctctaaatttgattcactaaacgtgggtttcgaaaaattgaattctgtgtagctatgatcttgtggcataaggcaaactgattcctgaagttggaacatcgttctctggttcagtagagaaccgacgaacacccttccccatctccgacgatgttgtttttctgcttaggacacaagtttgttttgttttttttctcttaaactttcatactttcacacactcataagtttacacacattacacatatatataggagatttcttctactcaccatacccactctcttagaccttaaacttagtcactatttaaccttacttctagacattagacttagggatacaagcaaccttacacaaccttaccttagccactaacaaccccaactactctacctcaagtacttagctagaataagctacttctacgaatgggccacaacaaaacatacttcaccactttgggcctacacaacttcatcagcccaataagataaaacataaaacccacttctcttgtcttcttcttcttcttcttcttcttcttcttctcacgtctctctcttacgtcgtcttcttcttctagtttccaatcttcttgttcttcatcattgttgtttccttctcactgatgttcttcttcttctttgcaggatcaatcggagagttcaatctcaacagacgaccataccctcgatacagtagctgctccgctcatcaacgtccatttcgccgcctttagccgtcaacgttctctggttctgttgccgtacaaaattcttaaaggtcgcgtttttatgtaagcgtagggtttagttgtcgtcccgctctttttaattagactttgttaatttaattaggttaattagataagacctaaaacggcgacgtgtaagctgtcgtcttcttgacctttttggtgaactcctccttcctctctatcggctatcgctcgctgcgtctctgtgtcttgttgcttggagcaagctctccagcgtgagttaatctaatctctgtaatgattaattaccttcttttacggtttctggaattgcatctgtgtgtgagcacttggtttgaaatatgatttaactagtgaattcgataatgctgttcaataagaatgcttagaaaagccttaactgggttttactcaccactcttcttattgaatctagaaattgaaagtgtgaatttttgcgagttctcttattcaaacttcactgcgaaaggtggagtttttcgtctctgttttctccctaattcttatagtttgagctaatggtgttaatcaggctcaagaatagataaaataaaattatggattcagatgcatgggaaattatccatatacctgaaaagccttcattgtcacctgaccatcagcccactggtatgattcaatctctaagtttggttttttagtctatcaaaggttctttatctaaacttcttcttctgtgtgtgtgtgtgtgttgttcttgttgttcacagtgaaggtatatgctagcctaatcaaacccagatttgccaatacgatagtgaggtttgtcattcttgtttcgactcttgactcgttgattccagtgctgtaatctcatgagtgaatttttttactttgctatgataggcatttatgtaagattgctcctctagaagatcttcgtcatgttaaaagggtgaagaagaagattctgccagattgcggtatcccattgttagttttcttagcgcgctgatacaccaatcataagattatgaggtttttattgtaagcttattggacaggtgaaactcagttgactgtcatcttatgtctagcacctgagcacaacgatcagttgagtgacatgccacctgatgtgcagagactcgttgatccctatgagttgagtccttttattacacaagtaggttatttttctcttatctcaccactatttgcttcaagggtttttgattcatttagcttccaagtcagagatttctttctgctcattcatttatattttcagtgcaatctcatatttctgctataactatgataggtatgcaaatatgctgcggtatccaaagaagagtgggaagaacaaagtaagatatggcctacttcatttcatccaccaacctagtaagctccatgtctagaatcagttttgtgaccaaaagagtctttattatctttctggtctttttattatatatgctttagtcgttctagaataatcttatttcttgatggtttctattggtgctcttatctgcattgtaatagcaatatatgtctttgtttatagtgcaacagtcaatgattttttactttttgcatttggcaatgatagcaatatagatggcatcggtgggttcagcgaggaggaaacacaatcaatctgcaagttcatgagagttgttattgatatggcagtatctggtcatacaccagtaagtattttccattgatctacataacgtcgatatcaagttttagacaacagaccattcatttttcatgtaccatttgctttttttagcgcctcaatccttgttctcttggtagaaagatttaccatcgtttcattacatagaaaatgatctcaatttaccacatttctaatgtacttttcagcttgtgaatgctgcagtgatagttgatccttcagttaggcgaataatagctagtgaaactgatcaagtatatgcatcatctgctcctcgtgacatgactagcgcagagaccaggcccttcgaggaaacaggggaaatatgtttaaatgacacacttgaaaaacagaatggttcattgtctgctctttcttgtctgaatccctggcaatggagtttgcagccgcatgacactgaaaattgtagccagtggcatcctcttaggcatgcttccatggttgccattgaatcctcttctgccagagatagaaatctgtttcccaatccatccaagatttttgatcaggatcatgttccgccctcaaatacagattctccggctaaaaagcagaaaacaagcagtcagagtccagacgtaagttcattccaaccaagttttttaatttcctccacatgctttgactagtacagcattctctcttacacttctgagttatcgataggtccaaaatgacagcagagaagagactgttagagatccttcaatggaaaggccgtacctctgcactggttatgacattttcctcctgttggagccttgtacaatgtgagtttctacatacatattacccttttaaactctgcaagtgtgtgtatctaataaagtcgtgatatgttcccaaggtgtgctatggcgcttgtgcatcaaagaataaaacggattttctatgcttttccaaacaccacggcaggtggtctcgggagtgttcatagacttcaaggggaaaagagtttgaaccatcattatgcagtgtttagagttttgctgcctgatgacgcacttagacaaatgaccacggtctaatgcattgttgtagtcgattgataatcaggttctgggtgagaaagctaattctttgttcttgttcattccaagaatctggaatcttattgaattattatgtagaccaaaaactttcgacttctattactgtgtatggctcagtactctctagtcagaaacttgtgttttagagaaacaacagaatgcaagaaacgaaccgtcactaaccaatcctcacatgaaataatgcatctctacttactgtagtatcaggtcattgcatggcccaactgaaatcattcttgcactgcgctctcttaatctaacaacagaggattgacgattgccgccattcgaaaatcgtcattagctgaaagacgaaagaggttgttatgaggtaaatggtgataatctcaaacttggttttcaaagttataagctcatctgatcgcgcaacacgtgtatatttgtatgtattagattttgataggtgaaaaaaaaattatgtaacaataaaaagtctagattaagacctgtgtatgagtgttttaaaattataaattgtactaaatttaagaaaaagggttgtttgtatatttgtttttgccttaatacactaatttgcattttgatattttaaatttgttgtaaaatttattacaataatctagtaaagttaaattatcaatatgttattagatcaatgttagaatcattttacaatattcatattgtaagatttgcatttcaatattttaaattattgtaagattgtatatatatacacttatttatagcctatagacatttattatttcttattcataattgtaaactaaattattagtgttaatttttattttgccacaattaatgttagatctaaagtttaaaatccaagattatatcatattgtacatttgtttatttacttttcattattctaaagtagattaatagtgttaaatctctcttttgccacaattaatgttaaatataaatttaagactccaagattagatcattaatttctttatatattgatataaaaatctaaactaagaattatcatcgtacgaaaagaatggagggtgacaaacataataattctaagacaattttttcaatgcataaaaaataatcctacgacaatgattatatcagaggatatagttgaagagatatttcaatatcttccaataaaatcactagctagattcaaagtcttgtaaaaaaatggagatcaatgatcaaatcaacctacttttcccacaaatgactcgttcgtacaggtttaccaacccctaatatgaaatatcttcatgttagtcaacacttttcagcgaattttgttgaagaagattcaactcaataacttttcttttggagactttttctagagatgaccataacaacggaaaaaactgtcattcttcttcttgttactacacttttcctgatgatccaatcgacaaatgtcaaaataaaaccattcaagtattgggatcttgtgatggattggtcttgattcagatccatgacgattttaggcacatttacttgatcaatccttcgactaaagaacacatgaaactttccaaagtggtgcgtcgttggtacgcaccttggttactttcttagattacatgaccgtgcatacatgatatttgttattattagttaaacttatacatatcaacttgattactttttttagctttgtagtatccgaaaaaacttttcatgcatgctccgttagacctttcgatctgcggtaatttccgtaacgttcgcgtagccaggttgcaaattaaatcgcaacctcagtatcttgaaggcaaatcaaaccttggatgggtttagaaacatttcaaagtggtgtttcgttggtacacatctcttgttgaccggaagacaagaacaatgcttcctcctcttgacaaacagaatgaaacaacgtttcgggtttgttttggtagattggtaaaacattggtgacgaacaacactcgaggctttttcattgatcaactcaagtaaatttctctgaattctacggagcaaataaatgatgcacattgctttgagacgcatagccatttcgccaagacttttagaggcatcggtaacagaatcttcatttgtagatcataaggaagtgtttcaaagcttgaattctccattcttgtttttttgtttgttatgatattttgtgttttgagacatagagacctactaaacacacatgtgatatttataagagattctcaaaaattggtttgttaccaacgttgtgacttgttgagtcgtaaaacgtgtacatgcatctctgatttatatttccaaaagagaaatattagttcctcacattaaaacttaccataattattggccaattaagattctttattttctactttctctcgtttaaatttatcttttaacacaaaaataaaataaaaatcattaagaattaaaaattccaaaaaaaaatagaaataatcaatgcaccacaagcactccaattaaacgcaggcgttttgatcatcaccggaggaggtcaatttctgatttcttccggcgagaaaacaaacgaaagagtgaaaaaaaggcgacttttttcttgtcccgggttataaagatgtcagctttgtgtcctgtctgcaatctcacgcttcctctctccctaatccaaaggtatcaatccctaatttcagctttgtgtcccttatttctatatgcttcttagttgcattctctcgaggtcttgatgtgtttgtctggttatggtggatggtttgactcagccatgtgaattcccacttcgaagacgatgaaatcaatccacaaatcgaaaccgatcaccacttggctctgcaactcgcttctgatgatcattcttctgatgatccttcttcgtcttcctctgcttcatcatctgtaatactttcttaaaacccttaaatcttctttccactcctgtgttaggttcagaaaagaaaacccaattgataaaacattgtttcatttctgcagaacaacgttgcctccttggtccagttacagactaagagtcaattctatagtgtaggtcatggtggtttgatttgtttgctgaggaactgtctggagtcagaactgaaattgaagtcgaaacctttagagtgtagtactagtttactatcaggctttgttgatcattttcaatcttcgaaggaggataaaggttggggatgtggatggaagaacattcaaatgcaatgctctcatttgctttctcatagagaagaagctaagagagttctctttggtggttctaattttgttcctgatattccttcgctccagcgatggcttgagttagcttggaacaaggggtttgatgtttctggagctcttcattttgataatcgaatatgtggttccaagagatggattggaactactgaatgtgctgcgttgttacgttctttcgggttgaaagcgaggattgttgattttgctcccgagaagtctaaatcgatgtatctttcagttcctggttctgctattgcacccaaggtaaagtcatatggtcccatggacagatatatggttaaaaaggggggaagtgggaagggaaaagcagttgactctcatagttctaattcttctaggatcagcaaaggagcggttttaatggaatgggtttggaattacttctcagataacaggttaagtgtttcatccggtgttcatattacgaataaagggtaggttgttttgtttcagttcttgatctctgaaatgtcttttgtaacttcaaaacacattacgtctaaggttcctgagttgatgttatcgtgtgtactgcaggcccttgtatttccaacatgaagggcactcgaggacaattgttggggttcagagacggttgcaaggaactacatttactcctcagtacaatctcctaattttggacccggctgatgtgagtatacatgaacatcagcttttactaaagttgaatgtgattaatgattgtgagacttgaatgtgaatgcagtttactagagctatagagatagcgcttatagagaagagaggatgggagggatatcttaaaagaggagctcacacactgaaatgccccgagtatcaggtctcagctttgaactctgatatcaatcatttctttgttattttgcataaagctaagtgattttgtctgagtgtgatttggggaatattgtgatgatatatacatacagatgctgtacgttgataatggaattgctgatggagaggagttggagaagctcaaaaccattgatagtcactttgttgaattctaatgacttccatcaaaaattgaagaatggttcttgaagattcttagattaattgcaatttttcaggactaggagttagactactatgactttccaagtttcaacgaacgtataagatgtggctatttattagaaacattgagaaaatacagaattttaaccagagataagcatctttatcaccacacctaaaaatagaaatgtctttccaaaagcacttaaaactagagagaacgagtcataaagtaaaaaaaaaaaaaaagaagctatagagctttttttcaattcctccaagtttggtgatcccttcttccttcctctggcaacaaaacctttttcatgtgtgcctcaaatgaacaacaaaacctcactgttgttcttccatggactctgaaaattgtgacattttagaggttttgttggttatttaagaggcagatgcagccaccttcttcctcactatcctttttcgccgagcctttggaggtggagaatctgaaactgaatcttcttgcttcttcccgagtagccctgagacaattgcattctttgagatgaaccattttgaagatggctttgctactgcttcctctgagggtcggttgtatgcttttgccagcagatcatctgactgcgccagtgggtctgcctctacacctagccatacttgtcttgacttttcccctaattgcacattcataatcctgtaccacatacatccatccatattcatcaacgatcttgatccccagattaaaggtttcctaagtcctaagacagagttttacaatacaatatccaaactgccaacatgtcctgtttatgtatgacatgtacatatgtgggagaaagagaatacctcaaggcagtgccgaagaagagtgctactcctatgacgtcaaagtgactgctcactcctctttcaaatccacataacagctgatatctcaagttggcatatattccaagaaatgcaccataaccaagagcatttgtgctgatagatgggaccgtcacagatactctgtcagaacaaaggcacaagtagttaagcatgagctggaaaaaaagcagagatgctgcccgagtgaatcaagagatttgtaatcctatgatagaaggagaagatatgtgatgacctgttcttcttctttcctgctagaacgtttgacaacgaaccctggagtgttcctgctgcgagtccaagaatggacaactctgcagccttgtagaaaagagaatgaaatctcttttgcaagtcgaactctctaagaggatagctcatttcaaataaattatttggtagcttttgtaatgtattttgcaggtcaaaccggaatgtgtttccataggaacgacatggagctagtaaccaaacagcagctgcattgcatgctgatacagtaagaacatttataagtgcaagatcccattcctcttttagtctgcaaattatagagaatacaatttaggacaagaaaccagaagctacaaaaccttcaaagtataggtacatggaaaggaacatacctattcttacgattcttcacctcccaccaaactgagcatccaaccgtggcagcttgctccaaaagaagtttatagagaaatgcaggatccgccaacatcctacacaagacagtttcttagtcaagactgcatttagtatgacaatacagaaacttataacttaagagacaatgaattctcagaagaaacccaaaatgtacctgccaacaaaggccctcgataatccctgaggaagggcacgggagatcattctagtcgttgtaggacgggcatttatggcaaggaatttcaccatttgagctgagctgaccaaaccctgcgtacaagtttccgtaaattcaagtatgtcagcatcgcaagatcaccatttcataataacagaaagcttaaacgatgtctcaccatttcatatgcttgacggagaccggcaggtaaatccatcattgttttttgccattcattcaacacagcatcaacgaatttcctatcaaaaatctggacaataacatatatgccattactgcgtgacaccatgacaataaaatacatgaacaaaaatatcaagttctcatacctctgcgagaaacatcctacgcctaaaaagtccatcatcatctccctcatcaccatcatcgaattcatcaaagtaatcatcatcatcaccattatcgtcacctccatcgccaccaccattattgatactctttccaatgtttccaccccctcctccagttgcaatctgtaatgaaacatgaaataaaaattcacaaagctactcttttctgatcggtgcaaaatagattcactgcaaactgttatctccaaggaagatatcattcaagaaattgcatccgcccattatcataacacattttttcagctactctacttcatctccttgaccaacttctactatttcctactaaagaaattatccaacttctccggattaaaatcaagttatttttacttagagcaaagaagcaggactaaaatctagcacttcacacacactgttactcgctactcatagttcccccacaagtagacgatggaaagagaacaaattctgaacctccaagaagaatgatcaactctcgacttgatgaaccatcgaaaaaatcagagcagagaggataaaacaaggaacgacatggtcatagccatacgattggtaaaaggcacagcctttagagagaatttcaccaaactaatctaaattcttgcaattcacaaaattatctcttaacaagaaacaaaagaaaggagtatgagagagagacctcagggctagtctcagaaatcttctgggtcatatcaagcttccctttttccaaagtaacagctcctaccgaaccaaatttgcctttcatcacaggacacatctgagtacttgcagagaaagagccagaggaagatgtgcctaactcaactccagaaggtaactgtaagcaacgctcgagtcctgaaactgaatcatcgacaagaaacgaggacgaagaagctctaacgaagccacgacggagcttacaaggcagagtaacgagtggacgagggataggtaaacagggtttgagaggagataagggtttgggagcgacaacgctctgaaacaccatatgtgacatggctttaccaggattaaaaacccaagctttgattccgataaatattcaagcttttttggtgaatttcttgtagaaaaggcgcagagcagagcctatttcttctctcttagggctgagagagagaaagaaagagaggaaaagagagatgagaaggaagagaggatttatcgccaatcagacgatttcagaaacaacaacccaatctcgcttttctctttttgcaccaactcaaaagcttaaacacttctggttgactcagagggttttaagacggttattgacatttacacctgtccaatggaaattaaattcaatgatttttcatgaaatattacaaaaaaaacaaattcatatcgaagtaggaaaaaaaagaaactactactcagtttacacgcttcacaatcatagataatctcagagaggtttgtttgataataacaatgacacaaaccatttaataatatgccaaataaatgataaaaaaacacaaaaaaaaaaacttgacaatacaaaaagactaaacacattaaactctcaattaaattataatgaacataaagctttgattatgaaatatatctaaaagatatacactctgttgtcttcgttttgggatcttctgtgaaaacttggtttagccattcaagaaatcaaaatctattggctggcttcttattggagggtaattggttactcgtctctcggttgctgcattctctgttggtttcactgctgttgtcgtaacagtttcaggcggcgctgttgtaataggttcaggtggcgctgttgtaacactttcaggcgttgttgttgtttggctagtattttctgtggacgtagctgtttctgtgtttggagttgaagacggatcgcttttttcttccaaagaagtttcctccttctctacgggaggaggctcagacacagtctccgtcactggtccatccacaggtgctgctgcagtctcagatgctggtgcctcagcaacggctgcggttccaggtgctggtgactcagcaacggctgcggtttcaggtgctggtgactcagcagcggctgcggtttcaggcgctgattcggtctgtggtgcctcggaagatggaggagcttcaatagccaatggtttcgtaggttcttcgagcgccaatggcttagctacttctggctgtgcagtcttctgcgtgagtagaggttttttgggagccgtaatggaagcaaagattgaagacattccaggaggtagaatctcgataggaggttttctagatgcatcagataaactagtgagctttggatcctcgagagaagccagaaacgcacttgcagcatcggttttagaagacggagctttctcaacttccttctgcagcgttttattccaagcctggaccaagttctttagagttgggcgaccatgtgcctgtggaaataattacagtaggcgtagtcagaaacaatacaagtttaatttataaactgcaaaaagaaaaaccaaaatacaaaaacaatcttacatgggcatgaagcacggcttctgcgagcattcccgtgtcttgccatgccttctccatgagcgcattgtctcccagaactgcagcagaaaatgctgattctcgtccaaggcctatggagatcagattgtttacaagtccctgcaacaaagttaataaagtatttcaattaggaaccagaagatacaaagtataaaatcaaagcataaattcgtctatagttatgtcgatcctatctagtgaacaagacaaaggtctttagatttctgtaggtatcctaaaatacgagaaaccaagttagaaaccgaaagaaagagaaattgcagacatacacttaggcgtgtcaattctccatggtttgctaggcgtaatgaaaggcctcgcaactcatgaccctgtaaagcgcctttgaccgaacctgcagttgccagtcttttgagagcttcgcgagcaatgtcggcgtgccctgtggcatctgcagcatctataaggtcaagaaactcctttgcaaatttcactattccttccacagcttcaacaacatcttcttttttagtagctgtcaaagagagaatgtcactcaaatcaaggcctacaccgtcctgtccaatgtccttgctattactcattgtgagaagacaatgaagtgccctcttaagatcattgctctgcattgctaggtcaaactccagcctgagaaaacataaagttaagtcaaactcggaacctaagtcaaagtgaaaaaaaaatctctgatgccattttggttgagttgaacgctaggatgaaggattcaatacatgagtgaaatactgaattctgtttactgtccagcataagcaattcagagactagaaaaaactgtctatagtagaaccaaattgaaggaaaagcggcaccaaaatattatatgttttatttacctcttagatattccaggcaaatgaagagcttctgttgcgtatcccatccctagcataaactgtgccagatcgtcatgatgttctctcccaagcctacttgccctgcgcaaaaaaaatgttgtataaggattccagctacttaactactcacataaacacgagattatgagaaacatatccataccatttaactgcactaacagcatccccgtaagcagcaagacagcgacagcggataccaggatgattaagggatatggcatgggcacacatgtacctaccaagaaatggaaggaggtgtcagacaataatttctatcttctgtctaatatttctttattcattcaagcaactaaaatgactatcatggcaagatattgtattcaagcttagtgctcgaggaaactttggaatgcagaatgtcagatttcagtgcctacctagtgcataatataaatggaaaggaaaattcataatctaattaaatataaatatctcaaatgaagataaaacgattcaccaattcatacagtcagcatcgaacaaggaatgtattaacaagagtcagtcttgtcgtaaggtaagaacaggagactcatagtacctgtcaatgagccaaagaactccatcccgcacaccggcaacaacaagaggccccactggtcgtttttgctccactgggaaacgagtaacagcaactgagactcctccaccacccacagctacctcattgacccttctttcatccattatgtcatcgctatcacctctagattgtcttggcaatgataagaatggtggaacagatggagcattttggaaagaagctaaacgcaccacctacaattaaaaggtatacacataaggaagactcttgctagtttgacatgaattgacatagatgtcgacacatatgcagtacaaaacaacacgcttagaccttaaaaattatgcttcccaatagcttacaatattttcaagtaaaagtaagaaaaatctacctgcagcatggggggccttaaagatatcctttcttgctttgcagcctgggaaccttctactgtgattaaggccaactctccatgctctgcaactgctctagcctgcgcctccttaagtttcatttcttccttcatcttcctagtctctatatcaatttcggaaactcccgcatccacaaaaacacatctggaaatccaggcatggaagaaagtattagcattcctccccagatatttgttttaaaaagtagcagataaaggtagccatgcgtttaacaaattcagaattagagcaattcttttcaaaacatagtaatctctgaaaagttggattatgcaccatctgaataatcaataattgttgatacacatccaccgcaaaaacacagattcaatttttagtttgtttcatccaagtggaagtagcatttaaggtaactggcagaagacagaaaaaaatcatgtatcatatatagagcaatatgcttactcaatcgtggttggtgtagccacaaacagctgtctgcgatgccaaacagctccagtagcatgtgcaatggcaacatcaccaagatatctatactgagggcgcaaggacgatatgaccatgtattgttgataagcaaaagcacagtattcaactgtttggtcccatgccgtccattctggctgaggtagcataccacctactggctcaaaattttcccaactacacattaaaaattccatttagataatagagaactgaaatccttcaaacaaaattagagctagccaaaacataactatgggaatcagtacagattggtgaacagtgcttattattccatcaaacaagagtaactatctcccagacatctcagaggaggaaaaaagactctgatttggtcaatatagctaactaaagaaaatgaaatgtaataaaatatgcccaacagctagctgcctgcacactattttagtaaaaagagtgctaacagaaatgagccttgcataaaaataagaaggacaacgctagttttacctgtagagctggtagtttaggggtgcagactcagcagacttctgcgaagaaaacccatcatcatagctagaaaacgaagaaacattgctgtttccaaatcccgagagtggcatcgactgaatggttgaaatagctgttgcagcaacaggactaatccttcgggatgtgcgataacctataccaagtagagcaccaccatgcagaccaatgacctgaaaggaaaattatgaagcatacgaatgttgcttaacctagacgtccagcattgcatactgctctatgatcaatttttcaaagtaacaaagataacccaccacttgaagtcaagaagaactctcaagtaagattctcacgtttagcaacctttccttttagtcaaattcaattaataaactactgtgttccaagtatgacatttttttgtactaattttacagtattttcaatgcaaaccaaagcacacaaattcttaggagcatgattagattaaatattcaatggatctgctctagaatacatgcagatgatctggtataaatgaaaaaaacagacacataccggttcagagcgacctcctacggatctcatgagtatgtttgaggtaccatcatccaagagaatacgaacttggacactagccgatgaagctgcactggcagcagcagcagcttgagctgcagctgcagcggcttcttttgcctttctcgatgaaccacccttagggattataggcattctatgaggtaacacagattctagaatcgcaaatctgtctcgacatgtatcccacgccaacagtcttgcacttccagagtcaacaatggaccagtcactaaccttgtagatagagaagtatagaatatccggccatacaactgccacatacctacaatcagagaataaagttagctggctaaaaaaaaaaaaactcaacaaattagctgagttaagaagaaaattatattcataaaaaacaattagctaaggaacttacttccctgaactgctcacagaaagaactgagtatgaatcatgtggaactggtgccacgatctgctttttggtttgctttacagttaactgttcacctgggtctcccttagaaagccctgattcggacaaggcactattattgccaagggatgggttggctgtgttggatagttgaaagttcaagagctttaattctcttccaaggatatatatagctgaattctcccgacttccaggcagtgctggtagaggagctgcagacgggatagcacgaggatcaaattcactaactataataccaacattggtaccagttgcgacgagatgtggttgtagaggatgtgcaaccatacaatagacctaaaaaatggaaattaataagtacctgatgagggttactaccaatgtatggaagccatgaaagcgaaagaagtacagaagcaatgctattataattatgcaataaagaaactagcaatctttgaaaatcatcaactggcggtttcaagtagaaaatgaaccccgaatattatctgcaaattctgaaaaaggaataactttcaactttcgggtgcagcatgtgctttccctatcaccatctgacataaagattacgtatcttctccattgcaattttcttttagataaatttagtgttcaaacagctatcaatttaaagtctgctatatacaaaacttttctgcaagaagtaatacaaacagttgtattctattcttattcttattcctagtctacttgagtcagaatacctttgcattgccaagtgcaatattatacagctacacaacttcatcatttgaaccataatagatgcattttacgagataagaagagaaactaatgttttgtgggacacatagaatggagcctcagagagcaatgctcatgctcaggcttgagcatgagctattgatatagtatacaactagcaggcagaaagaaatgatatgatacgtggtagatttcgaggatttcatcaacaatgagctaattaccctaagttttctgtgggttgcaagtacttgaggcggaaccaaggaagaaagttcacataacggccttgtcagggccgaataagttggatgctcaatagacctgcaaaaattcaaacaattagaccactcatctaatatacataaatatattctaccatatacaataccaaatcttaaacaaagataccatatgtgtgaatctttaacgcaagtcaaaatatcaaggtttggcgctcgagggtgacaccaagatgcaacactgtggcaagctagtttcgggacaggtttaattctacgtagctcctgtagaataaaagtagatatgcatgttaataaatgagatcgggaaaatatgaaaaatccatacatgagatacaccattaccttaaatgtcattgtatcccatatggccaatgtcttgtcagccccaattgtaatcaattgtggagcactcccacttacccttgacagctcaacagccaccaccccaccatcatgtgcctaatacaatcagaacaaaaacattagaagaagccaagaagggattaggaaaaaaaaaaaaaaaaagtataacagagaagtggaaattatccactcaattaagcaaacatgaccatgtctattacaccaaaaaaaaaaaaaaagcacgagcatgtcatagtcccctaatcattactcagccttttataaaaagaatgaaagaatatctaaatgcaagtatccaacattcagaaacagacacagaaatcaattcagaaggttcactggaactaagaacaatggtgccttagcctcagctgtaaccaaatctggcaaatctttccaggcctaagaattgaacggtcatggtaatatcctctcttgaactttgaatgaaagagtgggcataattgagtacctttaagctaagcttgggtacaagttcccttgagtcagcgccatgatcggcactccacagtacaagtaagccatcactgccacctgaaacaaggagtgcctgcaattgcatttagatagaggatggctagtatcatgtattgcacataaataacagagagaaaatacttgataagcattcattaaaaaacgtcaagttatataaaagggaagaaagcccagtactatcagaaattcgctattaacataacctaaacaagcaattgggaaaagagatgccaatgtttaaaattcccgccgctcctaatgcctaggctatgcatgaaatttaacccgagtacagatgatctaagaaactaaggctagatatttggattgtaaaacaggtatccgtatagtaaggcctgctgcggtctggactcccacttagtagaatgtgagatttttacgtcgctaagaagaaagagatatatgtaggaaacttccaagacgatatgctcaagacctcgttttcatataatatatacagtcgatcttagtaggtgatcttgagtatgtttttctaagttacatgacactttcatctatcagatggtattaactattaacatattaagtaaataactcgaaataaattcagagcaataaagagggcatatatagggaatatgtagttacttcgccagatgatgccatgaaattcatcaagcaataaatggatcctttatggccacctgtatatcgacgtgcaagctgcaaggaagtaaacattcaaggaaattaacacagatcagtatcaaaatccctcactctaaacccagcagagaaaccaaaaaaaaaaaatataattttgaaacaaacaaaccttccatgttatcattgataaaacccgaatgacaccatcagttgaaccaaatgcaactaaagggccatcaccaccagatgatctcgaaagaaactccatgctgcaaagaaaggaagaattctagcaacattaaggaggagtagaaattaaaaatgtagaaagggagtttggccattgactgaacattaaacatcaaggaagcctggtatccattacacttagaacacacatatccattacacttatgcctagtctacatttgactcaaatatttccagcgtagtaactaacggaggtctttccaggattcaagtgatttaaagataggaagcctaaagtaatggagcatcttccccggggtccaggtgtcaagcaaacccatatcctaaaattagagaaaaagcaatgaacttaccagagaagtgacttgttatcaagctcttgctttggcacatcacgaccacgcattgtcaccaaatccaagaaaatagctttattctcacaacaaatgaccagaaaatgacggcctttagtcgatggagcaggggaagtgaaagcagatgtcagatgattgacagctgatggagattcagcagctgcggagcggttgcgccacagttgccaataacgcacatcatcgtcataaaacttcacctgcttaacgctagtaggtgcaaacattgagcagataagtcatttttctcattatcgaaaggagcaactgaattagcagcgagaaagatc

SEQ ID NO: 740 - DNA, 99123 bp, Arabidopsis thaliana
catgtataacataaacctttaaagaactgtagtgcagctacgcagcctacgctagtatcaaacttttttctacgctagttatataggcatatagagcatgaaacttttttgtatacaaatagacccttttagctagtttttaagtagaagtcaaagaagaatgatttaaatcaatgatgttggttggtttgcatgattaggatccgatcaaaataatttatctttattttagtaaattttttgggtacacctaaaaccacataattttttagctgcacaaattatgagtaaacgaaatgagacgaaatttcacaaacttattctaaatttaatttctaaattttatttatttatggattacgataatttttaaaaaaatttatatatggattactaaatggacaaaacaaaatatacaaaacatgatcctgaaaacaaaataataattaacttgggattgaccccacagtacatcgaagacgattacaaattttaaaattttatgactatgtatcatatataaacacttgaagtaagttttttaaaatatttatattttacgataatgatattttaggctacatttgtataatcataaatacgaaaacatacatttcattaagaaatgatgtacggcgggtctaaatttcaacatgtttaattttccattttataataaactctttaaattctgtagctaattatttgtgtggctaatttttgatttttttactatataattgctgagtgattatatattgaaaaaatcattgttggtataaactgaattttggccaaaagaaataaattgctaaatgaattttattttatacaatcttacctaaatgacacaattgatatgtctaatattgatgaagttaaaaaataagaaaatgaggatttaatcgtattgaaatgacgggttaatgatattttaaatttttattaatgttgattcaaacatgtctctccatataactctttcaatgttaattttcattttttatgtttaaatattcttattattattaaaatttgttgattttaaatatatcaattataatatatatatagaaatatatattaaaatataaaaattactatatctagtaaaattatacagtttaactaaaccgaattaaactatataaaaacttttaaatttggatgcttgttaagttataaggttctttctcattcggatttgaattcattttgatcttatttgtaatatgattatggatcattgtctaaatattttagccgatgtagtaatatatgtctgttttaaaattttgaatcacattatagacaatttttaatagatttttataaactatgtatttttgatgatagatgataaaaaaattcattgttttaaatttacacatatcttttaaatatctcttataacaattgtgaaatatgtatagatattttataattaatgttaaaacatcttaattgtgtttggttgtataaataataaaaattaatagtaaaattgtttggatatataacaccatttccgtttttattagttgttttcttagaagttcagttttgttttaaattagttttttttttcagttttcttcagttttcaatgccgatatttaacagattttttagttatgttataattttttaaacatatttattaatgatattaaacaaaataagacattactttagggctaaaacagaaaaactgaatcatttttatattcgttaaaaaactttaattgccaactaatttaaaacggtgagagtataaaagtaaaagttgattttgaaaaaaaacgactttttttctgggacatgatgatactgtacattagcaaatgaagagacgctaacaatgggagcagcaaacctcagacgaaggctatcctcactacatgccgaagtggaagctcttctatgggcgatgaagtgcatgattggcgccgacaatcaagatgttgtgtttcttacagactcttcagatctggtgaagatggtgtcttctccaaccgaatggccgaccttctcagtgtatttggaggaattgcagaataacaaggaagaattttcaagtttttctttatctttaatttcttatagtgcaaatgttaaagcggataatttaccgcgtaaagttcatgtccaaccatatcacttacgtaaacaaccttcctcaggaatgactcttttgagatttaattaattttagatgaaaaaaaaaaaaaaaaaccttgacctatttttattttttttgacgtagcctgcttttctttcactcaaatctcaaatctcatcgtcgttatcttccgccgcacccatcattctccgccgtggctgtaaactcttcttctcgtcatcatcaaccaaaaacgacgaggacaactccatatgacaaatcctagcaccaccaatcaatctctccggcaactcctccgccgtttgcgcttccacaacaaaaccaatatcaaccattaaatacgtaacataccccaacataaacctaataagcgccgtcataatcgccgagctacttatatcaacatcaacctcaaaataattatctcctctataataagtacacttcatagccttcccagcaacaaatgcaccaaatttcccagctgctgctttaacaacccaaggacctttcacaacattgctaacgattttgaatctctcgttgcgaaacgaatcttcgtctgtattgatgaatttgtggaggagtgaatcggaagggattggtttttgtgttgcgaagtagaagaccaagttgtagtgttctttccctgggacctggaaattaacggcgaagatgaagctacgagattgggatgttttgaaagcgtggattacacggttatcgggacgagagaggatgtgatcgagtttctttgtggtggatttgagccagtctacggcggcgagagagaggaggtaatcgccgccgggagatttttgttttgtggcggtgaagtagttatgtgagcggagagagaacacgttgcctggtggtgaagcccagccgttggttccggtctcgagatctacgtggcagaaggagccaccgttgattgtttcggttatccattccggtacggtgatggttgattcggtttcggccggtttggagtttttgttatcgtcggtggtagttttggtttggttcatggcgtgtgtgatttgttgatatctctctctgtggttgactctctattttcgagtggtgggatctgattatattactactccttgggcacttcttcctaaaaatgagattttagcacgagctctcactgtcactggaccgttttgtttatgaatgtcagaatattatttctattaacgtataaatctaactaacattcttttagtttttgagagggttggtttctcttttaataaggtgtgtcagtgtcattgaatgagttgtatctaatttgtaaataacaacaatcttaaaatttatggttttttaattttcaatacgctttcatgaaataataatatttatcagtctattttcaaccgaattctatttcagaatcgataataaaccaaatatgatattatttcgtttggcttaacaaactgaattataatcggtaatcaaacttttcctggatcaagaaccacttatagtagtaacgattgaataacacactaaaactctcttgaattttaaacctaaaatctaacgtccaataactcccctaaaattagagtttacttttgactataaatctaaagtctgtatccttcactaaaaaaagtccaaaaattacatgaccaatctaaattatctaataaccacacggtccacaccgactgatttctaatagttctcgacttactcaacatagttataaccatatatctatattgcttctccttaatttggtcacttatcaacaatcaaaattgtgacagtcaactccaaaaacaaaccaacaatgcagctttaagaaacaaaatccctacctcaaagagtgaaacttagacagaaaagaagattgtagtaatagactatttgtaaccaacccaactaataatcaatcaatggtgctgcaggaataatggcaaatgagaaagtgttggatgagaccaagaacaaagaacacatctctcactagccataacgtttgagcacagttcggtagtgtaacttatgttaaatctctataataagtgcaaaaatcatgatgctatgaaccaatgactggaaaatgtaacaaaatctatcacttcccataaacacaagaaactaccaagttcaattccaaaaagttacttaaggacaaattcatcaaacttaacaatcacaaaaacgccgataaacgcaacatcagatcggaatcgtaatccaccaatcgatgaatcgtagttacctcactgaatttttttcctctgaggtggacgatcagaggccaatctataaatccagtaaacctacaaatccaataatcagaaaactgatcaacgatcgtcgctgcaaaaactaattcgaaacagagagcacaaaagtaaaaacgatgagagacaagtaccaaggcgataacgtggactgcggcgagaaatacaaccatcgccggtactagatccacagagttctccatctctcaatcgaatccgaattttctctgccagagacgacgacttaggtattagtatgacatgtgagagaagaaagagtcgtcggcgatttatcccttctccgatttgaatttttttgcagtactgtttgggaacagaagtaaagttattacttaatccagttacgttgaaaatatgggcctaagctttaatgggcctgatcccgcttagtaacagtaacgccgactccatcggaatttgccacgtgtcatggacgtggcgactaattctcggtgtcttttgctcggttgctctcttcggctcttacgtggagaaagagactctcaaaactttcttcgtcttcttcggacggacaatctcgtttacgcattttatcgaacagtttgtgtgcataaaagctaacgagtggtgaatctaacggactatgggattttcgcttgctgttcgactgaatagatcttcgtctcgttcgtgttgttagccgatgaggaatgccgttgttgcgctccgccatcaccgtcgtgtttcgctgctccggagaagtacgtttttcttctctttataggtcttgcattttatggaaatttcgatgttattcggtataaatttcgggtgtggatgattttcgtgttgaaattctggatttctgactcgagaatccacttgatttactagaattgtgattatcacgagaacatacaatttctgcgtttggggaattttggaaacttggatgttagttttgtaatgctgaaaactctttgctttgtaatcccttggttgctcaaactcagtttcagtgaagttttcactgttaactttgctaaatggtgatgaatgttgctgctgagatttcctattttccttttggagattgaactttatgttgatgaggttgttgttgctatagttgtagcgttccgtgatgacaatactatttgtctgtctccaagcttgaagaataatgaactctcaagacagacaaattcatgggtttcaccattttgcttgcaacgcagagcgtgagttcttgatcatgctgaataatttgcagatacacaacctatcgagatttcaggatgttttattgggataaaaaatttttgggattgggtttgcaggtattcgacgggtttcaccagcgtacatggtggaatacctacggcagagtatgcaaagttgcggagagaatcccttgaaactgaatttggacatgctctaggagcatatagctcgaaaagtttttctgcagtgtatcgttttggaccctttttggctttgtatagagctgcaatcatttcgtatcatgtggtgaagcttgccttttggcagctgtttgttcaggatatgaggaaacgggctgtcaaggtcagtaaattcgcaatctatggtgatttgttgtttgccaatacttgtttaataagttaacatgaagagtactttttggatacaaggcctggacaaatttatttaatagtactttatcacattttggatgcagttccgtgagactcttatcagcttggggcctttctacattaaggcatgttacttatttgctaatccattactcccctaaatatactaatcttagccttttcttttaattcctcgttatatcatacatcatttgacttgcagctgggacaggcactgagcacgagaccagacatattaccatctatatactgtcaggaactttcaaaattgcaggtgggaaatctttctttctttctttcaagttaattatatggctatgctcgaataattagataaagtattttttcttgatgattataggaccagattcctccatttccaactactgttgccatgcgatgtattgaagagcaactgggtgctccagtgtcaaaactttttgcagatattagtcttaaacctgttgctgctgcatccctgggtcaggtatacaaaggttagataccttataaccgtggtctgctattttctatccgtttggtctctaccgttattctcctttctatttttctcaatttagagttattagaagctaaatgtttcattttttcccttaagtattgcagctcatctgcattctggacaattggtagccgttaaggttcagagacctggaatgtcactcattctaacacgtgatgccctcttattcaaaatgattgggggacaactgaaacgatttgctaaagcccgtaaggatcttttggtagcggtgaatgagatggtcagtcatttatctgatatgttcggactagttttctgcttacctatattatactaacatgttcatgtctctcttggataaacaggtcaggcatatgtttgacgaaatagattacgttctcgaggcaaaaaatgcagaacgatttgcctctctatacagttttgactcaggtaggttcgcttgtataaatttgttcattctcttttgaaatatcattgtcaaatgcaatatatctttgaacattggcagggaatgagcagattgatgataacgctggacctaggaatatgtccaggaatcacagagcagagaacatcaaagtccctaaaatttactggaattttacacgcacagcagtgctcacaatggaatggatcgatggcataaaattaacagatgaaattaagctgaaaagggcttcccttgatagaagggacttgatcgatcaggtaacaaaataactgttacctaattataaattatcgtccattcctcacaaagtggcaaatgaatctgtggattgaactttgttattctgagagataggtgtagatgttttgttaagaaccttgtattggtctggttcgcagggcttatcctgttcattaaagcagcttcttgaggttggattctttcatgctgatccgcacccaggaaatcttgtggctactaaagaagggtctcttgtttactttgacttcggaatgatggggaatattccacgccattaccgtgtgggacttattcaaattgtaagctctacttcattttatccttgccttctgtgtcttagatatgcttgcagtctttcttgcttcttttcaatttttcttatatgcggcttaagatggcgaaagaataacttctccatttgagattgtgtttccttcactttgtcaattttgattagttctattgctgttacagctggtgcattttgtcaaccgtgattctctaagtttggcaaatgatttcctgtccttgggatttttgcctgaaggggttgatatacaagcagtttcaaatgctttgcgtacttcatttggttctactacgagaatatcacaagatttccaggtatcttcatcttgtgatgaaaattacactaaacctaaagacagattcactgaaatttaaaattgtggcaaagcctttatcagcatttttaatattattgcctatgagctgaaatgtttcatctaaacatgcaagtcggaaaaggcacattttaaaatgatttctttacaacctaatgcttttgagtagccacaaaggtggagaaaacttaataggagtaatagtaggagcctggttgttttacaatgatggtaattagaccgacctcattagcactttctttacttctgctagaatgacttatgtctggaagctatctcatgcattaaaccaaactctcagcttcatgatagttcaaaacgttggatggctactataaatttgagaaattcggatttctgagagaggtgtattatttctgtagatgttttcctactcttaaaaccccaatcagcaactgaccttgtcatagttaagtgaatttcgttttggtgagattccatcgacaggattcttcaccgtgattatagttttaccctgtcctgtcattatagttctaccataatccttactttttgctgtacagggggtgatggaacaattatatgatgttatgtacgagttcaacttttcgctgcctccagactatgctcttgttataagatctcttggttcactggaaggcacggctaagattcttgatccagagtttaaagtgattgagagtgcatatccatttgttatcgggaggctattagcagatccaagcccagatatgaggaaaatactaagggagcttgtcatttgtaatgatggatcaataaggtggaatcgtcttgaacgcctggtactgtcatatagctcctctcgttatgattattgaataatctaacgaatgagcagctaacaagctctattttccaggtagcagcaatatcagaacaggcttctgcgacttcaggagactctccagaagataaaacgttgaagaaatcatcggaactgaaatcattcgacatgcattcagtagtttccgcaacagaagatctgctactgttcatattatccgagaaagggcagagagttcgggtcttccttcttcaagacataatcagagtggttgatattttcctggaagtagaggctcttgagctcaacaagaccatcaatcttaagacggtcagtaaatcatccttccctatttctttctttcgcaacggaatcttctgaaaataatcttgtcaattcaaaactgcaggaagaagggacaatgaaaagagtgagcaatggattcaaaggtctgagtgaggcggtgaagcttgcaccgggaatgtggatatcaatgcttcttcggatgtcaaggaagtctgaggttcatagttatgctttagatattgtttctgcattgtctacacattttggccacaaagtgcctcacacttgttggatccttctctccaaattgctccatcacaataagagccaataattaaacgttcgtctatgctattacatacttttggatatcatatttagcaattagcaaaactaatagaaactagccagtaaatacgattgactcttagtaagaggcttaaaaataacggatcactatggactcagtgattttggtgctaaggcggctgcatttctcgagactatctcaccggactgcattgtcaggtactaacttagttttgggtggaatcatattgaaagtgactttatggatggaattattcggaccgttgtagaattagggctaaatacctctatgacggattcaagggataataaatgttaaggaaagtgatttgcactacatgattttccaaacctatgagattcatatgagatgagagatgcgagaaataatggagagatgtgttgagtcatatattttatttcatctgttaagaaaaattgaaaaaagttttaaaaaaaactaaaactttatgttctatttctaaaatcaaaaaaattgaaccgttatccggcatcacgggtcaaagaaaagtttttatggacgtgaaaacactgactaacacaaaacaatcgtaggttgtgttggggtacaatgggttttaccactagtagctaattactacccatgttggttctcttgattcgaaatgttttttcctgttgtggatctgttgggctctttgcggctttgcctattagatttagacgtttcggctttgtaaaattttctttcttatgcaaccaatagcaaatcttttaagaaaaaaaaaaaaaaaaaaacccgtaattaatatcgtaagtttgactttatttgcttatatgccagcgtcaaatccgattgagcacgtataacaatatccaaacaaaaactaataccattatttatacatacatgttgcatcacgatgaaataaacaccttaatggcagtttaaaagtttgtgtgtatcaccagatctgttaccaacacgtaaatctattacgagatctattacgacttacaagagagaaacaaattgtttaataattcaagttggattgctttcaagtagttaaagtgagttgtggaaataaaagaggattgtttaatggttcctcggtaggaggcaacacataaatatatatcacgagtgagagaaactggatttttttatgttcaaagaaagaaatggaaatgataatcatctctctctgcctagcaacaatcctagcccttcttctcctaaaacaatttctgaatcgaacgtacactgccaaagtcaacctaccaccgtctccgtggcgagttccggtaatcggaaacctccatcagctaagcctccaccctcaccgctcccttcgttcccttagccaccgctacggtccactcatgctccttcattttggccgtgtcccggtcctcgtagtctcttcctctgacgtagctcatgacctcatgaaaacacacgaccttaaggttgcgaaccgcccgcaattaaaagtggtggagaaaattttcaacggtgggcgagaaatggttttctccccttacggagaatattggaggcagattaaggtattattttttttgttttgaaaagtcatttattttttatacaataatactttcctatatatatatatattttttttttcgaaatttaggaagggttattggtttatagatttatctatatatacattttttcagccattttagcaaataaatcctaaaatttgacttatttacaactcaatgctattagcattaaatctttttctaaaataattatattttttaaaattcttaatttaaattgtcaatcacattatcaatcaaatttaatccaaacaaacttcacatcaatcccttaaaattagcataaacgtattttgttaacaatattttaaaacaaagttttttgtttaaataaatattgttcttactaaatgttttttgtttaaataaataaatcatgtatttgaacttatttacaaagtcatgctactgaaattaattatttaggaatgaaaatatttaattaaagatttaaatcgtctaaattctttgcttttagagttattatgtcattacctaaaaaataaaaaatattataatttttaaatgttataatttatatatttcaactttataaaactttattaatatttaaacttataaaaagtttaatatatcaaaaaaatttaacatcattatataatatatagagttgtttttttacgtcatattttacggttcgaaattttaaaaatgaacatatattaaccacttggcgaaaaatatgtgggttcaacgtcccgcatcgattaaaatatttagacaatgattcataaacatatcataaataagattaacattaataaaataaatagttttttttgtggacgggtttggcgggacgggtttgacaagacgttacttaataacaattgtaaactataaagtaaaaatattttatagataaatacaatttgcaagtttttatatatactaactttaaaaaatgaattgtccctgcggtgtaccgcgggttaaaatctagtaaggaattgaaaatccaaacaaaaatcatttgttatttaatcattgattttaaaattctaattaaaaccatgtgttattgattcgatgatttataaatactagttaaaatcctttgttattcgtgtagtcatttgtttttggatttgggaatccaaattatgttttaaatggaattgaatggatttgaaagagaaaaatagaaggattcaaatccatgagtaaacacatgttatttcaaaatcaatatatcttgatttcataattaatagagattttcaaattctatatagatttacaaatcaataaaccaataacaccttagtttctgtttagctctcttgatttgctatatgtgcctacaacataaatatgaaagttcagatttgatttagtttacatgagcttgatagttacttggtgaagaaaaagaaaaatatctatttaatatttgagtcatgtgatctatataaattgaaactagaatatgattaattaactgatgaaaatatcaactctgtcttgtgaggaagagtgtatgcatcgtcaatctactcaataaaaaaaaggtacaatcctttgaaaaggtaagagaagaggagataagtgaaatgatggagagggtggagaaagcaagttccgattcttcaccactaaatctaagcgaacttcttcttacgctgacaagcgatgtcacaagtagagtttccttgggaagaaaatatagcaaggaggaaagcatgagtgatttcaaaattcaaatgaggaaaatcacggagcttgtaggcggatttcccgttggcgaatatatcccgtgtttggcgtggatcgataaacttcgcggtgtggatgaaaaagccgaggaagtgagtaaagcatttggagatcttatggaaaaagtgttgcaagagcatttagatgccaccgataaaccaacactggatttcgtcgatgtattgctatcccttgaaagacacgagagaaatggagtacaaattcgacgaagcgacattaagttcctaatcttggtaagattatatatatatatatataagcctagccatggataggaatagcttaatgtatttggaacaatgaaccaatgaatttttcattcctccaggatatgtttttagcaggaacagaaacaacttacgcactactagaatggataatgacagagcttatcagacatccagagtgcatgaagaaactccaagacgagattcgcgcaaaggcaacaaaacttattctatatatatcagaagaagatgttgaggatatgaagtacttaaaagcggtggttaaggaggtgcttcggttgcacccacctttaccattactagttcccagagaactgagtgaagatattaaattaaaaggatacgacatagctgcaggcacacaggtgatttgttttgttcttttgttatgctccttttaaccaataaatcgtaataagcatctaaatgtctttggaggatctatatatatatatatatataggtaataatcaatgcttgggctattcaacgagacactatgacatgggggatagatgctgaagaatttaggccagagaggcacttagattcacttgtggattttcgaggaacaaattttgaattcattccatttgggtctggaagaaggatttgtcctggaatcggatttgctatggctttggttgaggtgacactagccaaccttgtgaatcgatttaactggagaatggaagtccaacattccggggatgaatatgatctagcggaatcaacgggacttgatgtttgccgcaaatttcctcttattgtatttccatctcccgcttaatctagtccccatgtatcactacgttcatcaagtgcaaattgatggggaatggggtggtatatccatatttcgttcattacgtttaggggctaattccttgaaagagaagtagtctattttcgtgattcatgttctagaacggtgcttaattaattgcctttgactcattgatttattttgttcctcaatccctgaaaattttcctaagacccaacgcttttatcttatttgcttaatcaatcttttttcattgcttattttattgttttacttgatggccaaaaaaaaaaactttctccttttagctaagaacaagtctcacaaattttattgtatgattggattcatgaaacgacttcgagcatgtgacctctggtttctttgagtacaaagttcttattagtatgtgttatatgtattttatcttcctaaaaaacgacatgttagttgtggtaattttaaacaaaatatgtatacatatatgggttacaaggaaggataaacaaggctatcaaaatatctttagacctctcaatatagagttctcccatggttagcttgattttttcctctaaatatagatttctttataaatagagaagatctttgctccaataattgttgttttgttcctctaaacaaaatgttccaaataaattttattttaatttctaacataatcctcctttatttttaaagtttataaattctatccacttaggttatttttaaacaaaacaaaataaattttcattataacacataaatagacaatcgaatgattaagacattatttttaagcatcatcattagtactatttttatattttaaaatttcaattaatttagtaaatatatctaatacaaatttatatttttaggtattaaatgataacttattaaaattggaagagttttttgtaaataaaaaaattatgctttaaaaatagagaaatgattagtattgctccaaatttggagcaatactatctttatttttggcgcaagatattgagtaccattgatgatgattttatatcaaatatagagcttgtagcaagaagaagggtgacttacattatccttgtggtaaggtttgtagtacgaaactatttttaaccattatccttcaaacaaacaatgttaataattctatgtcaagtttctagatcttaatctccgataacaaactaataattaacaattgttagaacatccaacaataaagcataaagagtgaaaaaaaaaaaaaaatccaattaaaacctgcaatttttctcgttctcaaataaaacttctaactaattaattttcttaaaaaatcttcaagtcgtcaaaattcaaacttttcctatttaaaacttatcttgaaaacctccaaattgaaatattttcccaattaaaacctcaaactttttttcgtttctaaataaaatttctaacataactaattaatttttcctaaagaaacgtttaagtcatcaaattttgagtctgatcaatgatttactaacgataaacggcttttaacaacatattttccatttatttagtttttgaaattcacatgttttagttacagtagaaaatataaaatcaaaattgaggattgaataaatttatacttgaatgattgttaaaatttatactttaatgattatggttaaaattttaaatcaatcgaagtaaataacccaattggtaagtaactaagtattaaaagattccaaaataggaaatatacaataatgttttgcttgtgcatcggtggtcattaagtaaagggcaccattcaattcttagagtggtaggaagcgagaaaccaagccaatatggtatcccatatggctaagcttatgagagagttagagacaagtgtcgcattaggtgtcgtatgaaagatgcatacgatgtatatacagtttttttaacaacgtgtctatttgtaattatcactcattgtcttacttgatagcttttgtttgcttcttcttaataggatgcattttattgcatgtgtatgcatttctccaaatgaaatcttgtgaaacacttgtctctaagagtctaactctcacacaagctaaaaacacgtcagcttgaggtccacttagcttattgatgagtagttttaaagtttgtgtgtttccaactaatcagtaactagtaatcacccaacacataaataaatatattacgagtgagagaattgtttcaaagttagaaatggaaatcataatcatctctctctgcctagcaacaatcctagcctttcttctcctaaaaccacttctgaatcgaaccgttgccaaagacaacctaccaccgtctccgtggcgagttccggtaatcggaaacctccaccagctaagcctccaccctcaccgctcccttcgttccctcagccaccgctacgggccactcatgctccttcattttggccgtgtcccgatcctcgtagtctcttcctctgacgtagctcatgacctcatgaaaacacacgaccttaaggttgcgaaccgcccgcgattaaaagtgattgaaacaatcctcaacggtgggagagaagtggttttttccccttacggagactattggaggcagattaaggtgtttttgctaagtcattaatttatatatacagttaacaattagttgtggttagctctctggatttgctatctgtggcctattatataatttccaaagtctatatttgattaagttttaccagttagattgatagttacatgttgtagtgaatacatgcaccgtgcgtttgattaattttgatcccccttccgttttattttaatttgagtatcgtcttgtaaacaaaaaatgtcgtttaaaaaaaaattcaattttattttatagttttaatttcttgaccaataaaaaatttacataacatattaataaaaggtaaaaatagtattgtttcgttaatttgtgagtaaaaaactaaaagacatataatacgaaatgaattgtatactatttacttcttgaagtacgtttgttttaaaagtcagaaggtatttacttgttgaaatacatatacagttctataatgtttaatcttccaattgaaaaatacaatacatttaaataaaaccattaaatatttttatacaaactttcttattagatatttgattttcgtaagtttagttaataagaataacttgtatatgaaattaacattgtttggcaagaataatagcagaaataaataaataaataaaaaatgagaagaattgtggacttcatacataagaattagtgtttcttttctaatatatagaggatgtaataaaggcatgagttgagctttaaaagaaaaaaaaacatttgctttgtgcgtagagaaagaacagaacacatttttttgcaaaagataaacaacggaagtttgagagaaagtagtatttttgtttgttaaaaactttgatatattaatgctcttgatacttagatatattaattttctcattaagaaactgatgaaagtattacgtctgttttgtgaggaagactgtatgcgtcgtccatctactcaataagaaaatggtacaatcctttgcaaaagtaagagaagaagagagaagtgtaatgatggagaaggtcgagaaagcaagttccgattcttcaccactaaatctaagcaagcttcttataacacttacaagcgatgtggcaagtagagtttcttttgggaaaaaacatagcaacgaggcaagcatgagcgatttcaagaatcaagtgagaaaaatcactgagctggtaggcggatttccggttagcgaatatatcccgtgtttggcgtggatagatcaaattcgtggtctgtataatagagcggaggaagtgagtaaaatttttggagatcttatggataaagtggtgcaagagcatttagatgctacaaataaaccaacaaaggatttcgtcgatatattgttgtcctttgaaagacagagtaaagatggaatagaagttcgacgaagcgacattaagttcataatcttggtaagatcatatatataaaagctttctatatttggttgggacaatatgaaccaaggaattttttacattctccaggatatatttttaggaggaacgacaacaactaactcactactagaatggacaatgacggagcttattagacatccggaatgcatgaagaaactccaagacgagattcgcggcgatgcgacaaaccttactatatatagatcacatgaagaagttgaagatatgaagtacttaaaagcggttattaaggagggtcttcggttacatcccccttttccattactagtactaagactattgactcaagatgtcaaattaaaaggatatgacatagctgcaggcacacaggtattggattttttttaaaattatgaatcataaatacgcatatctaaaagtctattttaggtaataaccaatgcttgggctattcaaagagacattgtgacatgggggatagatgcagaagaatttaggccagagagacacttagattcacctctggactttcgaggaacaaatttcgaatacattccatttggatctggaagaaggatttgtcctggaattggatttgctatggctttggttgaggtgacactagccaaccttgtgaaccgatttaactggagaatggatgctcggctttcgggggatgaatatgatctagctgaagcaacgggaatcgatgtttgccgcaaatttcctcttattgtatttccatctaatgcctaatctagtccacatattgtcatgatatgcatatctttaataggtttatgtttgaagtttgaataagtgttgttaatttggttgattagcttttgattatggaagaaaatattccaacttgttattaacttatattgttgcctcgtaatagaatagtcatatatgtaacggaagatttgattgtgcaatattatagccttcatatcttcctcatttatttacgattattctcctttccaattttttagtacatagcctctgtataaatgtataccttctctatcaaaaataacaatcatcacttacaaaagcttaaatgatatgagagcaataatcgacacctagacctaaaacagtaaccgcctcctcttgtctttttttattttttctcttttgcatttttcctgcggctgtgtttaccttggaaacacattcccaaccgaccctgcatggtgtcactgcctcacttgattctgtagacccatcataccttcgaaaacatagcatggacgaaggtatatggatttctagaaccaagtgacgcaagtgatggagcttgtaggctgtgtttggtgtggatcgataagatcggtggtgaaaagtctgaaaaagcatctaggtaccgcatataaaccaacactgattttagcccgatatacaatagtattgatatccatctattgcttaatctagttcccatgttaccatgatgcagctggctagatcttcaattgggctttctcttactgtttcaataagtgtttgggttaagtgttttaacttttactgttataagtgtttgggttaagtgttttaacttttaggagttttatctttttttttttttctttttgataaaccctagtcaatcccggtagaaatgcactgctatgcttcagagtggacttttctccgaaagaccaccacactgtctgtttcgaatttaaaatattattttattaatggcaggaggtagtcagaccgcatacatttctgaggatcaaatctgggtcagggagtttcacccttcaccaaagcttcctcgccaatagatcacatatgcttcggcaaaactggtgttgatgagtgttttcgtttctgtcttcttgtataaagaagacttgcgttatatggttgatgagcttttgattatggaataaagaataacctataactttcgagtttgtcgaaaagaatccaaaataaaaatatacaaatcccctcgcatataaaccataaacaaagaaaatcaaaatagctaaacaagagccaatagatgcttaatcaatcgcatgacgtgtcaattttgagatgtatcattggtccaagcttttgacttctaaaagtccactaaacctttctataattagcaaataatatttaaaccccggaaactgctaaacaccattgcttccggaacacgtaacaccgctcactgctttctgtttcttacggtatttctcttccaccatcaatgagaaaatctctcaatcttcttccccttattcttctctccaatcattttcctcaggtttcctttgacttttctccttaatcccgtcgcggtctctgtatgtttctgaagagtagtatttgaaatttctgcaaaaatgggatatatggacttggcgttatcttattcgaatcaaatgcggattgttgaagctcccgcaagcggaggtggtctcaggtcacttacctctctatttgattgaaattatctatatatctacattattgatttgttacattcgaaatttagggcttaggattgatcaatgatctctgtgtttgatctagtttaggttacttgaatgaaaagccatgtagaacttgttccattgtgatctgtttttttgctagctacatgtttgtttcgtctcaaagattatattgattcgaactttcgttttccttaacatgaactcatcacaatgtttatgaacttttgaactgcagtcagaatggaaaatttagctatggatatgcaagctcagctggaaaaaggtcatctatggaagacttttttgagacaaggatcgacggtatcgatggagaaatcgttggtctatttggagtctttgatggtattcttggtccctttcttaacaagaatttatacattatgtctcaatgacatttttatgaaggttttatatatatgatctcaaattggatattgattagggttgcttataagaaagagcaaaaagtattcatgtttgtttttttaattgttttttgcaggtcatggtggatccagagcagctgagtatgtgaagcgtcaccttttcagcaatcttattactcatcctaagttcatctctgacaccaaatctgcaataggtttactttcaatttcttttcgtttggacttactattattgttgctctaaatcttgggatcatatatatttgctttgtgtttttggttcagctgatgcctatactcatacagactctgaacttctcaagtcagaaaatagtcatactagagatgctggttcaactgcttccacagctattctcgttggtgatcgtttacttgttgctaatgttggtgattccagagctgttatatgtcgtggcggaaatggtacttttattgacatttttgattaagtcatgactcttggtatctattgaaatcttctgaaatgaattcatgtgctcttgtagcatttgctgtttcaagagaccataaacctgaccaaagtgatgagcgtgaacggattgagaatgctggtggttttgtgatgtgggcaggtaacaagaaaccgtagagttatttcccgctttgtggcttattttccggtgtgcctaactcctagattgaacagggacttggagagttggaggagttcttgcagtttcccgcgcgtttggtgatcgattgcttaaacaatatgttgttgctgatccagaaattcaggtttgtatcttcatttgctttgtaaaccacacacaacatctacttgtgttcacttaaggtcatgtcttcaacttcaggaagagaagattgatgattctcttgagtttctgattcttgccagcgatggactatgggatgttttctccaatgaggtttgtaaaattaagttcttcttcgaaaaactactttcatgttccgataagtatcacatcaaactcaatgattgagatctctctgatggtctttcaggaagcagttgcagtagtaaaagaagttgaagatccggaagagtccaccaagaaacttgtgggagaagcaattaaaagaggaagtgcagacaatattacatgtgtagttgtacgtttcttggagagcaagtcagctaacaacaacggttccagctcatccgaggaagcaaatcaagtgccaaccgctgttagaaatgactcagaccacaagatctcagccaaagaaaccaatcaagaccataccacagtaaacaaggacttggaccgcaacactgacagtcaaagcctgaaccaaaagccgattgcagctagaagtgccgataactcgaaccaaaaaccaatcgcgactacagcaacaggacacagcgtttcttcagaacagagtggtttaaccggggaaaagagtcaaatgccaatcaaaattcgcagcgactcagagcctaagagttcagccaaggtacctaatcaaacgcaaagcacagtacacaacgacttggacagtagcactgcgaagaagccggccgcaacagaacagagcggatcaacgggtgaaaggaatcgaaaaccaatcaaagttcatagtgattccgccgcaagaaagacaactccctctatctttaactaaaacgtccactaccttcttttgataaatgaatgtatcatcttcatttaactttgaactatttagtgtccaaagattttgcctcgaaactgatttatctcgttcatgtaagtttcttctctttgtcacccttttttctgaggtctttaacttcaacaatgtaatttctttttgcagtgtaccaaattttgtaaacttgttgattctaaatagtttgagtacataacataaacaagaacatattcaaaatcacgatatatacaaaacaagttacttataaacagttaaacaccacccactcacttctcttcctcttcatcgcccacaacaactaaaaatactcatcaacaaaaaacaaacaaactcgtttaaattaaacgttcgttaaaaaccttattactaaaacaaacaccaaaccacccaccatcttccattttagagtctctccctctctcaatatctaaaatgtaggtacaagtccgaacccactaaagataccaccatgaccaaccacatcattgctctcatttgtatccgtccgcttcgcaaaccgtcccttgattctcggtctcatttccgcatacgctttccttgaagcataccttatagtcttctcaaacttcctgttcttcctcttctctctgtacctcattaccctcgcttctctctcagctgaagtcagcggaacagcccgctgtgtccccggatcagctccactggttgcaggaccaccgtaaggatacgatacatcagccaccgaaccaccatctggcaccactcccacttccatcgacgatgatgacacctaaattacaccaaccattggatcaagccattataataagtacaatcaaactgacaaatactataggttataacttataagtgaatatgattagatctacactagattaaacaaaacaaatgaaaaagaagacaccaaaattctttgattaatacataattagatacttaaattaaggattatcataatatttcttctaattacagattaatttacacatgttgctcgcataaccctaaattttagtcagccaatcattacttcccaataaattaataattttaagtatcatcaaaagtctaaaccctaaagatctaaactttttcgttaaaaattgataaataattgttaatcaaacataatcaattaaattaatcactgtgattaaagaacattaagcttacgctgtgactgatgcaattgtaaccaccaccataagtaaagcctttagatcctccggtaaaatccatttcaaagcaattctcgttcaccgtcggaatcctaaccgtccgattctccaccggaacaacaccatcagtaccggagctattctgctctaacgattccaccttcggatcaacatttccataatccagatccagatacggatccggatccgagaacaaatactgttgaccagtgttcatctccggactatctcccggaacttcctcagctgaagtaacagcaacgatccccgccgtcgccgtcgttgtagtctttggattgggaagtaacagccacgaagcagcttcttcctcctcttcttcacggcttccgttaccatctatatcggagaagtaacagtcgtcaaggaaattaacggcggtgtgtttaacggaaccgtcactagagacggaatcgtaaaacggagtaacgggaacgcgttcgtgacggcgagctaacggattagccgagtggatatcacggtcgcacgtgacgcataacgcggccgcgtctgctttgcacgtgacgtgtgccggtgcttgctcgcacacttcacacatccacacgcgcgcgtgtcgtgacgcgagtttgttcgccgcgtggacttttgaatcgcagcttaagcatagaaacgctgcgtctggtcggcagtataacgccgccgtcgctgatttgcacgaatcgcagagctttgacgccatttttctctctctaaacctcttctttttcttctctctatgtttcagtgtctctctctctctctttcttttgtggttggtgttactattggcttcacatgagcgtgtcaatgagtctatccatgtggggtccatgggtatccatctagatcgaatgaaaagttgacacgtggtaaaatcttagccaaacaacgtaattttatttctgatgaaattacttggcattatagttctgtgtgttctttatttctttatataattgtaatcgtatgatgatgatacttgtaatcataattctggatcgtcgacatttggcaacaggtgttttattttagcaaatgatgcgtagcaaatttgtctacgaacttttttatatgatttataggttatgaatggaggcagcggacaaagcggtctaatttgtctgcggtttactccatctcatttttggggcggactataaatcgctgtaaaccaagtttatttgtatgtaaaaacggtctgcagatggtccgcagcggttttcttctattttttttggtccggaccactgcggactatttttgatgaatgataaaacaaaaaacgatctgatccattgacggttttgttcgccccaaccgtcgtaaccattcaaatccataagctgacacagagagtggttctattgcaaaataaaatgaaaaaagtggtgaagaagtatgggtagatgagttttaggaccaccaccatgaggagcaaacttaaatggaaacgatactgtgactagcgaggataaagtaaatggccggtgggtaggtcggtcactagtgggctgaatatgggccttatgtggaccattggtttctagttattactgatatattctgcatgtatgtgttttgttgttcactaaaatgcttatttcagcccaataactttatttctcaatttgctaaaagtcacaacacaaactcactggtttcacataaacttatttctttttttatcaacaaagaaatcaacgccctctagatagtcatcaaaaatacctcttcaaaatttcatggttaactgcaccgtaactattccacacataactccaggataagaccttataaatttttactatccttattacaatataaataaagacttatttcaaaattagtaactcgcatattatatctattgatcagattttgacatgtataaaatatatatatatgtaaaaccaatatatgcttctttttttactaataatttgttgtaattttagtattttagattatttatttattttttttttatttattttgaattatctaagattcatttatcatgcttctcatttctctattattctgatttaattgtgtcaaatcaatttttttggaaattttattagttaagcataaatcagaactagacagaacacaacaggcaataaaagaattgagagtacaagatgaagattttgaaaatcgcggtggactgatttctgcaaaaagaaaaaagaaaaaaagagtatttatgagaaagtgaagagaatcgtcatttattttaggctttgataatgaaataaaatgaaaaatttcactttcttatgaaaactctttttcttttctccataaatcaaacttctaccacgattttaaacattacatcttgtactcttggttttctcaaaataaattttatgttgtgttgtgtctgaccaactaataaaatttaaaacttcaaaagtaaatttgatttgacattattaaattaaaaaaaaatagaaatatataagcatgataataattgaaacttaaataattaaaatgaaaataaaaattaggagtgattatcaaaactcttaattagaaaaagaaaaaaaaacaatattgaaagtgtcagaatcatacatcatgaaaaatgtgtaaccgtattgatttgtgaaagtttgattcaaatgagcgttgcattaattatgagttatgatgtaggcagagtcgcatcgccgcgtcaggtagttgcagcaaatagagcaaattcatacaactgttccaaagtcaaacatattgaaactctttgaagccaatctgtgaacggacacatgtccatattatgacatcatctttctcaaattacttattttttcccaacccataaaagcatgccggcggcaaaaaccatgggagtcgagtcatcatcaataaatatgagttacgagcaaaactataaagtgaaaaaacataaattgatcgtgtcgtacactcgtactgtgctcttgtactattcttaaactagatgacttgaaagaaacgaacataagttttaataaaaattaaacattgcagaaatttaaagaaacaaatgaaaggagtgggttttttcgtttagattaaaaatggacaaatgattgaggccttgaatggttccaatttttgaagtagtttttttattttgattttgcaaaaactaaataattactcattcattcttctacaaaaagtagattttttaaaaaataggaaaactagattttaggagtttttagctatttcttcatagaatctaaaaactaagttttgtgggtttttaaaacaatttacgtaaccctttttttttaatttactattattatttaattatgctatttttaccatttatcaattcatccaaagataaaatacacaatttaaaaatgtttaaacattaagattaagtaaaaaaattaaaaattatataaatttccattcgagttaaaaaaaatataaaaaaatttccattcttgattttgcaaaaactaaaatccacaacaaaaatcaaaaacttcaaaaatcaaaaaccaaaattcaaaaaccgaaaactaaaaaccaattaaaaactataaaacattcaggacctgagttaaaattatgattaattttgcaaaaaatgacatgatagtaaaaacgcttatgtatggctatgttagcgtataggttttttcgttcagattacatgtgtggtaggtatcatgtaaagtaaaatgtcgtaaggtaaaataacatttatttatttttggtcactgatgtttatttatcgaattaaggaggtatacaaaaccggctagtataacggacttccggagccaacagccccatccagaagaaacataaaaacttgaaacaaatgaaaaacataattaaaccaaacagagaaactaatgatctaactgcaaaaatatcaactatctaattagctagaaattttgaaattggaaaatatgaaaatctaagcataacctctcaatcttcatgtctcacttgcttattagtagacttcaaaagtacaatcatgaaattccattagatcctaaccgttaagtttcgaacttgtacaaaagactgttagaaaaatcctggtaagtgatgtcgaaaccatcgactttaccggtgaaaggaatcccaaaccaaaacagatttcgcccagatttaaagggagcatcgagtggagaagcttaagagatggtcgtccataccgcttcaccaaccacaacttagacagttggcataggaccgatgcatatatagaccaaagaactctgattatgagaacagatactctgcagaaaaaccaaaagatcccagccaaataaagaaaaaaacaaacctaaaaacttaagccgaaccaacgtcgtggctttggaagtccacgaacgttagtcggagccacaattttgtcgaaaaaaatgaccaggagaaaaagagctggtatagagagaaaacttttcggaaaaaaagctctccgataaaataacattctaattttataaaaaatgactaaaattatgtaacttttacaaaataaactaaaaatcaacttccatttgtttacatatttcccatcacacaatatttttttttgttttttttgtttgctaacttgggtcattttgatttattttggacccaataaaaatcaagtgttttgaccagtaaagatgtcttcagtagtcacgtagacacagtgatggctcacacgttcagaacggaaatcactcccctggtcttggccaaatatatgctcctctaacttagagtgctaaccactcggccatgaaaatgtagctaaacttcttagttttacaagtaaatctttaagctatagcaggatatagatatactctcaaaactaatttggaaatattaatgatcaaaacaatgacacattgatacctttaatttagcaaaatatattcatataccaacatttatacatagaaacccgaaatttctcaacttttttgttcacatttactactctaatgaaaatttacaatctcaaggtcgacaaaaacagaggaaaactacttccccaacaaacaaaaaacaaaccgacaaaaacagagaatccaaaaaagtacactcttgagaacagagctcagtagtcagtggttttcttctgttactttagattccccattttgtccttctttcttctccatattaacacaatccaggcaaatcttggccgcgaccggagtggctaagaaggtagggttgttttgtccagccatgatcacaagaatcttctcctcaaaagccttagccaccactttctcaccggactccgtctgtttctcttcatcttctgtctgccgcgagagcctccagtaggagcaggcgagcaacaagagagcaaaggctatgagtccaagcatggcggctaaaccaccgaataggtaaggaaccggtgtacgccacggagaccgtgtctgagactccaccattgttgtcatcatcttctcatttatgtttcctcttatgcttggaaattgcctcattgttttatatttcttattcttggatttgttaaagaacagaggagaagaagcttgaaaattgtgaagcttatactttttttttataactgtgtagctagtttgattttgttggagtggtttgacattttatttatagtactggaagagaacaatagagggaagagatgtaataaatatttcacaatattattataaaacaaaattgaaggtaagtgggtcacggaatcttcatgatacgttacgttgctttgatcatgcaccaggttcgaagatatttaatcatacgtttttgcatttagatatataccttgatttttttgtttataaaatcctttttggataatcaaactttaagatctcaattccgtaatccctttttttatttgttaaagacagttccataatctcctcgtgtcagaaattataacaaaaaaaaatatgaggtagatatttgaaaatgtgatcccttttttgttcaacttaatatgtgatcttaccatgttatttatggcaatgaatttgtgattttttggataaagaaatcatttatgaagatgacatttgttgacaaaagacaactacaaaaatagataaattatcatgtttatttagaaaattatttattagtagaattgactgatctcttgaattccattgcgtcttgaaaaacaagcaatattgttttacttattcgttgtagatttgtttcatatatacatgatcgatcagctgaaagagtggccaactatacatcttaattgatcaatttagagcttcaaaatctagttttttggagtttaaggtagtctacaagccccatatacgagtaattttaagctgatttcttataagtgatataacagttaaaaccattacactaaagtatgagataatttccacatgatgattttgtaaattgtggatgcatatatatttagtggaggttatgcatattgtaagtagagtagtttgtttatgttttatgagtgaagatgatttatatatgttcttggtgttataaatgattataaatttaggttttgaatgattgcaataaaaaaaagcagagaaatgttttctatttttggaacggacaataaactgatgtaaatcaagctttttttctacgtaaaaacaatctatagttagtttgccgcatacttgttctattttttacacgacaacaaattatagttcataaatactaaagaaaagtagtataaaccggaaatgaattggaaatgaattggttcgtcctaactggcgcaactattcgaacccttataattttatcgacatcatatttgggagagacaaacagaaaacataattatatgattatttggatttaggaatattaagagggcccagctttgtgttttattcgggcccatgaatttcacatggccatttgttattacgctaagccagggatatgtgtcttttcgatggtgctatttggataatgatgtttgccgttaacagtaaattatatatgggtttactttttaatattccacaacaacaatccatagattttatttgtatccatagttggaagagaatatatttcattttttaatcatgtcgattgccaaaattgttagattaatatttgaacattaatataaaccatatatctacaatctctaaatgaataaactatgtctagtgaaccataagatggattagctcttattcttggattatgttatttttcttactcacttatgagttatgagtaatgtttttattcatatgtgttgtaatatccgaaatttgagagtttacttcataaattatcgaaagaattctgattatattgaactctgtttttcatacgtacatctcctttctgatgaggttttttttttggtaaagctttcatgttgattttaaatataatttcaattgaaacttaaatttgatctttttatattaatatagccacatactgacatacataattttagatacaactcacaaatcaataaatattagtcgtgagtacttgttaacgatcgaaaacttcaactgatggaggaaaggtaagttttaatttttaagctgagtacattaaagcattatttgagttgtgtgacaatacatgaatgagattatgagaatatattgatggagttggaggagacatgacaacttgaaaagagaattatgggttgttctttatcaaaaatataaatttatgcattgtcaacttgtggatatttctcccttgatattattattaggcaagtaaagtaaacatgcactttcaaaaccttggacccatttaaagatattcatgcatatctatgacattgacatacacacaaaaatgtataacataggtccatcaatgcatactacaacactatgcgatcaagtcaagctggccttgagttttaaaaggccctaagctaaagaataaaatggaccgattgaaaaaacgttaaatatggaaaaataaatctgaaggactatggttcgaacactgatatcttagcattgaccacattaagccactagactaaggagacatttttaaaatactgagaaaagtatgtcctagcagccgcaaatatatcaactctttgcattacgctctaaccagcaaatggagacctccatggcctttttaatcgctatatatggtttgtttctgatttcagcttacgatcaattctttcttttctttaaatcaataaattttacatttcataatgaaaaactatatatttcttttttatatgtacgtatatgcatgatgcacacacatactgacatacacaacgtaccctaatcatcttaaacttcttagatattttgtttcaatataaaacaattattaaaaggtttaacatgttagctttgagagagcttaggtttcacccaaatcggagttcaccttttaatgaatctctctaccccgaataaaaagtatctaccaccacgttatgggttaatttcttgtaacgcatttattttaatagaaatgcatgggttgccaaaaaaaagttcccatgataacatgtcacaggaaagtttgttttgttcataaatcataatatataaatgattccctcaaatctacttaatttagaaaaacgaattagaaaagcaagataaattattttcttataaatagattcttctaaattggaaatcatgtgcaagtaatccacttagatcgtataaattaaaagaaacactcttgtaaaaaacaaatattctattttccaccatcgcaaaagcatctgaagtttgtactctcctttcactgataagtaaacaacctgttggttaggccaaagggtcatctcttgttcatcacgactccatcacgtgaagaataaatatatatgtattgatgatatgcatatgcacatatatacataagaaccttttttgggcataatatatcgaacgtaaatgcatgcacatataatacctataatgatagttgtaacatgtagatgggatagtgattgatgtacgcaagccatagataaatagagatattgatttgtgattgccgccggagagattcgcttccatgtacgtgggagaggctaatacatttactgtgaagccagagaatatatttatttattcgtacaacaaaaaaaaagtcatgaaatgattcgagatctgtttgtgaatcaatgttagatacgaatatatttatgtcttcattgatgtatcgatctgtttatatatgactttgtgagacatcttcgaatcatatctagcttcgctttctttagttatattttattatattgattttgtgctttgttgaatataattagtgaacatgtctcctcagtctagtagcctaaacattcctttaggctttaggtatctgtgtgcacattttgtttatgcaaggaagaaaaaaggataaggttggaggttaatttcgcggaagaatatatcaatagatatataaaaccgcaaatataaacaatcatatataagatcagaattcagtcattgataaaacaaaacagtaaaagcttttttccaattttgatctatgtttttatgtagatgtagagaaatctatgagttaatcttacactatgtcgaaccaaaacgaataattcaatttacagtatactgcccaattgatggtacaagaaggtaaaaagaatggttgtttctacaaaattacaaatctaatttttaacaatagagaggaagaaaaaccgattagattgagagagactactaatctcaaaactttccctacttggccttcacattttatatacaattacaaacaagccactcaatctacaaacaaaacaaattaaatctctatattctcaagacaagtaatgtaacactcgctcagtttctgcaatactggtttcgaaataaatcaatccataccatttgcataacattcttctaaactctctcacatgcaccataatcagaacattacgtcagtatcgataaaaagacagagtatggattaaagggtaagtactgaaggtaaaagtgaccaactatttttatgtagaatttaaattatgtttctaaagatgttgtgaacaaaataaccatttaaagatgatacaaaatgaaaaaaatgtgaaaaataaagaaaatatggagtggggaatttttgaaaatgtttattttggtgtacgtaccccttttaaacaattcttatttcagttcgtcgttttcaaaaatgtttttcattaaatctgagtagcttataaggtatttttttatggtaaatagttggcatgcgagatcgattattcgaaacccaccgaaccaaatttgttagtttttaattgatttggaatttgaaaaccgaaattgtcaaaattagattacagttcggttatttatttttttaccaaaatgaaccaaaattttgtgacctttggttaaaattcggttagtttggtttaattggttttattttgaatattatgcacaacaaatactgggccaggccctttttaaaaagcccaaaaaaatctaggctacttttaaaaaagaaaaccaatattgcgccaaacttaaaaacaagtcaatactttaagaaaatataagtagattgtataagaaagtattcactattgtatcgttgaaataatatcatctcataaataatttcttttttgttaaaaatttcataaataatattactttctctttatcaatccgcactactaagatatatcttgtatccaaaaattgtctctaaagtctaaacacaatcagatagttcaagtaggacgaccataccactggacccctaactagtttccactacaaaatgaagttttctaattaatggtccagtcctcatcatattgcattaccaatttctgtatcatatattattattttttcattgaaaaaaatcgttgactataaatttcacacaaaaagtcaacatccttggctcgttacatcatttccacgttactccacgtaataaacacgagtattgttaacctcatgcaatttcgtagaaaaaaggcattatgtgttttttttttggacatttaatatatgtttaatttatattgaccagatcttagatcgaaatctaaatctaaattaaatataatctataactgttatatattcttttaaataactaaatgttttcatatattcttcaatatagaccaaaagtattctaactagggcaaaaaaacaattttcgtcaatatcatgtattattctcacggatttgaacacgggttgacatattgatagcattagtagcattggctctggtctatcaactaaataatataatagcagaatagccgattgatcgaataagggaaagcactaaattagataaagttaacacaacataaacacaaagcagcaaaatgtaattttagtagtaatgacgttttgttttgtttttcttttctagttatatattaacatgttcataaaaatagcagaatattttccaaaatcgtaaaaacgtgatggatactgtgaaatattttttttaaataatgaaatcacgttttaaaacgtgaaaatcgtatatttaataacaaatgttgaaaaatagataacaattattataaatttattgtatgttagatattgcatgattactagcacaccaaaaataataatctttttaagatctcaattattttaaacaaagattttaattttgtaagccagttaacaaaaaaaaattgacctttgtatttattatttaaatatttttaatacaacataaaataaactcatacttacactaaaaattcaattttgcttaagatgtttaagataataatttatttctacacaaagaaaatgtaaatgttatcattggcaacataaaaaaaaatcattgacgataaaattattgccttttgctctataattttttttgttccagaaccaagtattagtaatattaattaacgcataaaataaatatcactcccaaataaaaattcgaatttggattcaaaaagtcattctgtctcccaaaattatctttaaaaccaggtaaactataaccattgtccaaaaaaattactagtgggcctcaagagaggatatgttaaataacttaatttcaaatttgatttaagagtggcattgtattagtttctgttatttcatattcttttcatctacttcttgtattttccttgacatatttgatcatctcatgcttagttaccatttaacaatactcagtatattaaaaccaatatgcaaaagatatatatacctagcttatttaaaaaaaaaaaaagatacataatctctttatttttttcggggctagttgtattaaacgcaatttttttttttttttttttttttttggacacagattaatttcatttataaaattaaggaggtacacgggagagacagagagcctctttggcgagagcatcggcataccgattcttatctcgcgaaatgaaattgaaagcaacattacagaaggaagatgataggtgaaggatatcatagcatatcccatggatctccacatgagggagatccgaattaagggctttgactagtaataacgagtctgaagcgaaggagaggctggagaaagccgatgcaattgcaacttcgaccgcatgaagagttgctagagcttcggccatcagcggtgaggcaatattggtgagaactgcagaaccttgaagaacaattgagtcctggcggttcttaaaaacccatccgagtcctgctcttccatcaggagtccaagacgcatctgtggagcactggatcggggggaattcactaagtggttcagcgagaggaggaaaggtgatctggattttgagaatagatctctgggcttcctgccactcttttgctcttaaaatcgccaaaaggagcacttcttcagatgggatctgtttttggttgaagattagttgattacgagctgaccaaatagaccacattaaccaggggaagaggggtccgtcccctactccagacggtgggagacaggttagtttggctccgatgctaatcccttcttggatagagtgtattctgtttggattgaaattgcgatgcaccggggcgttaatccaaacttgttgtgcaaaggagcaggtgaagaagagatgagttgctgattcttcgagtccacagtgcgcgcaggccactgaatcattgatcttccggattcgaaggttttcacctactggcagggcattttgtgacgctttccatagtaacagctttgtttttggggatgacttaagagcccagatattagcccgccagttgaaatcaggtaaatgttgtaaagaccctaactcctgagtattctcatctctgtaggcctcaaagtagcctgatcgggcagagtattcaccagttttgtttgggagccacgcccaaatatcatctgctcctgttttacttggtttcagtttgcagattgtgctttcatactgaggtaggacttccctgatgagagagaggttccactccagagtaactggatgtctgagatcagctactgttaaatcttgggtcgcagctgtaggaggtcccattggggccaaagcctcagtaagagagagccacggggagttccagacggatgtggtagcaccggagccaataatcttgcctaaatagggtttgagaaggtctctaccaacgcaaatactgcgccagccgtgggaggctgcagcaggcacaaaacatttcaggaaaggggagttatggcagtatttgcctaagagtacacgagccaggaggcaagagggcttcgtcaaaatacgccaactaatcttagccaggagcgccgcattaaaggtgctgatatctctgaatcccaaacctcccttcttaaaagatagagtcattcgtttccaagaaatccaactcattttctttttctctgaattagcatcccaccaaaaacgagttagagccgattggattcgtttatgcatagagcttggaagttggaaacaagtcattgtgtaagttggcatagcagctaggaccgatttcagaagagtcatctttcctgctgaggaaaggaaccttgaagaccaacttagggctctttgcttaatgcgatcaatgatgaggctaaacaaatccttctttttcctgccaaaaagttcaggtaatcctaaatacttaccctgacctccctctttttgaatacctaggattctctttgcttgatctttaatttcttgttgagttcgagaagagaaggtgatagctgatttctctttacttatctgttgacctgacgccctttcgtacttttgtaggatctcttggagcttgccacaacttcggaggtctgaccgacaaaagaacatagtatcgtcagcaaataagaggtgatttacccggggactgcctctagcaactctcaaacctgtgagagaaccatgaacctgggccttattgcaaagactagacaagacttcactacaaagaatgaatagataaggggagagagggtctccttgtctgattcctctttcaggtaaaaccaaaccctttgcttgtccattcaataagaaggagtaggtaacagttttaacacactgcatgatccaagtaatccattgttggtgaaaccctaacctctcaaaaactgcttgaataaaatcccattcaagacgatcataggccttactcatatcagttttaactgccataaaacatttcttttgagctctagaggttttgagatagtgtagcgcttcatgtgttattaatacattgtctgagatagcacgctgtgggatgaaagccgattgattctcagaaatgcagaattgtagaagaggttgtagacgttttgctaataacttagagatgatcttataatagactgaacagagagctatgggtctgtagtctgaaactttttgtggactcgggatcttggggattagtctgacatgtgtgtgatttatctttaatggcaggtcaccagaaataaagaaagcttgtatttctgagataaccttatcccccacagaggtccagttagactgaaagaaactggctgaaaagccatcaggtcctggggccttatcaggatggatggaaaagcaggcttttttgatctccacagcatcaggcattgaaattagggtagcattcatttcaagggtaatacgtggagagagagcttccaaaacagtagagcacctgtccccttcttgagaggtaaaaatagtctgataataacttgaaacagccttgattatatcatcttcttcaaaaacaggggtaccgtttactgattctataatagagatattgttcatagcctgtctattctttgtagccgcatggaaatatcccgagtttttatccccaagagataaccaaagttgtctacttcgttgtttccaaaattcctcctccttattgtaagctaacaacaacttttggtttacctcagtaatttccccttgtacctctgcatcactgcacatcaaagtctccagttttagtcggaggtcttgaatttcttgttggctatttagatgctgggatttactccagagggagatagctttcctacaacaattgagtcgtgtatccactggagcatcagagttcaggttccaagcttcaagaacgatttgtttgatctcatcatttcctttaagacgtctgtcatatctaaaaatgctcttcctgtttctttttataggatcaaaggaaatgactagaggcctatggtcggagccttcaaaccggaggtattcgctgcgtccagagggataagccaatgcccattcactatttgccatggctctatcaagacggcacctaaccaggcgagaatgtctccggcctctccatgaaagaaagttacccgtgtgttttaaatcaaagaggtcaagagctgccataaaagaccggagctcagaaaaggaaccttcagaccgtggtggtcctccaactttctcagtcatatgaatgatgtcattgaagtctcctgagataatccagggggactctctgtcacctatgtaagctctcagttggttccaaacttggggtcttttagactggtcaggttctccatacaggaaggtagcagaaaaaagcctgccttttgcaactattgttgtatcaatatagtgttgacaggaattaacaacttccaattggatatttgatttccagaataatgcaaggcctccagctccaggggaaagtggtggcaccaagaagttagaggcatagcccatccagcttagggtctaaaggacgaagtcagagggattcttggtttccataaggaagagaatatcaggagagaccgttttacgaatctctctcagccgctggactgtcatggggttccccaacccacaacagttccaggaaaccattcttaaggaagaggggttgatggattctgaaaatccatcttgttcttcttagctgcaggtattaaggctatctttgggggcgcagtcttagaagaactctggtcaacagctcttgtagaggaaccttcaccctgagttaaagagacccttggcagattcttctttcttgttactccaaccagattggtgttctgtacttgctttgattttgaaacaggtacctttttgggggatccctggagcaagtttcttttctgtgatttaaccccggataactttgaaattggttttgtgggtggtttagccaaaggtggcctccctctgcctctcttaggttgagagtttaccaaattggccaggaccgggaggtctgcactaagaggctgagctgaagcttgagtagagttttgtatcaactcaggaataatcgtgccaggacacaaagccaccgcagcttcaatgatttggtctgctgtatcactcataaggttgcgtgcttccccttggataactctctgccttctagccgcactctcagtagggtcagcacaggtaacatactgcactgtaacttctcttagctctcccagaacttgatctctagaaggaatgaccactggtggggaagtagcctccagcgatccatgccgccagatgggtgggggtcccacacttggagggggaggggttactggatctggatcaaccacatctctctcaagaggaggtcgtctggttctagaggagtcagaaacagcctggtgttgctcagagggggtgggggccttttccctccaacggagactgtctcggagatcaatttttcgagaagtgttatggggatgggaatgtgacgtggtaagcggtctgtaatggttacggccttgatggtccgtgtatctactatgagagtttcttggtcccgcagcccctgaggatctctctgctgatctaaacccacgtctctcatggcgatggtcagaagatctcttatgtgggtttgaaacttcttcagagaaggtaggttttgtagaggatctttggtggctcactggtgccttgaaattatcccgaggagtgtagtagttcctagagtcccctttagagccaagagacagggccggaggagtagggattgcagacttcattttagaagtagtcaaaccaggacagagctttgtctcatgggagagtctgaggcagtggtgacaatggttcttgaggttcttataatccagatacacaagtgcttcactcccatcaggaaagtccacaatggtctctttgactaaaggttgtaagccattgatgagcagcttgaacttaactgtggccgaagttatttccatttccaagatctcccccaattcttctccaatggtttttagcatttctggttgccaatagtgcttaggtaggccctggatttctatccaaaagggaatgagggacgggaaggagtcagatataacaggctcccacttctgtagtatcaccatccattggtcatagtgatatgacctgttctccaggactttttgcatatcctcctcaaaatcaaacttaaactggaagcaacctttgcctagatctgaccctatggctttacctcgcaggttccacctattagagaggaaagggaatagagaccagaggcgttgcacagatgggttagtgagtcggcccatgagagttagagaattggcttctataagctccgaggtatccagatctggggctctaattctcttacggggagggggagagtaacctctctccaactctttcccttttaaatggaatgggattctcttatccatagaaacagcaagagcttttataaggttagggagtggttgaggttagttcttcgggtcgcaataaatgttcttgacaaggttaaaaggcttaaaaaggttttgaagaggtgtacaaaggttatagaagtatcgacagaagaagagactacctgaaggatgtcgaaacctcaaacaacctggtggagaggagtagagagcaggggaagagcggtggaagagtagaaccagtcgccggaaaatgcaattttgaaacaaagtttgccattgcaggtgtcggaccgctgaatattactccttttgggtgggaaatttgaaattagatctggttaaaagggtgcatcatactccttaaacacaatctcgacaaaagtgcttgggagcgttttttagaaaaaaaaaaacccctagtaattgttgtattaaacgcataagaccccaagtaaagtatcattggaccagcccttctgcgtcaaaatacttcagtaatacatacaaatcaaacaactcctgcgaaaacaaattgcaattacgatcacgttcgtcacccaagaagttgtcataaatttgagtttgtactttccgatatttacataaagttccaaatacgtgacgctggaccgtccctagttgctatcgtcgattagtgtaatctgtatctagtcgcatctcccacgttacatataatttacataattattcgaaagatcccaaataatatacttcaaatagcaattaaagaagcattattgtgtacataatgcatacacataattaaacgcatccttctttttttagttgaaatttaagtcttagtaaatcaaaatgaaaaatactataaaatgtgtctgtttgaatctgatatgcataatgctttttatggctatcataatcaaatacagaaattatacatgtaaaacgtaattgacaaaaaatgtgattatcttagtaaaatattataaaaataatgttgatgaagttaaatatatggttcttaattagtataatataattgtgattctcttagtaaactagtacaaaaagagtattgatgaagtattcaattaatagttaatacaaatcatgttcttcacttagacatagtcacaaattaaaacaaatacataaaattatttttctcgagatatccgaagtccgaacctataaattcgatcattatcccaaactcttatttcttttttcttttgcaagaaaacaattgtactcctccgcattgattacaagagacacacaataagagggaccgaaagatagaaaaagagtacattacacgagattccatatttttcatgtttttattacgtacgtaactgtatgtatatgtaccatatatagataacggaccattaattatttgaacatttacctcaaaaagcaaagtactctctctacttcattccaaccctatgcgtatgtatcttagtgtatggaccgatagacaaattaaatgtataggtagacacatgggctacagttatgaatgttacaattatttcatcaaaagcaaagtactctccatcgttacatgtacatatatacatttcttataattatttaaaacctgtttggtcaaaaggatagtgctcgactatacatatagccaaagaagagcagaaaaatcaaagtcgtgagttcagaagctataacaaaatttctaagaaaaagaaagataagaaaatggagaattttatggtagagatggccaagaccatttcgtggatagttgtaataggagtgttaggtttagggattcgtgtttacggtaaagtgatggcggagcaatggaggatgcggaggaagctgacgatgcagggcgtgaagggtcctccgccgtcgctatttcgtggaaacgtgccggagatgcaaaaaatccagtcacaaataatgagtaactctaaacactactccggtgataatatcatcgcccatgactacacttcttctctctttccatatctcgaccactggcgaaaacaatacggtaagctttcaataatctgataatttcaacaatttttgagactcttaattttgggatctgtggcaaatgtttttttgtcaacaaagtagatacgcctctgaatttgaataatgatagcacacaaggcagattagtcctttgttggtcgttttgagttagacgaatccatttttcggaccgatgatgatgcagacaaaacaaacatatatcttcattaaatcttgtaaatagttaacgaaagtactatatcattacacacacatacaaaagacactagttaacatgcatacgtgaatttatatattcataatacatgcgtgaattttaattcatacatatgtgaatactgattgacagctaagtcgtatatataatatatgtgtgtaacgtatgcatggattgacatgacacctaatgacaactaacgccgcagaatttaaaatttatgaaaagccaataaggttttgtacgatcgggtctacttgatccaaaagttaggagctgatcaattatatgataactcctcaatgattcattttgattcccttttttttatagtaataaatcgtaagatatattttaaatttagttttaaaataccaaagtagttgtcgcttcgctagtggatcgtttaatagtttatgatcggtcatattgattgagaggaaatcttaagtttttgattttcaccgttttctaagttggttttgagcatttattgtatatttattttgtatgagtaatttattgaaaaaaattgatatgttcagggagagtgtacacgtattcgacgggggtgaagcaacacttgtacatgaaccacccggagttggtgaaagaacttaaccaagccaacactcttaaccttggcaaagtctcttacgtcaccaaacgccttaaatccattcttggccgtggtgttatcacctctaatgggcctcattgggcccatcaacgtcgtatcattgcacctgagtttttcctcgacaaagtcaagggaatggtgggattggtggtggaatcagcgatgccaatgctgagtaaatgggaagagatgatgaaaagagaaggagaaatggtgtgtgacataattgtagacgaagacctaagagctgcctctgctgacgttatctctagagcttgctttgggagctctttctccaaaggcaaagagatcttctctaagcttagatgtcttcaaaaggccatcactcacaacaacatcctcttcagcctcaatggcttcacgtaagtgaattcaaaagtcatttctatctctatatatattttattaaggcagtgtcatgtaatggtgttaaattttgtggttgcaagtgatgttgtgttcgggactaagaagcatgggaacgggaagattgatgagctagagagacacattgagtctttgatatgggaaaccgttaaagaaagagaaagggaatgtgtgggagatcacaagaaggatctaatgcagttgatactagaaggggccaggagtagttgtgatggcaacttggaggacaagacacaatcttacaaaagtttcgtggtggacaattgcaagagcatctattttgccgggcatgagaccagtgcggttgctgtctcttggtgtcttatgctcctcgctctcaacccttcttggcaaactcgtatccgcgatgaagtctttcttcattgcaagaacggtatacctgacgcagactctatttccaacctcaaaacggtaatttacaagttacaaccttgcctctcatgtcaagttccttaaactctcttaaaccaaaaaaaaaaatgttccttggactccaagtatgactattttcataacctaacatcacttgaataaaaatataggtgacaatggttatccaggaaacgttgaggctatacccaccagcagcattcgtgtcgagagaagcccttgaggacacaaaactcggaaacctcgtggtgccaaagggagtgtgcatctggacgttgatccctacattgcacagagaccctgagatatggggagctgacgcaaatgaattcaatccagaaagatttagcgaaggagtctctaaagcctgcaaacaccctcagtcattcgtcccatttggcttagggacaaggttgtgtttaggaaagaattttggtatgatggagctcaaggttcttgtctcacttattgtgtcaaggtttagctttactctctctcccacatatcaacactctccggtgtttagaatgcttgtagagcctcaacatggtgttgtcattagagttctgagacaataagatatgtcgttagcttatggttttagttttaatcctgtgtaataataagatattattacactatagtactataatagtattttctttggtatctttttttttttgttctgtatatacagatttaccaatagtcatcgaaaaaaatcagttgtctactaaaagtaactagctagcttgtaacttattcattcgaaaaagaaattaaaaaactattcgtaactagcatgttattaaaagcctataaaacaaatcattaaaattaacaaatcgttgtagtttaaattactaaccttaattttattataatttatgtataaatacactctactgtctctacctacttatttgatagggtgtttttttttgtctttccttaaatatagttatggatcttgaatctacttagatttgtaatgcttttaatcattttttacactattagactattagtactagatatttagagtaaataacttggatttgctaaaatcatgaatactgattgatgaatgtttgagatctacattgtttctaagaaaaccgagattattccatagctttgtttaggtcgtgttaagttttcaaatataagtccaagaacaattggacagccaaggtcgtgctaaaagtatgtgggcttttcaagcgtaaactgaaccgggagtcccaggattgttccctgctgtgtaatatatttaatatttaataaaataataaatatctgcatttttattgtttcgttagtctaattgaacttatttgttcaaagtagttatgatttaataaactaaaattttggacttatttgttcaaaaggaatctggttgactataatatggttcaagaagtgaagatgcaaataaaataaaaagtaaaagatcctgaatagacaaaaagttaaaatggagagtttggttgttcatacggtaaatgcaatttggtgcatagttattgtcggaatcttcagcgtaggttatcatgtgtatggaagagcggtggtggagcagtggaggatgcggaggagtttaaagttgcaaggcgtgaagggtcctccaccgtcgatctttaacggcaatgtgtcggagatgcaacggattcagtcggaggctaaacactgttccggcgataacatcatttctcatgactattcttcttctctatttcctcatttcgatcactggcgaaaacaatacggtttgttttttaaatctcgtttagtacaaaatgcatacatataacaatatcaaaaaattcatttaaatcgtaaactagaacaacatttataaatctattaactacatatgaagtttcatttacacagtttttaagtttatgggtttgatattcgagccatatcatcgcattaaaaacaaaaaaatcccaaatgcactagtggttaaaagattaaaaaaaatatattgttttttgatagagttcaaactttttcattatgatttcaattatcttggcttctcatacattttaaataataaatccttcaatttttatggattttagaggtacttatcatttcaacttaggttttgaatggatcttgtggttagtgcggactaatccgtcagcggtgtaatccatattatttttggggcggacaacaaagcgctgtggatttagtctaaagacaatccacagttagtgtgtagtgttttttttttgtttttttttagtcccaatattaaaaactataatttatgaatggtaaataaaaagcgatccggtttgtaaatgttattattcgtttggaccgctgtaaccattcaaaagtttctcaaaaaaaacttatacatttttattagaaaattattgttcaaaagttaatgttcttcatagtagggtccatcccacttaaaaggcattgaacgtttcacttgcattcacaaaaagacagctttgcaagctttttctcagttaacgttacacgaagaaaaatccattaccagatagaagaaaatatcccatcaaagacaacacatatatagaataaaaatgtagaaacgtctgcatataggttattctaaattaattagagaaatatgatccacgcacatatttacttaattgaattcaatacaaataaaagttgtgcatgagcatgatgattgtgatttgggcgtggctgaacttgaaccaagtttgatattggtttggagtaatttttttttaatacaaaacggtaatgaaggaaggatttacacatactcaacggggttaaagcagcacctttacataaaccacccggaaatggtgaaggagcttagccaaaccaacacacttaaccttggtagaatcactcacatcaccaaacgccttaaccccattctcggcaatggcatcatcacctctaatgggcctcattgggcccatcaacgtcgtatcattgcctatgagtttacccacgacaaaatcaaggttctattcacattgcgaactaattaaagatatggatgtagaaatcttaatatatatattgatttgaaatattgttgtgattgcctgattggtgaatggtgaagggaatggttggtttaatggtggaatctgccatgccaatgttgaacaaatgggaagagatggtgaaaagaggaggagaaatgggttgtgacataagagtggacgaagaccttaaggatgtctcagctgatgtcatcgctaaggcttgctttgggagctctttttcaaaaggcaaagcaatattctctatgattagggatcttttaaccgccattactaaacgaagcgtcctcttcagattcaatggcttcacgtaagtttcgatatatttattttttctacttcttccatgcaaaactatttctctatataatatagttgagtatacggtggcaagtgatatggtgtttggaagtaagaagcatggtgatgtggatattgatgcgcttgagatggaattagaatcttctatatgggaaacggttaaggagagggaaattgaatgtaaggatactcacaagaaggatctaatgcagttgatactcgagggagcgatgcgaagctgcgatggtaacttgtgggacaagtcagcctatagacggtttgtggtggacaattgcaagagcatctatttcgccggacatgattcaaccgcagtctcagtgtcttggtgccttatgctcctcgctctcaatcctagttggcaggttaaaattcgcgatgaaatcttgagttcttgcaagaatggcattcccgacgcagaatcaattcctaatctcaaaacggtaatcttttatttataatcataaagaaaacgttagagaattttacattgaatgaatttatacacaaaatcagtgtataaatgtagcttattttaaaaatctaacaacattttattgttaatatatataaatgttataaaataggtgacaatggtaatacaagaaacaatgagactatacccaccagcaccaatcgtgggaagagaagcatccaaagacataagacttggagaccttgtggtgccaaaaggagtgtgcatttggacactcattcctgccttacaccgagaccccgagatctggggaccagacgcaaacgacttcaagccagagaggtttagtgagggaatctctaaggcttgcaaataccctcagtcatacatcccatttggccttggaccaagaacatgcgtaggcaaaaactttggtatgatggaagtgaaagtgcttgtttcacttattgtctcaaagttcagttttactctttccccgacttatcagcactctccaagccataaactccttgtagagcctcaacatggtgttgtcattagggttgtttgactgtgttacgtgatccgtagacttttataatgatttaatttgctttgtgtgttcgaatttcaaaagtctcttactttttttctctcttttctttttttttcagctcaaatctataaaatgatatatatactgaatccacaataattaaattaattttggtaagatgaaatttcatcattgcttcaatcaggatttattcttcttgtttcttgcgcaacaggcaattgctttctttttctcgtagaccatatatgctcacacggattagtaaccggcttaattttaagtggctaattcgagatgttactggctcgaccataaacacgcttttagtctttctctgagtcccttacgtggtggtaaaatctgttccctattcttagactgtcacgtgcagcatccagcggttcatttagcctgcgttcctagccttgatcaccacatgtttttgtccaagctcacaggttatctcattgtttatattcatcgagcgaaattcgatcaacgtacgatacttatggttaccaatagagaatattagttttggaatattatatgtacgtaaacatatacaatttcaagtgttacaatatctatgaaatgaatcatctttggaacactgattaggatttaaacgtgcaaacactatttaagttactaactgagtcgtcatcattgaaaaaacttaccgaaggtgggaatcaaaaggactaattgaataatgccaaaaatcataagatccgggctaggatagttgaggatgtggcggatttcaattggccatcatcatcctaggattcatagccaagctcactttcgatctcttagtttatattcacctagtggaatacaatgatcagtatatggtgggcgatagagtgactgatttcactaaagatcatgagtaagagatcaactcaggactataacacagtagtcggtagatagatattgcatagacaacttttttatttaagacttctcttagaattcctttgctaaatctttaatctcttgaatctttttaaaaagtcatcatatttagcaatgatcgggttaaaaaggtaatcataatggaacaaatgacatttcaaaacgaacttacgaattgtctgaaattttaatggatgtgatgcttaacctctccaaactaaactcggaaagaaaattgtactaaatcaaaagttaatataacgataatagtttttatatatatttctataatttagttagacgaaaattgaaagtaaggtggatcaaatgatctcacttttgagaaacaaatatagatcttctctgatgcggaaagacaaaaactttataatccaacaagccacaaggcccacaaggctacaaccatatttagcttcggaaccttgcctcattatatggctccatacactgttcacaaaggccattctatcattcctttttttttgttcttaattcttttttattttaaccttttcgtattggtttatttgggtttgagttaactcatataaccggtatgcttaatggcaatgaacaaaaaaaaattatataaccatagttaatgaataattgattgcagttctcatgtttaatttatagtttaatctcgtcatcgcattgatttgagctttcaatcaaatcttgagatccttcgttaaaagaagttgtttatgttattaatagattaaataacatttaaaggttaatatttatgtatgaaagatgccaagaaacttgtgtcttgatgatttgtttcgtatttgtcttgagattgtgggtggaagcattataattaacctttctataaagttttagccaaccaaaccaacattaccttttctttttctctctttaataatcaataacaacaataaaattgattactaaaatttaaagttttacatatataaaaatgaacaactaaattgaaaggagacgataataagagagggagaggtgtggacatctgaggatgattctctgccaccaagaagagcaaatgttatgattttaatttctaaattaagtaaatatgttgcacaaaaaaaaaaaaaagtatatataagaagacctcaacatcatcccattggccactttgctttgacctttataattctgacttttaactaatattaatcacgtttttttgttctaggtaaccttttacgtaattaatcatttgttaatcgtcctttctactcctctacctacctacaacttacaaattcgatgaatatttgcaaaataccatttcgtcacgatctttttttttgtaacaaaatagtttaatacaatctattaaattactttttctgactgtcttagaaacatttctatttcattattgggttttaaggaaaaataaaaagaacttatcgttgaagtttattattagtctttttggttaaaatgttgaaaaaattttttatataaaaaggagggtaaagaatgaatattcaaggatggcacgaaacttgtaatgcctcttattggcattataccataaatagatctaagacttgtgtagggtcagaagttaagtatagatttggtcatttataaaaagattctgtatcttttcatgtaagcgaggatatatattatctggactttcgagtaagaaaattgcaagttagatttataaatatccaaaatgaattatcaattggcaaattgtagcaaaagaaatgacattttaatcttgcataaagagaacggtatgaaaacaaaagattagttcaaaatatgatgtaatagctcccattgcccattggatttgatatgatatgtatataattaaattcaatatatttttttttttgctatctattaatatttaaatagaatattcctttcttttatcttaattgagttgtgtgacccactcacccactctatagatcgtcttctcaaataccgaagtatcgaaccaaaccgaattagctaaaccaaaatttatttataaacagtttgatttaattatataaacttgaaaccaaactaaaaccttttctataacctaacggaatatatgtaaatttaattaaatttattttaatttagaaaagactacgaatttaaccatatacatgcatatatttttatttattttaatttagaaaagactacgaatttaaccatatacatgcataaatttattttaatttagaaaagactacgaatttaaccatatacatgcataaatttttatttattcatatattgaggcttgagggtatcacctataagaggttttttaaaaaggagtaaatgtgctaaaggaaaatagaagaaaacagggcaaaaatccgaatttaatcgtttctactttttgtagtggggagttttcaacattttacttaattgaaaaccggacacattcttaagttatttaataactaaaaccggacaaaattcaaatagtatcaaataaacggaaaccaaactgagttaagaaaaaacgatctcgaattacaatttacaaacatgattttccatcacttgagtcttttgaataacagtcaataacaaattctaaatttttttttttaatattcattgttaacagtaacattagtaatgcaatcaaataagtacatgattggttgggcggtaagttatacctgacttacattcttaatttttcttaaaatcttaattacgtaccaatagtgttgtaactttacctttaaacttacagcctattttttttttctttttttttttaagcggttagaaaataaattctcaaacctatattttattagttatagaaattttaattcattaaataaatacaaaaaattaaaattattaacataaatatataaccaaaaaaaatatttactatattttatttttctatcatcataatatatttatttaaattagtaatacaaactattttatttactataaaaaattattacaactattatattttactaatccattttttataaattatttaaagtcgaaaacttacaacaataattctacaataataactatttttccttgacatctaatcaagtttgtacagcatatattaaaacatttgttaataaaatgaccaaaaaagaaaaactctcttagagataatcttatttacttacaaaaaatatatccctcatgcaaagaatatacgaatagatttttacacatctaccaatggtagtttttagtattgactttgtcaagtgtatcattaccacaaccctaaaagataccacttctttgcttttgggacaaatgtttctaaattctaatcctgtaaataaactttccaaattaaaaaaaaaaagaaaaatacagaaatgagaagcaaaggactagaacaagcattaatttaaagatattaattaccaaaatcacgcatacacatacacacacatatatatattaatctcccaaaagccaagagtatatattttatccaattatcgtccttatcatcttcttccttcaattttagttttatattaccaaaagaaaaaaaccttatcccttctctctctctttcttctttcctctattgtctgccatggcgatttctactattctctgagtctgtgatcttaaagatttgatgagacagaaacccagaaactgaaaaacaaaaacccaactcgtgatatttcgttccgaccaaatctgtctgatttgtgatctgaacaaagtacggtaatggagttgatggctaaaccaaccttctccatcgaagtctctcaatacggaaccaccgatctaccggcgacggagaaagcttcctcttcctcttcctctttcgagacaacaaacgaagaaggagtagaggaatctggtctaagtcggatctggtcaggacaaacggcggattactcatcggatagttcatcaatcggaactccgggagatagcgaagaagacgaagaagaaagcgaaaacgaaaacgatgacgtttcatctaaggagctagggcttcgagggttagcttcaatgagctctcttgaagattctctaccctcaaagtaacctactctgtttttttttctaaaaatcgtctctttaggttttttttttctttgattaaatttttttagggttcttgatgttacttgcaggagagggttatcgaatcattacaaagggaaatcaaaatcatttgggaatttaggagagattggaagtgttaaagaagtagcgaaacaagagaatccattgaataaaagaagaagattacagatctgtaataaattagcaagaaaatcgttttattcatggcaaaaccctaaatctatgcctctgttaccagtaaacgaagatgaagacgatgatgatgaagatgacgatgaagaagatctgaaatctgggtttgatgagaataaatcatcgagtgatgaagaaggagtgaagaaagttgttgtaaggaaaggatctttcaagaacagagcttataagtctaggagttgttttgcactttcagatctgattgaggaagaagatgatgatgatgatcaataattgctttgatgaaattgaatttttttttctttgttcataagtttttttttttcgtttctgaaaaaaaatataattttagtttttcgttgcgcgaattaatgtttaattttttgtgcttttaattcgggaaaattaatgatattttttttaatcgaagggagaaaaagtaagtgttttggtcctttcttttagcttatctgtttcttgtcctttttctctatcttctcattatcgattctgtttttgttttacatttttaatttagtgaaaggtcaagtcaatattgtttggatattttctagaaaagtgagcatgtgtgtaggtggtgcaatagtataataaccctagtctgaaaatggagcatgtaaattaattgattttagtttaaagcaatgagcaattttatcatgtaatgtggaagagtttaagcataaatatgtacaagggttagtttggtggatggccaatagagtttgtcacaaactcataagctttttatttgtaattgatgttttcttttttgtgggtaagtttcatcgaattttcgatacaagggcggaactttttttgtatgttaaaacatgcggagttatcaagaaaaggcagaaaatattttcaaatattagtaacgaaaataatgattaccttgaataaatggaaatagcatgaatgtattatcatttgttggaaatgataatatatcatgtcgttcacgctaatttacaaatgatataaatacattaactcaaattaaattggaaataaagagtttggcagagttaatgtctctgtgtgaattacgtttgaataaaacatgtaacgtatataataattacgtcatactcttttgttttaattttaagtgttgtttacgatttttcacacaaattgaaaaattatatttccgttttattatttattaatatatactttataaattttgaatgaattaatatcaagataaaattggattttttaatttaaaattatgtattggaaatctaaaatgacacttattatgaaacaaatttcaagctttagaacaatatttaaattataatggaggaaatattatcatatattggaaagtaaaagtatattttatggctcttcatagtaacgctttgacttaaattaaatcagaaatagaaaatatgatgggagtgatgtcatttgtgtaggcaattacattagtggattcatggattgttcaatgcatgttttgatagattttctaattttatccttgttttttagcttattaacagatgatatcaaataaaataatatattaaacaaagtaaaacagaaaaaaaaaaataataataatagacatgaaaaggtttaaacgacaactgatttaaaatagataaagtattataatttgttggaaaatgaattatatcatctcattcatgccacttcagaataacgcatgttttgactcaaattaaatcggaaaccgaaagtttagtaaacgccaaaggcggaggaagtaagagagcagaggggtcagctttacatcaacaatttttaaaataattatttaatttaggcatataactataattatacgtatatcattctatgtaaagatttacagtcttgaataaaattcagtttgcagtaaaaaataaaaatctcttatgaattgatctcattgtgaattgtttaaatcctttcttatggagtactttttttgttaactgagcatctatttatttttcaagtgtttaattttgtttatatgttttccatttttattacgatattgcattcaattttttttttcctttccaataacctcgttttaaaatctatttgcttacctagctttttccaatttttaaaacataattttatatattaaatatctattttttaatcaattttgtatattaaacatctatttttaaatccaattttatatattaaatcaattgtaaaaatatgataaattatggttataaactattttaaatttatattttgacctcgtcaaaagttttttttatttctgtgcactggtggacgctaattattgtgtgattatgttttcaaatatatatgatatatcatgatacataataaatataaatgtagcatgactcaaattaacaaataacaattgcatacaaaaaacttgttcgtagtttttaagttaaaacaaaagaaaattgcaagtaaatgaaagcaataacaaaattaataatttgtagataattaaatggtattggaacgaaaaataaaaaagcaggggaacaattaacacctctcgaaaactcacaacaatcacacttttatttttttaaaggatataatattaaatttaaaaatccaaaaaggctaaaactcgcgattgtcgtttgatttgatatgttcacaaaatatcctgacataaattttcataggttagagaagttttgctcatgtaaggacctgttcgtttataatattttttaaacaaatttaaataaatttataatatttttctctgcgatatcacaaacggtttgagttctactttaattaaaataattcttattaaattaaattaaaataaattaaattcaaataacataaactaattatagtcaaattaaatttgataaaactaaaataaataattttttttattaatttatttttctcatggtgtatgatatatatgatttatattttgattttaaaatataaattagcaccaaaaataattaatttaaaaaaaaaatataacgactgtttatagaaacagtcaaacgaacaacacagcgacaattattagcgattgtcgctgtaattggtcgctgagtccagcgacaaacaaacgaacaatgtatgttgtcgttggttactgtcgctggtcgctggtcgctggatccagcaacagggaaacgaagaggacctaagtttttttttttttcacttatgatgtgcaaaattgtctaactaaaatcaagaatatgtgatcagtcaagttttaacgtaaatatcaacatgataaaaaagaactatatcatatataataaatccataacgtaacaacttgatcgacaatttcctacattttatctttgaaaaccttatctccaatttgtgaagcactcatatatcattccagaacacatgtaattttgttttgaaatcaactcaatgcaattaataatactaatcaaacagcagactgctctggaccggtcttcctgatattggtcataaaatatgtgtataagattgtatgttcctttgccaaaaaaaaaaaaagattgtatgttcaataatgtttggattttaagaaaaaactcggtcactaaatttaatttggagaataccccttttgtagttgcttggagagaaaattatgttgttgaggaaacaagacgtgtagcctcttgtttttttttgttttttttgttacaacagcgattgctcatttgatctcgtcttctctttctgacaaatgttgggagaaaaaaaggaaaacaaaataaagaggctatggagctgacgaacacgtgtcactcaatgtcactaaatttgtgtcgtgccatttgtgttttgctttgttacaataaaatgtcaaaattgataggaactctcatgtgcgtgggacaaacttcctcattggaaaggaacaaaactcttgtatccttctatctcattatgtaataagcttatttggttaaaaaattagtgcaaataggatatatactagttattaggttaattacatattcagtaggagtattttacctaaccatatgttgatatttaacaataaaataagggtttatttatatatatatatatatatagttcaagtcactttcaacttgtagacaaatttatattttgaaattatagtagtactaaaccatgagtccattcggccactgtatgatgacctctcttccacgtgacattttttctgcaccacaacaaaagctcctctagtggatatggatgtgacgattaattatccttctttcgacctttatggctttgtctcattaaactataaagttttgttgcatatatgtagtaataatctcttggagttaaaaaaaagtagtcctcaagacttcaagtcatggcaccaaaataaatcaaatccattcaaacatatgattaggtgcatgtaactttgttcactcgaaaagcatacaattcacgagagaaaaatcataacaatggcaaaatgataattagtacagaaagacaaaaattaacatggaaaagctaaagatatgacattgtttttgttgttgttgtgtatgatatatcacttagatgcagcagtttcatagtcaataacggtttgaaaagctccagcaagagccaaaactttgttcttcctcgggttctcttgcatcttacttgctattacatcgttgtaagctgatggagattccttcttccctttcactacttccttcttctttccctctgctgattcttcttctttaaccttctccttttcctcatcacccttaaccttttccttctcttcttcttccaccttctccttttgatcatcttctttaaccttttccttctccttctcctcctcttccaccctctccttcccctcttctttcacttcttcttctttttcttgtgtagtctcttcgacactttcaacttctttgctttcagtatcaaccttctctggtgtctcattctcatcaatcttcttcttaacgtcttcctcttcttcacttttgttggcttggttattgtcttgttctttcatttcctctgttttctcttcgatatcatcttcattcttgatcaatttttcttctaattctgcgacgacagcattgcaatctttcccaacaggagaagcaaccggtgttggtccactactctcagccttctcttcaacggattcattggcttggacaaccttttcttgaacctctttctcttctttctcatattttggttcttctatatcatgatcagaaacttgtaaatgatcactctcgaccttgagaatctcctcttgatgatcctcctgagcagacgacatagaagcagaatccaaggcaatctctttatcagatgctttctttatcctaacattttcagagccttcctttttgctctttgaagaagtgctgctactgttcaaaccgctcttctttggcgccacaggaggcgatttcgcagtattacctccttttggaacgtttctacttccatggaaagacgaagagcgtagagctgtgacaggcttctctcttggaaccgctggtctgtctcgtgagcgagaaggagagacgttgagggatttttggatacgcggagaagcagaagtagaaggagaagtcaaagaagaaggaggtcgatcaaaagatcttctacggagaagcttttggttatcatcaagactattgttgttcttcttcaagagcttgcctgcgtcgggtcttgaactgattgttggtttcaaatagtttggcaaaggcttctccggtttctgatcagacgacccatcttctgatgacgcagtcgacaaaggttgctttggttttctaccgagagattttgttctgcttaggttttggttgtccggttttgcttttgtcgtgcttgacgtcgttgccataaccacaagaaatatagatcaaagagaagaaagaacaaacaaacaaaaatcttttttttttttgaaggaaaggaaaaatagaaacgtgtatatcaaggaaacgaaactctttggaagaaaattagggctttctataaaatgagaatcgattacttatgtgattgtaaaacggagcttaaatctcgcaattgcttgggtggtaatggtggtggaggccatcaatctcctaacaaatttaaaatcaaaaactaaattaacattataaaacgattccggtcgttatggacaaccgtggacttttttgtttgagccgtttctatttatatacaaaagacaccaattgttttgtttcttaactttgtctctctttttggttttggaccgtgtcattgtgtcaatgtcagtaataagataattgtccccacgtcattagcatgattaaataattaacaccacgtaattgcgacttacgagttaaactaaatcaacataaacagaaaactaaactaatttaattagacgaagattataaaaaaaattagaaatgggcttgctcaactctgatggagcccattgttgaactgttccaccattattctacatgccatccactcctcccaattccttgctcattcactctctccttttcaatcatttttttcttgtcgacatataccttttcaatcacttagattgtagaaaagtaaagttattagcagtataattttatgttaaatctcatgccacatggcgatagttgattgtgtttaatgatgaaatatctaaatatctgtaacaaaacaacatcaccaaaaattctggtggctatttgtgacactataaccacgaatggccacaatttttattttttgtcgtagcttttagctaagaaaaaatatgtagctattaacattttttgtttgtttttggtagtcgaaaggttttaatttgtggcagggtggtgtgaattatgataaggttcgtaccacctcttccattgttcccttgtgcatttttcttcttcttttgggtcccaattcctttatactattacaattttaatatttgaatcgtagtgatgtctagacttcatcttttaatatatttaagtaatgggccaaattgaaaataaaggctaattgagtctaagaccaacacaattttggtgatgattaaagttcattaaaaacccatttgaattgtagacttgtagatgcgtagactttatcttcctactctgatggtaaagtactatgtcatagacagcacatcatagtacttgtacccatcaatctcgtgcaatcaccaatcataacattctttcttccatgaaaatggtgcgagaagttaaaagattgctaaatttgaggttatacttccacaaaggcctgcttccacatagcatgatttgagttagcggtaacttaggttgcataaaatggtttgtagttctgcaagtgtttgatccgtttcattaaatgaattattgaagctcttgcattttcaggaatgcacaaacttgtacacgccaagttattattagttgtaggagtgattttaatttgttgatatagcgatatgtctataatttgcatgatttaggcatttattcttcaccactttgtcattgtttcatccacattttatctcattaggagtcgttttagtgtgttttacatacttaggacgattttgcattaggattgcatgtgcatgacatatttggttgttttcaggtactttggatgcttttggagttcaaacagaggaaaaacagaacatgaagtcaaaatgcccaatgacgccttcagcaaaagtactctatcgcagcctcggagccctggcagggcaaatcactctatcgcaaccccggagaagcaagcagctcagtttcactcaatcgcgaagccggaggaatcaccccatcggaaccactcgatcaccactcgatcaccaggaagcctatctgctcattctgcactcaaccagacaagctgagaacaaagaagagaagagaagccgaagaaaccactcgatcaccacctcatgacatccactcgatcacagggtcgctggaccattcaatctcgacttcactacatctcactcgatcgcaagaccgagcccctgaagcccagtttgatcaatgacatactcgatcactaggaagctcatttcagcccgtcagatgccaatgacatattcggtcgcaggatcatgacgtgaagattcgctatatatttagtttcctattttgtttcatttctcgctatataaactgcctcttagggttttccctagggcatccgctattatccgttatttatctcgcttttacattttcgcaactttgatagtcgcaatgtttctcctgcgactttgtattttcactttcaagtatttgatattcagttttcgtttaagtctttcatcatttctgttatcatgttttcaatcgttgctttgctattgtctttgattatgtctgagtagtgaactgtatttctgaggatgggatagattagttgtggtttacttggtcgttttaggtggttgagtttagaatactagaatcccttctgtattagttgcgcttattgcttgtttcactggctaatgtggaatatgagtctagacgtctagcgctcagaaggcgtttaatgggcgttggatcctattaattccagagatatctgattctactccaagggattggctgtagagagggtattgactttaacatgttgattcgataatgcctgcttagttagagatcgctaaagggatttaggtcagtgtctagctttgcttgacgatttctatcacgagcgtgaattaatttgttgttgaacttgttgtctagggatagcttctgtgaagttttgtcaaccgcctgaatagattaagaagaccacactgttcgattaccctatccttaggaatcatttatccatttgattgcctgttatcatttctgctttgtcattcacttgcctgctattgccatttctgcttttagtttcatttcatttctgttattgcatactaggactgttagaaccaaccaactttctacttggcttgacttagagctttctgatcatatctcatctgtttgcatcacattggattgacatcctaaaatactacaacgacaagatagtgttttaggattaattgagtaaaatcctactatcatatagataaaagcatttttatttggatcaagagcgatctagacgggaatgcgaaacttagattcaaccatgattttgattgctaaaaaaatgttagagatttaggtttgaattagtgttcttatactatatatgtaaatatttttaatgtattttttttgttattattgattctcttttgttagagatttaggtttgaactagcaatgatgatttacaaatatttaccaaattaataatttatgatttctgtgtactgagttgattaagactagaaaatgcaattatgctttcatataatagattaacaattttatccaaaaaaaagctagctagtttttttttttttttttttttggtcgtagctaactagattaactaaaaaaaactatagttcataactttgaaagagaaaaaaattctcttttatgattctaataaattttcaaaaaaaagaagttaaaaagtgcatttaaagtaacatatgaatatgactatataactcaaaagagttcgtgggaaacatctcttcacatgcagttgtattatattaattaattttgtaacaaaagagtggcatatgaccccatggaattgttcgtaacgtatctttacaaaatcaaactatattgtttgtagcgaaaccatgttttttctgtaaaccctaccaacattttatattttaaatttttatgattatgtgttgcttgcttgcatgcttctctctctcgatgttaggtactagactacgagagaacaagaagtataataatatgtatgcaagcaaatgcaacacatacagatagaaaaagacgtatgacgtagaaaagcagctttaggatgattccaaaacttgtttcttcaagttgacatttttgcagataagtgttaagttaaccctatcacgtctggtcgtgctggtgcgtggtcctcacgctccctcaatctcctgtgttttctgaaaatgtaggcccattttgctttgacttgggcccatttaaccctctcctcatctttcaatcttccaataaacaagtttttttaattaaggaagcaatgacttttgatgtctttaattagtattttattctgttttttgaagtttattattataattggtttcgtttctatcatggatgtggatcttctttgtttcttctcttcacgtcgtctttcctttaatagttacatattattttaagttatataagaaatatgaacccctttaaacatggagaccaaatagaaattatttgattattattacctcaacaaataattttgtcaatttttttggttgagaacgacgtttttataacaaaaagacaaaaaaaaaaaattgttcatattacactcttcttatcatctttattcttcgtattttccatacagttttattttattttattacatatatatttttaaaatgaaaaataatttatatgattttcttaaaaattgttttaatatgtgtattgtttgattatgtatgctaaaaaatggtacgtttctatatcatcttaggcgtattagttagtgtttagaagaattttcttacaagaatcgtgatcgtttaacgcttaacgagttcttgaaattactattactaattttgataatatgagtgctatttatcaattaatcttatgtttccttaaactccctttttaacttttttcacgtagttacaaaaagaaataaatatatattagtataaattaaaacatatcattccgcgataactagcaacggtgccgtttcaataacctctctcatgtcctttcgtaactcaacgaaacccaaaatcaacggctcagatcattccgacttctgtttcgcctttgctacgccacttcttcttcttcttctccggttttaaattaaaacctctcacaaaattattcggaatattatttcttcttcttcttcttcttcttcttcatcatcgcatctctctcacttcacgttttcttcggtgaagagatagccgccggaaaaagttatcatctccggaaatttcgctctttctttacggtaattacgagaaaaacaaaatccaaaaatcgtttttttctatttgatgattttgccttcgtattcaatattgtaaagttttgttttttccgttgtttaattacgtaaattcgataaaagtttcttcctttagattgaatttttctgtttctatggcttgagaactagtttcgtgtggttgtttcttctgattcttgaatttgattgagaaagtttatatctttggttaagagtttttttgtttgtgtacgttttaaaatccatggagaagcttgaatcacggagaagactagtcgtattaatggaaactccgtgtaaatcgaatgagcttcttcttttggatggttcttcttctctttagctttcctcttttctctctttttggtttctttaacaatctctgacttatagcttttgaagcctctgtttgtttatggttatatcctctctgttcttctcatttctaaagactgaattttgaatggtaaaagatcgtgtgtgtgtgtctgtatccttaggctttgatgcagttttctgaaaatttgaactttgtttatatgttgcagtgtttgagggtgtgttttatgtatggatggatttaagggtaaaagaacatctagaccgattatgccacggaaagcaagtggtcttgtgttacatgagaatatgaagaagaaagatgataagagtgttgtccctatctgcagtagaattggttgcagttccagggttagttccactaagggagatttgattgatcataaagcaaaagctactgtgtcttcgtttcgatctcctttgagtggaaaggaaaccgttggtagttcatctcgaagtatgagtggatttggtggtacaaaaaaggcttccaaggttattggtaggagacaactctcttctcttttggacatggattcttcagagagcagcagtgttaatgaagactcacccacaagtgagcgttcccttcctcgtggaaagacaaaagaaagcactattagtgttcattctgaaagtagtgtctctggagaagttgtgacagaggcaggaagctcgagtagaggaactggtagaagcattcatcagagacctgatttggtctcccgagatgctcgtgtgagtaatagtgagcaaaatgcaagagctagtgtgaacaagaatggattaagagacttgaggaacaaatctggttctgatgttcttccatctaattcaactccgacaagaaaaagtaacatctttagaaagaaaacctctgatggtgagagcagctcttcgagtagagggaataagacggaaggatcagtggttgggggaaagaatattagttcccctcaggggaatggcatcaccatgtctgaacctaggaggaacagaaacttaccaagtgttagggacaacagtgttgtttcaagtagtactaggagatcaactggttattatggtagaacaggacgtgctggagcggttgcaacactacaagcacctcggcctccaacaagagctgatctcaatccttctagatcggcagaagcttcgcgtagtcctttaaatagttacagtaggccaatcagtagtaatggcaggttacgtagcctgatgatgcctggtagcccctcagaagccggcctttctcgctctttgatgaaccgtgatactttcagacggtataacatgaatggagttgcagaggtagttatcacaagctttcttgtgtgtgatggtgttccagcttcttgataacaacaactcaaatacttttttcacaatgtttcaggtattgttggccctggaaaggattgagcaagacgaagagcttacatacgaggtgattttatcatctttgaaatgcagaggttttgtctgactttagagttttatattgacacacttgttctgcttctttatttcctcttgcagcaattggctgttttagagaccaatctgttcttaaatggtatgagcagcttccacgatcagcatagagatatgaggcttgacattgacaacatgtcgtatgaggttagtcttaccttttgtgtattttggtggatgaccgtcaaaggctaaaattcggatgtgaaagctaaaattctcaaaatcatgcaggaactgttagcattagaggagaaaatgggtacagtgagcactgctctaagcgaagaagcgcttctgaaaagcctcaagtcaagtatttaccgtccaaacgatgaatccgacgacatttgcctgaacaaagatgatgatgtcaagtgcagcatttgccaggtattataattctctctgatccctgagtcaactttcaatggtaaggtattgaaaactcaaaccaaaagagggttttgttatatttgtaggaagagtatgttgatggagatgaagtagggactttgccttgccaacataaataccacgtgagctgcgcgcaacaatggctacggatgaagaattggtgtcctatatgtaaaacctctgcagaatctcagccacatccattttcatgatgatgggattgcagagacatttaccaaagtgtttgtgtctacttccactaccttgctctctattatttgtacataaaaggttttcttttttacttacacacaattgggaacaaatagaaaataagatcaggtggacaaattattgttttcaccttgtattggttcgtaatttcaacaatatttggtttaattccatatatagtttatatactgttattgcactcttcatgttcttccacattcggctccggttaaaggaaattatatatagaatcagccattgttcagcaagtttgtgtttctagcaaccacaatattcaaaagtccttttccatactaattccttgttctctcttttttttttttggtcaaagttatttcatgttctctatatataatatggtagaagaagcaaatgtttttttctttaatgtgttgtgaggagatacatttcttagaagaaataagggatcctctaaaaagctaaatcttctcttctcttttgtcttttgtaatataatctccactcttgtacaaacattcagtttcagaagaatctcactgtgaagacgttttcttttttgttgcaataaagttatctatttcaacaaagaaaaagaaaaaaaattgttcaaagaaaaaaaataagacagacatgcatgattaatcactagtgttcccattttctcacatattcaacatatttagtttgtatcaagactacatgattttgagtccattaaacccagttcgtgtaaattgaagtagtatgaatttacacgtaagacttatagtatggatttcattgctcgtaagacttgtagtacgaattttgttttctcgtttgtaagcatttctctgttaaattagttggttatggatgtaagtgacacgcgccatccttcgtgtggtgccttgaaatgcaattgagtacactattttaaaaatggaaaaatagatatcaagtaaaatggatgcttcagtttttgtaaaataaccaaaaagaagttatatatgacaatcagtattattataggttatacattcattaacacagaggttcatggtatagacgatccaaatagccatataggtatgtattattgattaccggtttaaaatgtataaataaaatggaagttaattgaataatgttttagtaatgacatgtcgaatcgtcaatcagtacatgcagtatcaaggcagactgagatgtgatgtctcctaaactagtttttcaaagtatagcctaagagtactagcctagccctatcttcttatggacgacgacataacacgtcgacaatatcaagagcttccacaaatctatgtctctcaccaatcaatgccgaaagtttttcacatagcagcagcgtacgaataattgtcatcgacgaacactcgtacgtacacacacatatatatacaaagagttaatgtgtgtgtcgatgatatataagctcaggccacgtgagcaatgctcctagggcgtgggaagtgtttctcaaagcaatgtctcttaaacacgtttcacactctcattggttcaactagaagctgacaatgctttgttcacgtgatgtactcatgtacactgtggtggtgagtgtggtctataaggcttacgtttatgtgtatgtttttgacaagccttgtcaatcatgagttcgacgatgggattgcaaatcgtatggaactatagttggttaaaccaatacggcataatcatgacattcatttcgatgttttcattgtagggatacaaagcaggacctactaggcccaaggatatccataacctgtatgaagattaaaaagtgtaattaatcatatatatagtgtgtaggatacttatataaccgttagtatttctagttttcttagaacccaatgataatgaacatggttggtttacataatattaaatcttctgttacgtgagttatgtgtaaaagctaatgattaattatattcttcattatttagaatttccataataaatgtacatttatatttatcaatgcatgcttatatattaaaattggggataaaaatgtacactaaagtattaaaaaaaacaactaaatttatctttttacgaacaaattaccatatgggagcctaaaagtgtagaaaacccctaatggtagatgtgcatgtatagcctgcgaaagtttttacgtaatgtcttttcgacgctctctattttttttttttttaacatcaaatttccacgctttatcacaaaaagccaaatagataaaaaaaaataaaaaaaatcaaagaactctttttatgaacaacaacaaagttaagaggaatcaatatacattaacgaaaccaacttcctcaagcctcatgggtcccaaaaatattccaataaatattcttgaggaaaacaaatttgtatgttactggatcacctgataatctgtaacttttatgatagatttttccattgagctgctttgaatttgagatatattaggtcataagttcgtcagtaacactagaatagaaaaaaaaaaaaactatccgttaatatggcttttgattaattaaatagaagatagaaaacaatttggatccactgagccaaagagaatatctttcaattacaaccagtgaagagaacaatcatgctaaggaagagaacaattaattttgaaattgagttctccctaattcatgtcccttcttaatctcaactttcatcaaaccagaattacgtaacacaacttccaacgtccaaaacaaataaaacatgcacatgcaactataaaacaaaacccaacaaactctaaattataaaacaaccgaacacaacacacacaccaacacacaaaagaagaatcaatgggagtctcggacatggaagtaattagggttcttgacgacgatatcgtacatgtaaacggagttgaatttggtgaaatctctaggcagggaaatgagatcaatggaggagcgtttgtggaattggaggagatctgtgtcgccgccgccaaagtatctctcccatccaagactctggaggatctgctcgagcgtcgagtaagatgagaccacttctcctgtcggtaaatagaccatcactttccttcggttctgtgtgtcggatcctgactggttagggttctccacaagtcttatcactccgttcttgaagacccacacgcctgacatgatcttcttcttcctctccttagttttggtttcttgaatgatttggtgttttttgagaagagagttgtgtgtggagatgatattatatagaagagggtctaaccacatcaagacaaaaaaatatctttttgacgtgacaaatagaatttgtttacaattataaccagcaatgattttttttgggaccattggtgaaataactacaagatgaataaaattagcgaagcaacgtgttgattcttgaattatggtcttgtggtgttgaagtgacgaaaatattttggtaattggtatcatagtttggtgttgatttgatataaaacaattgaagcgagttttggtcaaatgtttcatgaaaaaaaaaatgcttgtcatctgccaaagttagttcatcaatattaatcaggttacagaaaatgaaaatgcattagtttttgaaaaacataggataaacagttatataggtgaatatattactataaattttattcatttgtttcaaatagcacaacacgtcaaagtctagatatatatattgtggcttggtgaaggttgtttctatgtcgctccctggataatttagatattctagataaatctactttcattatttaattttttttggaataccatctcacattcctcaatttattttttaagaaaactagtattttactatttttatatgttttgtagaattggttcgaattctgattttggtttctaggaatctttaaagattttaagcactagaataaatcttatggtaggtattttttattatattattcggtactacattagtctaagggataatttgtttatctcaaaaaatttcgtggagtaatgtgataagatttatgattaatttcgtggagtttagaattcgtggagtaaaaattaatttcgtggagtattcgataatatgatactacattatattattcgtttctgtctaggaaacttgcaagtttggttgtaacatttcacgcatgtggtaaacacattttgaatatttggagaaattaggagcagtaacaatatgtaaaacataaaataagtcttaaccacaaatttatacgatcacaatcttccataacactaccccaaaatttaatgacagaaaagcgatctcatataccattttcaccttctactccccccttcttcttttttcggtttcatttaaaaaattgatgtatttttgtataaatctcttcatataacttgatataatcttctgatcctacaaaacaaccactatattttttctcaaccaagtaaactatatttgtctaggtattacaatcgaacaattcattgttcaattaatgtataattccgtaatttcgtcatctcattatgcgtacaatttttttctttctatcttaaatctgactgttaaatttcctttagcatcctttccgattcgagcagttataagcacacttttttgtgattaaacattgtcatccttcacgctagcttaccttttaaacgacaaatcagcaataaataaaaaacatggacaatgactctaatggtggagctacatatatcgtgacgaatcacacatgtaagagaatcatgtgaacaatagtggtaggcgaatctctatctcttaatttgattcttcaaaataataattaatgattcgatattaagccactttatcaacatttacttccctaacatagatatatgattctagcacagccaatcgatcattgtattagtgcacgcacacaataatcttatgcgtcatcggtcggaatgcattttttatgttgcacaagattaattttcttcgatgcgtagaattttagtaacattgtttatatgtttaatttacaatattactttttttgtagattaaaaatacaatcacaagatttaatggaagtaataactaattgaaagtttagagatgcgggaacatttatacaaaggagcgcatatagatgctccaagttataaaattctttaatattttggattagatgaaagaataaaagaagcatgtaaaattgtgtctaggtacatttggtttagtagtaattagatttgggacaagatgtataatcgttttttaattagtttgatctttctaattaataaaatcggatgtccattgagaaatacggattgagaccatttgtattgccgatggtggtgttacatagtttttgcagaacaagctcatccatgtctctccaatccggtgccaagatctagttggaatccatgaaccaaatcttttttgttggactgattcactcttagaattaatcaaacaaattaaattggttataattttcgaaattctagtcctcggtaaatcccatttcgttgctaacctagaatttccaaagttattaagaagcatgtaatagtcggtttatatatataaaggatttgttttaaatataggtctaagccataaaaacaaacccaaaattctggaatcgaatcaacctaaaataaaagtctagtttggtattctaaaacatttgttttgcggttgggttggatacgaaatctgaaatccgatacccgaacaaatatccttaaattattatttattattgctactttttatcatgaaacaaatgaatttatgttactagaacaatgaacttttttgtgtaattcggtccaaaaacctaaccaaaataggtttcaattctatgtcggaatgaaattaaatttcgaaaaccgattcgaacctgacaaaacccaaatcgacctatatagatcataaatctccctatttgaattattccaaatccgaaaaaaccgatttgaaaacctgaatgcctaaacctactttaaagttaaagaagcaacagtagccataagaagacccacaatataaagattgaaagaacccaactcgaaccaacaatgttcctaaaaatagaagcccataacctagatagagcccaaacccctaattcttcttcatcgacaacatgcaataaactttgctcttgctcgttagatctctcgctccaagtccaaatttctccataaagatgaagactattagagcatcattattgatgatctcttaaaacaattcttatgttaagaaacatgtcttataactaacaaaaggctcttatataagagacattaagtcacttttgttagttataagacatatctcttaacataagagttatgttaagagaccatcaataactatggtcttagtgacatttgagaagaggagcagccaaagaaatttcagatcacatgttcgattaccaaactactaaaaatagagactgtagagtatagacttattcacaaacttggaaaaaagattaagtttgttttatattaaaggtgaaaacttttgccaaataaaagcaataataatgtgtctcaaaaaaaaaaatcctttttttttttttttgtgcacccaaaaaaaaaaaaaaaaagaataatccttaacattctctctcacataagctttttgaattagacaaaaaaaaaaaaaggcactagtcaagtttttttttttttgtataacaaaaacagagacagatccagacaaaaggctagacatccaccacgtcacgcttcccaaccaagtgacacgtgtcgcatccacaactcgtcaaaacacaaacaccaaaaagtagatgacgttacaaagcatcatccgtaaatggcggcttcctctctctcgctctcttctcctctctcaaacccacttcgcagattcactcttcaccatcttcacctctcaaagaaacccctttcttcctcttctctgttcctctgctccgccgcaaaaatgaacgaccatatccaccgtgttccggctctcaccgaggaagagattgactccgtcgccataaaaacatttgagagatacgcattaccttcttcttcctccgttaagagaaaggggaaaggagtaacgattctctggttcagaaacgatctcagagttcttgacaatgacgcattgtacaaagcttggtcttcctctgataccattttgcctgtttactgtctcgatcctcgtctctttcacactactcatttcttcaacttccctaaaaccggaggtaatgtttccaatcataaaaatcaatccttttttgtgatcttgatcactcaatctttgtgactatgttttcagctttaagaggcggttttcttatggaatgtttggttgatttgagaaagaatcttatgaaacgaggattgaatcttcttattagaagtggtaaaccagaagagattcttccttctcttgctaaagattttggagctcgtacagttaagttctgtttattgcttgtgttgaagaaatttatcagagctttgtgagggaatatgaaaatgtgatttgtttgttttcttaggtttttgcgcataaagaaacgtgtagtgaggaggtagacgttgaaagacttgtgaatcaaggtttgaaaagggttggaaatagtactaagcttgagctcatttggggaagtactatgtatcacaaagatgatcttccttttgatgtttttgacttgcctgatgtctacactcagtttcgtaaggtaatgttcttgtttcggttggtgtgtttcttgacacattaggagtgagtatatgaaatgctgaaaggtttatgatatttagtaccagaatttgtagtataccaaactagatttatgtttattttgtttgataccaatgtttgtttctggttgaaaattcgcttgcagtcggtggaagctaagtgtagtatcagaagctctactcgcattccactatctctagggccaacaccttctgttgatgattggggagatgttccaactcttgagaaacttggggttgagcctcaagaggtgtgtttctctgagaagctcttttaaatgaaacgagagaaaaaagaaagtaacaacattcttcatgagttagtgtctttgtattcatggtgttgatacaggtaaccagaggaatgcgattcgttggtggtgaaagtgcaggagtaggcagagtatttgagtacttttggaaaaaggtaagaggataatgagctattcttgtgtttcttattggcgttgcttgtgtgtgtacataatgttgtttgtctcttttttcatgcaggatctattgaaagtatacaaagagacgaggaacggaatgttaggacctgattattcgacgaaattctctccttggcttgcctttgggtgtatctctcctcgttttatctatgaagaggtaaactctttcaaaaccgtaattcgttaccccaaaacatatagcagtctttcacttatgtgacaactgaaaaaatatttcaggtccaaagatatgaaaaggaaagagtagcaaataattcaacatactggtatatcttcatatctgagtattgtatctctactgcattctctttactcttggtcctaattgattagatatatgtttccagggtactttttgaactaatatggagagattacttcaggtttctttcaattaagtgtggaaactcactttttcatctaggtaactatgctttcgaattaaagctcaatgcaatgttgttacagtgaactttttaaatagcgcattctcttcgtaggtggcccgagaaatgtgcaagggaagtggagccaagatcagaaactatttgagtcttggagagatgccaagacagggtaattatttgatgttgtggtttttttttttgaaagatcaacaaagtaaagcttgtggacctttagtgacttctcatgaatggtattaggtatcctcttatagatgcaaacatgaaggagttatccactacaggtttcatgtcaaatcgaggccgacagattgtttgttcgtttcttgtccgggacatggggttggattggcgtatgggtgcagaatggtttgagacatgtctattagactatgatccttgttctaattatggaaactggacctatggagcaggtaagtactactcatgacacagtttgtgacttgtggttttcaaattcaacattgagaatgagattgaaatggaaactttatagatggttgaaatctgtttttcttaccattgaaggagttggaaatgatccacgggaagaccggtacttcagcattcccaagcaagtgagtttcttttaacacaagtcactagaaatagtaatgaagaggatattgaaaatgtttatgattggttttgtttaggcacaaaactatgatccagaaggagaatacgttgcgttttggctgcagcagctacgtcggcttccgaaagagaaaagacattggccagggagattgatgtatatggacacagttgtgccattgaagcatggtaatggtccaatggctggagggtcaaagtctgggggtggcttcagagggagtcacagtgggagacgttctagacacaatggtccttagagagaaactattctttacacgaacttgtatcttatttttatttctgtgattcttcattcttgtgcacaaggatctctgattctctcggtctaaattacattgacttaaaaaattcatactccaaaatttctaaaacattatgcaacttaccaatagattcagtcagtttgtaaaaataccatttggggtagcaaataacaaaagacttgggttcttggtcttgcaaaaagaggttagtcagtgaatgtaatgggctggaaagaagcccattaagaataagttatgggtttgggtccatttagaacataggaaccctaattcttcttaggcaagttcttctctctgcttcttctctgagggttagttttcgaagaacgacgagctcgagattattgattttcaagtggagattgaatcaggtaaatcctctcgaaatctcacttagtctatttcttgtgttcgtattgtatcatataactatgaattcatgcctttagtttttctcatagccatacttgctctctatcttctcagtgaacagagactttagagaattagggtttacggtttaggcatttactgggttttgcagaagtggtcttagtttattcaaagttcgtttctttcacaaagtttaagctagattattagatctcagatgaatcaaatacgtatttgttattcgtaagactctgttttgattatgtcactcactgttattgttacctttgtgtggtttagtgataatggacaatgagacgaaagcaaccaccttcagcaaatcaacagggcttcctaggaagagattctacagagcaagagctcatagtaacccacttagcgattctcacttcccaatccccatatctccagctcatgtcgactattcacttcacttccccaaattcgttgaagctgacaacaaattcatcaagaaggttgagtttgcggatatcggatgcgggtttggtggcctactaatctcccttgcgacgcttttccccgatacgctaatgatcggtatggagctcagagataaagtgacggagtacgttaaagaacggatcttagctttaaggagaacaagctcggagggacagtatgagaacatctccgttgttaggacaaactcgatgaagtacattccgaattacttcgagaaaggacagctttcgaagatgtttttcctcttccctgatccacattttaaggagaagaatcataggaggagagtgattagtactcatttgttagatgagtatgcttatgttcttagagctggtgggattatttacacaatcactgatgtagaggagcttggagagtggatgaagtcttgcttagagaaacatccgatgtttgaatctctaacacaagaagagcttgtttcggatcctgttgttgagcttctatgcagtgctactgaggaaggacagaaagttgctagaaatggtggacagactttcagagcagtttttagacgcattgcatatgtttcttgaattctttatttctcgttgtagtaatctttgttgtaacacagcttctttcttaatttcaaaattttgggataatattacagaagttgagaaattattgttctacaaagccaaccagaatggatgattaaacatcttgttgtacatgaaccaattatcatcattaactttcaaacgcaataagccaatatgatagcataacatgactcttactgacccgagaatcattgcttgaaagggatattcacattttccctgtaaattgaaatgaaaggcttctcgtgtttcagacaagaaactatattgggagtttttgaagaaacagccctgtgtgcgttcaaccatccatcaaaacctgaatgtaactacaatttgtgagagatatgaagaaaacacatcgaatgtttcccaagaaaagggaaagaggaataccatttgtagtaataaagtgacttcttgtgactccaccaagatcgatatctggaacaaagttctgtcgttcctcgtgtcgaatcttctacgtttcgaaaagaaactaaacttggctcaggtgtccttaaacaactaccggagaggcaataggcatttcggggtaggataaatttgctctgtttcttgattaaaccagctgcattactgctcttctgtatgcatgtgatttagtatgcttggacaagaaactcctctgttcctcgtcgctaaccactttttgtaaactaaatacgcctcgcctggcctctgcaatctggtatatttctttgctagtatcaaaaatggaacatgatctattgttataccagttgcttgtattctcgacagaaggctttcggctttcttcaatcgacccttccaacagagccctctaaccagctcagtatacgtaatgatatcaggttgacatccccttctcagcatttcatcatacaactgaaatgccaaccgcaagtgacccaatgtacaagcagcacctagtagcagattataggtggtagtatctgggtggattttggtagatcgcatttcatttttgacccaccatgcatcaattaatcttccccctttcacatacccatgaatcaaagcattgtttgtgtaaacatttggtttaacaccgtacgaaagcattagattcagaacagataaagcactgctagtatcaccatatcttccataaccatcaataaccacattccatagcagaacctctggaagcagagaactttttagcatgcttagaaggaactcgttcgccctgttcacatctccatgtatacataaaccttgaataataactttgtatgagatctgatcaggagcaacaccaccattttgcatggtaccatggagatcacatgcctcatcaaactttccctctttgcacaaggcgctaatgagagtgttgtaagtgaaaacatcaggattcactcctctctttaccatgtcacacatgaacccataagcagctaccatgtttccactcgaacataacccacgaataatgacattgtacacaactgaatcagcagggacatttttctgtgacatctccttccaaacctcaagggcttgaaccacatttccattcttaaaacaactatccatcagaatggtacagatgactatatccaagggtgcgttcgcctggctactatctaagatctcttcaagaagctttttgttgttgtttcctataacacctttctggcaaagtgcatgcacaattatattgcaagtcactctatttggcctaataccatatttattcatagtattgaagaggtacagagctttatctacattgttaacactgcaaagacccttgattaaggtgttataagagacacaattaggcgaaggacccatctccctcatctctctaacaagcccatccgccttctcgatataacctgctttacacaacccatttaaaagatgattgtgcgtgatcaaacctggaataactccactatatatcatttttttccgtagccagagagcagcatccaacttcccttgcaaacaaagatccctcattatagacgagtgaatagataaacaatcatcgtaatcaaaactctttgtctgacatacactctccctacaagagaagcacaagttgtaggctttcatcagaagcagtttgcaaatataaattcctgaagttactggtgaaagacaaacctcaatgaagccagacgatccaagctgcttttcaagatataatccaacacattgaaaatagcttccgggtcttccttttgatcataatctttttgatcagaaaaccatttctcagtgcacaaatgagaatgattgccagaaatggatggaggacgttcgatacaagaaagacgcatttcaaagtccctacatttccaaaaagcagagaatcatcagcaaacagattagatggtcatggaaaccaataaatgaatcaaaacatgtacctgaggttggtgaaaataggagctaagagcctagagacattgtcactaacaaaatcaaggctttggttgagtaagcgaaatacagtgaattgagaagaggtaacttccccacaagatattaaaagctgcatccgaatataagcaataaaatcaactctttcgtataatcaagttagcaaaaaacagagctttgtaagaagaaaaaaaagctgcaaacttacagccataggttaatcaaaaagttatgatcttgaagattgagcagacgtatacgcaaaacacgaagcgaattacaggtttgaataagctctccggtagaattagagaaatcacattcgcttttacgtgtactgatttggtgaacatagacgattcatacgcattggtttttgatcataagctgaaacatagatttacaacaatggagagtgaatcatcagaaattgcagacctgatccagattgctaaatcagatgccgaggtaagctcttggttctgggcacgtgtgatgaagatgacgaaaatttagggttcttgcttgttttgggctatggcccattaactatccttaataggtttaatacggggcttagtttcatgatttttctttatttttggactagtttcataatcactttaaaaacagtgttattggtttatgatttaaatagagttttcatcacttaaaatattaatacattacgtagaatctgttattatttaataagtttgttaaaatttggtgttattattttaaacactataaaagtaatatagaatctttataaatctgaagttttggattcatatttttataaatgtcattaatttttttgtgttattcaattaaaacaaaagaatctatgatttttaatgaattaaattattatgttattgatttatgactttttatacttttctttacaaaataaaatcatgaaaatattattaaaatagagatattgtttgagaaatttttaaagattgtgaaaaactaatcaaaataattatagaaaactctctagcaataggttataatgtttttttttttaattattaaagtcatttaaaaaaaaaattagaaaatctaaaaccagattgatattaataacaatccctaaggcttttaaatcgaaaaacggggaaaaaagaaaaacctaaacaacaaatttccaaactataaaaataattactttttcttgttggaagtttttataaaatttatatatgtgagatgcaattttaggtgttttttcttttaaaggtgttttcggagtggaaacaaaagtttaggtgattaattatcaatttcatacagttgatagtggggagtagtggggaaagtttcgttacatagttaaggtctacaatatccaaaaaataaatagacgtagaacaatcccttaagatcaagattttacaagattacaacaatccactcatatgtagtttatggtggtctagtgtttaaaagtttcatctgcaattgaaagatcaaacatagttaatagttcgagtattttcacaacgatttcaaatataatttgcttcaaaataacgacatcatgtgaaatgaactcatgtcataacccccaaaacaggaaataaaatcaagagccatctctgtgttatctatggctaaaagatttgtggattaattattcatattgatacaaatgtatgaccgacctacttatattactatggtgtattacaatacatattcacatatgtcttataaagtgtgtgtcaagtagtcaacttgcaaaacaaaaaggtaacgcgagggaagaatcaaccaatcacagcttttcttatactaaatcaaaataatacactatacatattcatatttatccttcgtattcgtaggctcgaatcttttaatggccttatccattttaggtaagaccgccaccttcacgttctcatatatttcctcaatttcccactttcctaatcagaatctttggattttatatcgaccactacttcatgaatattaaatgaatatattttacttaatggagaccatgatagatccgacaaatacaaccgtactactattgttttttggtgctaatcgcttctctttgtatagtaggcctggtctctcaatcaacttgaagctcaactgtcattttcccccacacaaaataaaaataaattatatcatacgtatatacataacgttcgacgcgtaaatattttatgtatcataagtacaaaggtcaaaaattgggtacgtatcatatatggaaacttaattcacacgctaaaaacaaaatattgtcgactaaaattactgaagagtactttggtatcttactcactacatggatgagtccttgtgattgaacccgtattagacattagtagagacgaaatattaggcactatactagagacgtctcaaattacttgaagattctattcagaaatttttttaacgatatataaaaaataaaattagtcgcaatcatgttcaaccatttgtacgtaccaaatgacggccaattcaaaaaatgttcttcctctcaacccaaaataggatagagagttggatcaagtaacgtgcattgcaatatgttagacactattgtttattaataatgtgcactgcagtatgtgaaaatgcattgttccttataatgaattatacttatgttacctaacatagaaattcacaatgtacgtaaatttaaaatccataattagcttataaatatcgttattagtgtgaatgaatagatgcggctggtgatactattcataaaaacatatcaaaactgagagtgagtgggctttgctttctcatataaacggtgacgttttgttcttgtcctatccggttctttatatatgctccgcagattgtttaaataaaaagttagagatgatacgttataggaacatgatgataacgcacgtaagtaaaagctgagacatattgaagaggaaagtgatgatgagcgtcattgttataaaatgcagaaagatttggatttatgattgcctgaccaaaatctttattacatctctacttttgtcggctcacagtaccttagattcccaaaaccgacaacgcacatttcaacatacttccagaaatttcggcttcttttctcttttcttcatagcttttacatatttttccttgattgttacgtaaaattacatatgagttgatcactaagaaaacaacctacgagtgggtcaatgagcatgccaaaaattgatttgtatctcttagatctgattggtactgttttttggtatgttccacccgtttggtccgtacagataaggttaatgcaagccaacttgttccctgtagaggttagaatcatcctaatgtaagcctaagggttttgtttttggctcccaaaacctgcatgacaatcatatactttcctattgtgactatatatagaataaaatattaaacatgtgaaatgataaaatgcagacaatattcgccaatccttttgcccatggattttagttggtctaatatcagtatgtagatcataattaatcacgtataaaatctctatttcgatctcttactcatcaaaggttttttttataataaatatatcttcttttaaataaagatcaaagatgttttgtaaaagaaaagaaagagaaacacccttttggttttgttaattaagcttcaataaaataaatgcaacttttcatataaaaatgtatatatggacatatatgtataaatactcatacggtcgatgttaatccgtttcacatcgtagatttgaatgaatgaaaaggtagaatatcccaaggaaagtttgcatgagaagaagagagcaaaatgtagccgaaggacaacttgccagaaatatgttcatcacataattaatcatcacattattcatatgcatggttaacaacgttccggcaagtcatccttggctgcattatactctactccacttcatgcaattctactccgttgggcaagaatgtacatcaatctgagagagagagtgtgtgtagttgtgatggtttagggagtggagtgatatgaagtatttataagagagagacatataaactatacaacctctccggtccaatattatatatattttacatatttggtgatataattattcgaccatcagctaaagattcctatagcaagtggctctagtgctcaaacacttatggtataatgtcaaaagactcggcctttctcacggccggcctttccaccatccactcataaaatcttgtacacttcacaaaatctttacatcaatcgattctcttagtctaacttattatatgggtatctattttgtttttaagttaaatcaattacaaaatgtttaataagtttttccaaatttaagaatgctacatatttagaagaaagtttatatgtcaatatctttcatggcctttgttcgggagagatatgcggactaaaattagatcataaaactccataaaagtccaaaactattaacaatatcaatatatgataatgtagcaaaatgaaattgatgtcgcgtgaagtatatcaactaaattaggtggatgaatttcttggttgtaaaagacgcatgataaggtatttgatttatacatatctcatgtgtaaaatttgtaaacaactttggtatattatatatataaaaaactactttatattgtatacaaatttatgtaacaccggcctaaataataattcgatataattaatgatacttttttttccgaaaggaaccacatggaaagggataggaataagtaagctagctggtgcgcgcaacggtcctactacattttacttgtttagaaaaatcttgaagtcaaagaattattgcattagtggtgattggcctccatgctaaataagaatcaagaaaaaccgagaaggagaatatatataaagaaacattacagatctgagtatacctttattttacagatttgcgcaaatagtaaaagatttgcttatttattcatgtttctaaatctcgacatattaatgtgcatagcattagcaacatacatataggatgtgttgtcaattattcgtaccttcaatcttttaacaaaataaccaatagtactattggtgtttttggttttggatcaatactttggtttcaccttaattcatacaaacctcacctcaaaccaaacattggttacttttaaaattaccgaagttatatttctttatttgaaataaggcttaagactgtcacaaggaggacttgactcaagcttatatatgggtctagtgaccttccttatttaagaatggatatagcataaccggtgtttagtattagtggattcgatgggttaattacttgatgatatgtagttatagatctcaaaaatagttttaatttttttaaaagaagattccactacctaacatatatgtacatgtttagtaggtaacacaataacactgatataaacctgcaaggttgttatacttagacagtattagtatggcttaattaggtattaaaggacttttcttttagaacattttttcctgagaacttctatagatagacatatgtacatagatatcatcttaaatgtgaaataaatggaaaaccaaaaatggaacctaaaaggtgtggcgccgccaacaaatgcaccgcccctatctcattgcatatatgtcgggacatgtaaatatccaaacctgaaagctaagataatgtttttgaaatgactttttcatcattagatagggaagtgatttcgttgcttagttttctaaatttattgacatttgtcaacttcttgcatgcatatccacaacttattctacaaagtgacttagtgataattggcaaattgaccattataaatgttttaatggtaagaatacaacttctgatctcgggtaagacacaagtcgagatccatggttatattgtttacttgtccggtaaatatttctgaaaagtgtcaacttcgaatttttgaaaatttgctattttaatttgtgccagtttattaagttgcaatgctctacgtcgcaagttggaataacaaaataaacatgaacattatcatgtatgataatgtctacaaatatttataacaattatttggataataaaaagactaattaaaactcaaaaagtttactacataccatctacgaaatcggccaaacaatccctttgttgaaaggcaagcatcctctgtgaagtgtcatacccaactgcatgatcaacaaaagctgatgctccaagcacattaatcctttcctcatctttcatcgatgatctgaccaaagccgtgcagagagaagatgggctgtcttggagataaagtcctttgtttgagatagtgtaatctaatccttggaaatgaagagtgagtttaggcaatgaatctatctctaacccaacctcggttgtgaaacacattagttcgttcacttcgtatgcgaccgctggtccaatctgcgccgttagctcttccttcacctcctcgtagagtgatggctctagactcgtgtagtaagtcccaacgtctattgctattccactactctcattgcttctcattctaataaaaaaaaagatcatgagaaacaatataatggatatttacatttagagaaaaaagagcttgattgttttaaatactaacttgcacgtttgtggttttatcttttatgtgaaacgttagaaaaccattttcttaaaatacaaaatatttttcttgtttaaaagtattattcaaataattaataaaatggtgttcaatatgtaggttttatttggaaaaaaaaaaacaccttttaacgcaaactattaatcgaaatccaaatatcaaatgtttgagtctatgaaatttgttgttaaaacgtatattatatcaaatgtttacgtagctatgttagctagggtttaaagtttaaacaaattaaccccaacaaaatgttagagcatctacattgcataacctctcattgatgtctccaagatcaaccatggtaaaaatagactaatcaagattaaaattaaagacattttcctttttaagtgtctaaattgtcttaatgtcttagagaagatatttttgacatccaaaaaggaaaatgtctttaattataactatggttagtttttaagacactcatgagagattatgcaaaggggatagtcgtagctaggtttaatggagtaaattaaaaatataatcaaaacatcaaacgagtgatatgtttatacctctgttggccaagactgatcccgaagagagcaacgtgatacgagtaagcttccgtccccgtcatgtttaacatcggaaccaacaccatatcgccgccgtacgaagccgctgatccgagacggatgtagttacgcgacccggctgcggaaggccaaagacagtgtgaaaatcttgtgagacgtagctgagagaggagcgagaaacggtgagtcgttagactaagtctcccgtcgacgccaccaccgtcttcctccggcgtcgcacggtttctagccccgcagccaaagacaaaccctcgcactatagagagagagttttcttggtcggtgattgaggaagttaactgaagtgtgtcggagacaaggtagccggagctagagggagaggcctcgtagcggcagaaatcggaaggagtgcagagaagagagacagaagttgttgtgtttgttgttgttgcgttgaaatagttagtgtaattggtggagacatgaggacaaagagaagagttattgcaagagattgtagagaaagtgttggaagatttgtctgagagggagcattggtggtcatcatcattatcgaggcatgtgagatgtgtagaagagtctagcttgaggttaaaggttcgtgttggggttccaatggtgatctcaacgtaaagattagattcgaaaggtaagaaaaagccgttcggtatatcattcgggagatcatcttcaaggctagagttatgagttagtacagtgaagaggagcagaagaagaacaagaagaaagagtgagtttgatgaaaccatgtttctttggttttgtatagcttaatgctcccaaaacattcttaagttattagctactttttatatgaggtattgtatttaaattatccttgttttttacgatagtgttgcaccttggcttgcatgaaataatgttttacgctgtcagaaaaaataaaacaataataataacgttttaaatgtttattagtatgaaaattgcctaacatttttataagttataacatttttataagttataacgtatataatcgacactaatttttatatgtatgactaatactatatcttagaactaaatataaagtagtttgtacttacacgttacaactataatttttaaataatttagttacagtagtatatgtttttgttatttctacatgtggcatgtgtggtttatatatgcaggtgggttggttactaaacgcatctaccgtgacaactgacaagcatatattagatgacgtggcccattgacgatcacagtaacttgggcttattgggcccataacgcgtaaaataaaaagcccaacagaatcagaaaaagagatgtgtgggtcccataggaatctgcggtatagaatcaattgcttcgcgggggttttacttttcgtctcatcgcaaaaacgcatgacgcgttttttctccgtagatctttgtcttcgtcttcgtctttgtctttgtaattcttacgttaagctctctcacctacccgaaagctgcgaacttttcctagaaagctaattcaaacgtagaatattctaatcccaccacttaattttataaatgcggaattcgcgatttcgtggaatcaattctggctctttccaggtgaaatttttgcttccaaaaatctcattttgacgatctgggtcctcttaatcttaagtttttttccttaatcttgaatttgtactttccctacgatctgggttcttttgatttcagaatttgaagaacttaaaaaaaaatctctctttttgatctgattattgtagaataaacggtggtggtcactagtgttggattctctcttatcgtttttcgttagactatcagaaattatcaagagattctttcataaatttgtatcgatgggtttgggaaacatttatagaagacgaatgaaagtcttctctatagctatacttatttacctcgattataaggtaagcttctgattctctgttttctaatctctttctctcattatcttctagagtattttcgaaagtcagaatttttgtatttgtgagtgaagggtgttcagcaaaaggagaagtggattaagaagtctaaagttcctgctttatgggataaagctcatgatcgtaatgctaagcgggttttgaatttgattgtggaattggaagggttatgggtgaaacttgggcagtatctatctactcgtgctgatgttttacctcaggcttatatatctcttctcactcagttgcaagactcgctacctcctcgtccgttgcaggaggtttgtaaaatctaccttaatgttaacattagaggatatacaaagaaagaaaagtatttttttgatattatgtcaatgtggtatgattttaaagttctctgatatgggactgctctttatttataatatggtgtccttgttgatatattaataagctgtatatgtaccttctttttgtcaggtttgtcgaactattgaaagagaactagggaattccatggatgttttgttcaccgattttgttgacgagcctttggcaactgcttcggtaacattctgaaatctgtttgagcctgggaagccaaatgtttcggtaaagttcatatgctttgttttatagtgagctcctctctgttttgtagatagctcaggttcatcgtgcaactctagctaacgggcaggatgtggttgttaaagttcagcatgatggcattagagcgattattttggaggtctggtcttttttcgttttgaagcatttgatatgaacagtaagagctattagctattgtatgactgttcacacttctttcaacttgtcttctcttttcatttcttaacaggacttaaagaatgcaaagtccattgttgactggattgcgtgggcggaaccacagtacaattttaatcccatgatagatgaatggtgcaaggaagctccaagagaactagacttcaatattgaagctggtatgcttcacttgcattaataatgaatagccttaaatttcattctgtgataaactataatagcaccaaagcttgtgattgccttccatgatcaagttcaagggatgagctagtggttctgagatagactttgctggcttggtactcatctctgtcaatctttcttgcgttgacaattttcgagtttagattatgcatgctcttaagtcctaccattctaatcacatgctcattttaattctcaaaaatggctatgatcgagataacacggtaaaaataggcagaattctgtgtctttagttccttcactagactgagcatttttcaggttcatgctacagtcactgtgaactgtatttcctgagttttcccctttttgttttgtttcataatatgtagaaaatactagaacagtatccgggaatctcgggtgcaagaagacaaatgatgaagttagaagtgccaatcgggttgatgtcttgattccagatattattcaggttcttatctttaatactctcgtcctaatctgaagcatacatatatacagtttttaagtctaggatggaaacatcaaacatcaatgcccttagtgaaaataactagagacattcaaatgctaaagaaatttctatatagacggatcagtcatggttactgatggtattgttgtgtcattgtatctctgatgttgcacgttttctatatttggtattgcttagaaaatgcgttagaagtaggggacgagtgtacctactgtgtaacacagattgtctcagatattcagcgtagacttaaactcagcattagaaatttaatgactttagaagctgaaagatgtttattccttttttgttttcctgctacttacctcttacacctcctttgttactctaaatgacagtcgtctgagagtgtactcattctggagtacatggatggagtacgtttgaatgatgtggaatctctagatgcttttggtgtggataaacaaaagatcgttgaagagatcactcgtgcatatgcccatcagatatttgttgatgggttttttaatggcgaccctcatccaggtatggtctgaaacatgatcgtttttttggagttcgccaatttttatctgtcttgtaactaccatgctgcttaggcatagaatttattctaatacaagtatacgtctactctgttttgcaggaaattttcttgttagtaaggaaccacaacatcgtccaattttacttgatttcgggctttcaaagaaaatctcacactccttgaaacaagcactagccaagatgtttctagcatcggcagaggtttgtgacagtttatgcaaccatatattgaaatgttttacccaagccattagtcgatcatttaatcattttgtaagatgttagaatgatgagtttgttcattaacagaattgaaatgttttaaacagtggaacaaactgcggaaaaaaaacccaacgcgctctgatcatgtgcatattatatgtttgtagaatcattggccattgcttggatttttaactgtttaatgttacagggagatcaagtggcgcttttgtctgcctttgcagaaatgggactgaagctgcggctagacatgccagatcaagcaatgagtgtggcaggtctcttctttcgatcttcaactccatcaagcgaggctatggtaagtaaatttaattctttctttcatgcctcgctttctctactggggtaactataatggatccgctcttacagattcctctctttactagaaaacgtttaaaaccctgaacgatcaaagagtgcaaaatatgaaagttatacaggagaagatgcagctcaaccagaaagaagttaaacgcttcaatccggtaagcacaaatttctttcaaatatagccttctcaggtgaccatttatatctcaatgaaaacatttgatgcagatagatgcatttcctggtgatattgttatttttgcgagggtcattaatttactcagaggtataatttatgaatcatactactttacctcattatgtcaaaggatttgctcaatcatagtactttactttttctttacttatttattttgtcgactatttaggactttcatctactatgaatgttcggattgtttatctggacatcatgagaccatttgccgaatctgttctgttagggtaagcacccttggaatttggcagctcattttattatctctttgtgatatatcccgtacgaccataatgtgggttttcaggagtattagtcgaggaccaactgtggatgctcattggatacatgactcgccaatccattctgatgtagagtccaaagtgaggaagctgctcgctgaacttgggagtatccagaaaatacttggaattcaggtgggcaacactttttttattgtttggcttgcagtcagctttcgtttcattttacatttggtttaacatggccatgttcgtttaggtgtgtgcatataaagatgggaaagtcataattgacactgctgctggagtgcttggaagatatgaccctcgtccagttcaacccgatagtttatttcctgttttctctgtgacaaagggtgtcactgctggaatgatacattggcttgttgacaaaaggtgagtaacaacattttaagctttcaaaaaatttcatgtattcatttcacacaccctgatattttgaatcggctccaatcttacatattggtctcattgttaattccatgatcccatttgcagaacacatgcttagtcatatttagtaatatttattcaatgatacaggaaactccagctcgaccagactgtggcaaatatgtggccagggttcggatcaaatggaaaagataccataaaggtataaggagctacactgtcacttaaccatttcgcaatctattgcccttcattttaatacctcggttttgtatttcaggtccatcatgtgcttaaccatacatctgggatgcaaaattcctttgaccctgtaggagaaaatcctctgcttatttgtgactgggatgaatgtttgaaacggattgctaattcatcacctgaaacagagcctggcagtcagcagtcctatcactatctcacgtttggatggctatgtggtggaatcctcgaggtaaactaattatatcattcattgtttaagcataaaaactatgcaagtcgtcaagttgtaattttttctcttacctctactacgttaatgccaatcttgctttcatcaatcttgaacagtatgcttctggaaagaaactccaggagatccttgaagagtccattgttaaacccctaaatattgatggagaactgtacattggaatccccccaggtaaatagtaacagtcacagacattgtgaattagtaaattacgctatgagcgttattaataattatctaacatcttaattataggtgttgaatctaggcttgccacattgacgttcgacactgatgaaatgagcaagctttcgtccattgccagccaacctgagcttccttccacatttcagcctgacaagatcatacaaatggcaaccaacttgccagtcttatttaacacattgaatgtgcgcagagccataatccctgcggctaatggacattgctctgctcgtgcacttgcaaggtactatgcaaccctagcagatggtggcctagtgccacctccacattcctctttatcccagccaccactaggtagccacacccatgttccgaaattcacgtcgttgaaagacacaacaaaaaagaaaaagggtaaggagatggcagctacagaaaagggtaaatcaaaagatcatcaagagaggaagctttatgatgagaaacagtttatgagtgctagtagcagcagagagtcaaatacagaaagtttagccaggctagttgatactaacagttctgctggcaaaactgagatcaatagcgatgatcatcaacatgatattcataatatgtttagcaacccgaggatccatgatgctttcatgggtgctggagactacagtggcttagtagtgcctgatggaaagtttgggcttggttttaagcgcgccatttctcaagatgggtctctggttggctttggacattcagggttaggaggatcaacaggcttctgtgacatcaacaacagattttccattgcagtaacactgaacaagatgtctatgggaggtgtaacggctaatattgtgaagcttgtttgctcggaattaaatatcccattgcctaaggacttcgcaactgatataggtgcagattcgcagatgggtacgcctctaatcaactgaggttggttttcgacgtaagttttgtctgctcatgttacaacatgcatagctgtcgccttaaatagctaatagaaattgctggaaagtaaagtgtaatggatcagtgtttttgtttgtttgtctgtatacttacttaagcgaacacatttaagcaatttccttggagaatgtaatttattggcctatacatgcttcagtttccagattacaatctgcaggatttggagcaattaagtatatgttgacgaaacttgagtttatttaacgaacatgctgctttcattatatgtttctagttctatagcgaaacacatacaggaaattcgctgagtgatcattacatgttctgaagaaagagagtcatggccagatgtctgagacgcagctaacagcttcactggatacattaccaagtccagggcttgagttctgtccagaaagtgtcattccagggaacaaagattggtcactgtggactgtaatggcgggcgaggtatttcccgtgtagtgcagactgctgatggagtgtgatggtggacttagatgagtttgtagaagttgattcaagctgctagtgagtgaccctctcgctaccaaatcttctgctagtttcacctatatagaatttacttaacttagcacattccggttattactttcccaaattgaaaagagcaagtgatagatgataccttgactctcagagtttcaacatctgatttgagaactctgttatttgttccagcgctacgaaactgttgtgttgcgtctatgagctgcttgtacagtgttgagttatcgcctttcaaagaatcaaccttgaagaaaacacaaggtcaccattaaaacattactctctgatacaaatcatccaacaagctatttgttaaccttacctgagtctcaagatctaccaagtactcttgcttccttctcctcgacctctttgctgattccctgtttgagttcatcctgaattcacatcacagaaaaagattaagaagaattggtgattctctatctcagtgttttacatctaacttttttattggtacctaacataccttctaatacgtttcagatcattgggatcattagtcatttcagattgccctgcttctgtctcggcatcttcgtcatcagagttaacatgagaagatccacttgtggttctcctaactcctcctcttacctcaggtttattggctgacactggactatcagctgacagattctctttgtagataagagccacacaagtagtgaacattaatatcaactgcaacaacacttattacttacatggagtcaaatcaaagagacatgcacataccgcagattgaggactgtgcatcgcgaaaaggtccagccggaaacaatccctcagaccacaaaagactatctcttaactcacaagtgtaatcctacaaccaaaagaaactagactcttaattactacaatatctctggatcttgatatagacacaagcaacaatgatacgaataagagagacaacaaaaggactaacccggttcatgaggtcgaaacaagggtctagagggcttgtagtgagatactcttgtagagccagctcagaagcacttctcttcataccaatgtctttagctgtgtgattatccattttctttgaatgtgaacacacaagaaagaagagaattggttggaaaagagaggagaggggaagagtaagtggtgatagacatcttctttatataagtctctcttctttactaaagttgtgaaaaagcttcttaatggctaagcaaaattgaatttgcattgtcaatgcaacgtcctcatttccaactttttttttctttaatgacaacaataacaaaagagaatagaaaagcaaagccacagagatgtatattaggctctgtagtattggtgaatattatggtaccaattatatgctaatgataacctttaatcccttaactagggagactatctaagatagctggagactctttcaatataaatcatatctgaattcaaacattaagttgtttgtcagctcattaatatgttggagcttttgatttgaaaatgaatgttataggcatatatataagcagcttatattcataaaaggatcctaaaatatttcgaaataagcttttaaatatttgaaaatatttagataataatattgtcactcatgtacatttgtattcttggcacatgtcaagaaccttacacttacataaattactctactacataacctgtttg

SEQ ID NO: 741 - DNA, 91916 bp, Arabidopsis thaliana
aagcttgcttagatttagtggtgaagaatcggaacttgctttctcgaccttctccatcattacacttctctcttcttctcttacttttgcaaaggattgtaccattttcttattgagtagatggacgacgcatacagtcttcctcacaaaacagacgtaatactttcatcagtttcttaatgagaaaattaatatatctaagtatcaagagcattaatatatcaaagtttttaacaaacaaaaatactactttctctcaaacttccgttgtttatcttttgcaaaaaaatgtgttctgttctttctctacgcacaaagcaaatgtttttttttcttttaaagctcaactcatgcctttattacatcctctatatattagaaaagaaacactaattcttatgtatgaagtccacaattcttctcattttttatttatttatttatttctgctattattcttgccaaacaatgttaatttcatatacaagttattcttattaactaaacttacgaaaatcaaatatctaataagaaagtttgtataaaaatatttaatggttttatttaaatgtattgtatttttcaattggaagattaaacattatagaactgtatatgtatttcaacaagtaaataccttctgacttttaaaacaaacgtacttcaagaagtaaatagtatacaattcatttcgtattatatgtcttttagttttttactcacaaattaacgaaacaatactatttttaccttttattaatatgttatgtaaattttttattggtcaagaaattaaaactataaaataaaattgaatttttttttaaacgacattttttgtttacaagacgatactcaaattaaaataaaacggaagggggatcaaaattaatcaaacgcacggtgcatgtattcactacaacatgtaactatcaatctaactggtaaaacttaatcaaatatagactttggaaattatataataggccacagatagcaaatccagagagctaaccacaactaattgttaactgtatatataaattaatgacttagcaaaaacaccttaatctgcctccaatagtctccgtaaggggaaaaaaccacttctctcccaccgttgaggattgtttcaatcacttttaatcgcgggcggttcgcaaccttaaggtcgtgtgttttcatgaggtcatgagctacgtcagaggaagagactacgaggatcgggacacggccaaaatgaaggagcatgagtggcccgtagcggtggctgagggaacgaagggagcggtgagggtggaggcttagctggtggaggtttccgattaccggaactcgccacggagacggtggtaggttgtctttggcaacggttcgattcagaagtggttttaggagaagaaaggctaggattgttgctaggcagagagagatgattatgatttccatttctaactttgaaacaattctctcactcgtaatatatttatttatgtgttgggtgattactagttactgattagttggaaacacacaaactttaaaactactcatcaataagctaagtggacctcaagctgacgtgtttttagcttgtgtgagagttagactcttagagacaagtgtttcacaagatttcatttggagaaatgcatacacatgcaataaaatgcatcctattaagaagaagcaaacaaaagctatcaagtaagacaatgagtgataattacaaatagacacgttgttaaaaaaactgtatatacatcgtatgcatctttcatacgacacctaatgcgacacttgtctctaactctctcataagcttagccatatgggataccatattggcttggtttctcgcttcctaccactctaagaattgaatggtgccctttacttaatgaccaccgatgcacaagcaaaacattattgtatatttcctattttggaatcttttaatacttagttacttaccaattgggttatttacttcgattgatttaaaattttaaccataatcattaaagtataaattttaacaatcattcaagtataaatttattcaatcctcaattttgattttatattttctactgtaactaaaacatgtgaatttcaaaaactaaataaatggaaaatatgttgttaaaagccgtttatcgttagtaaatcattgatcagactcaaaatttgatgacttaaacgtttctttaggaaaaattaattagttatgttagaaattttatttagaaacgaaaaaaagtttgaggttttaattgggaaaatatttcaatttggaggttttcaagataagttttaaataggaaaagtttgaattttgacgacttgaagattttttaagaaaattaattagttagaagttttatttgagaacgagaaaaattgcaggttttaattggatttttttttttttttcactctttatgctttattgttggatgttctaacaattgttaattattagtttgttatcggagattaagatctagaaacttgacatagaattattaacattgtttgtttgaaggataatggttaaaaatagtttcgtactacaaaccttaccacaaggataatgtaagtcacccttcttcttgctacaagctctatatttgatataaaatcatcatcaatggtactcaatatcttgcgccaaaaataaagatagtattgctccaaatttggagcaatactaatcatttctctatttttaaagcataatttttttatttacaaaaaactcttccaattttaataagttatcatttaatacctaaaaatataaatttgtattagatatatttactaaattaattgaaattttaaaatataaaaatagtactaatgatgatgcttaaaaataatgtcttaatcattcgattgtctatttatgtgttataatgaaaatttattttgttttgtttaaaaataacctaagtggatagaatttataaactttaaaaataaaggaggattatgttagaaattaaaataaaatttatttggaacattttgtttagaggaacaaaacaacaattattggagcaaagatcttctctatttataaagaaatctatatttagaggaaaaaatcaagctaaccatgggagaactctatattgagaggtctaaagatattttgatagccttgtttatccttccttgtaacccatatatgtatacatattttgtttaaaattaccacaactaacatgtcgttttttaggaagataaaatacatataacacatactaataagaactttgtactcaaagaaaccagaggtcacatgctcgaagtcgtttcatgaatccaatcatacaataaaatttgtgagacttgttcttagctaaaaggagaaagtttttttttttggccatcaagtaaaacaataaaataagcaatgaaaaaagattgattaagcaaataagataaaagcgttgggtcttaggaaaattttcagggattgaggaacaaaataaatcaatgagtcaaaggcaattaattaagcaccgttctagaacatgaatcacgaaaatagactacttctctttcaaggaattagcccctaaacgtaatgaacgaaatatggatataccaccccattccccatcaatttgcacttgatgaacgtagtgatacatggggactagattaagcgggagatggaaatacaataagaggaaatttgcggcaaacatcaagtcccgttgattccgctagatcatattcatccccggaatgttggacttccattctccagttaaatcgattcacaaggttggctagtgtcacctcaaccaaagccatagcaaatccgattccaggacaaatccttcttccagacccaaatggaatgaattcaaaatttgttcctcgaaaatccacaagtgaatctaagtgcctctctggcctaaattcttcagcatctatcccccatgtcatagtgtctcgttgaatagcccaagcattgattattacctatatatatatatatatatagatcctccaaagacatttagatgcttattacgatttattggttaaaaggagcataacaaaagaacaaaacaaatcacctgtgtgcctgcagctatgtcgtatccttttaatttaatatcttcactcagttctctgggaactagtaatggtaaaggtgggtgcaaccgaagcacctccttaaccaccgcttttaagtacttcatatcctcaacatcttcttctgatatatatagaataagttttgttgcctttgcgcgaatctcgtcttggagtttcttcatgcactctggatgtctgataagctctgtcattatccattctagtagtgcgtaagttgtttctgttcctgctaaaaacatatcctggaggaatgaaaaattcattggttcattgttccaaatacattaagctattcctatccatggctaggcttatatatatatatatataatcttaccaagattaggaacttaatgtcgcttcgtcgaatttgtactccatttctctcgtgtctttcaagggatagcaatacatcgacgaaatccagtgttggtttatcggtggcatctaaatgctcttgcaacactttttccataagatctccaaatgctttactcacttcctcggctttttcatccacaccgcgaagtttatcgatccacgccaaacacgggatatattcgccaacgggaaatccgcctacaagctccgtgattttcctcatttgaattttgaaatcactcatgctttcctccttgctatattttcttcccaaggaaactctacttgtgacatcgcttgtcagcgtaagaagaagttcgcttagatttagtggtgaagaatcggaacttgctttctccaccctctccatcatttcacttatctcctcttctcttaccttttcaaaggattgtaccttttttttattgagtagattgacgatgcatacactcttcctcacaagacagagttgatattttcatcagttaattaatcatattctagtttcaatttatatagatcacatgactcaaatattaaatagatatttttctttttcttcaccaagtaactatcaagctcatgtaaactaaatcaaatctgaactttcatatttatgttgtaggcacatatagcaaatcaagagagctaaacagaaactaaggtgttattggtttattgatttgtaaatctatatagaatttgaaaatctctattaattatgaaatcaagatatattgattttgaaataacatgtgtttactcatggatttgaatccttctatttttctctttcaaatccattcaattccatttaaaacataatttggattcccaaatccaaaaacaaatgactacacgaataacaaaggattttaactagtatttataaatcatcgaatcaataacacatggttttaattagaattttaaaatcaatgattaaataacaaatgatttttgtttggattttcaattccttactagattttaacccgcggtacaccgcagggacaattcattttttaaagttagtatatataaaaacttgcaaattgtatttatctataaaatatttttactttatagtttacaattgttattaagtaacgtcttgtcaaacccgtcccgccaaacccgtccacaaaaaaaactatttattttattaatgttaatcttatttatgatatgtttatgaatcattgtctaaatattttaatcgatgcgggacgttgaacccacatatttttcgccaagtggttaatatatgttcatttttaaaatttcgaaccgtaaaatatgacgtaaaaaaacaactctatatattatataatgatgttaaatttttttgatatattaaactttttataagtttaaatattaataaagttttataaagttgaaatatataaattataacatttaaaaattataatattttttattttttaggtaatgacataataactctaaaagcaaagaatttagacgatttaaatctttaattaaatattttcattcctaaataattaatttcagtagcatgactttgtaaataagttcaaatacatgatttatttatttaaacaaaaaacatttagtaagaacaatatttatttaaacaaaaaactttgttttaaaatattgttaacaaaatacgtttatgctaattttaagggattgatgtgaagtttgtttggattaaatttgattgataatgtgattgacaatttaaattaagaattttaaaaaatataattattttagaaaaagatttaatgctaatagcattgagttgtaaataagtcaaattttaggatttatttgctaaaatggctgaaaaaatgtatatatagataaatctataaaccaataacccttcctaaatttcgaaaaaaaaaatatatatatatataggaaagtattattgtataaaaaataaatgacttttcaaaacaaaaaaaataataccttaatctgcctccaatattctccgtaaggggagaaaaccatttctcgcccaccgttgaaaattttctccaccacttttaattgcgggcggttcgcaaccttaaggtcgtgtgttttcatgaggtcatgagctacgtcagaggaagagactacgaggaccgggacacggccaaaatgaaggagcatgagtggaccgtagcggtggctaagggaacgaagggagcggtgagggtggaggcttagctgatggaggtttccgattaccggaactcgccacggagacggtggtaggttgactttggcagtgtacgttcgattcagaaattgttttaggagaagaagggctaggattgttgctaggcagagagagatgattatcatttccatttctttctttgaacataaaaaaatccagtttctctcactcgtgatatatatttatgtgttgcctcctaccgaggaaccattaaacaatcctcttttatttccacaactcactttaactacttgaaagcaatccaacttgaattattaaacaatttgtttctctcttgtaagtcgtaatagatctcgtaatagatttacgtgttggtaacagatctggtgatacacacaaacttttaaactgccattaaggtgtttatttcatcgtgatgcaacatgtatgtataaataatggtattagtttttgtttggatattgttatacgtgctcaatcggatttgacgctggcatataagcaaataaagtcaaacttacgatattaattacgggtttttttttttttttttttcttaaaagatttgctattggttgcataagaaagaaaattttacaaagccgaaacgtctaaatctaataggcaaagccgcaaagagcccaacagatccacaacaggaaaaaacatttcgaatcaagagaaccaacatgggtagtaattagctactagtggtaaaacccattgtaccccaacacaacctacgattgttttgtgttagtcagtgttttcacgtccataaaaacttttctttgacccgtgatgccggataacggttcaatttttttgattttagaaatagaacataaagttttagttttttttaaaacttttttcaatttttcttaacagatgaaataaaatatatgactcaacacatctctccattatttctcgcatctctcatctcatatgaatctcataggtttggaaaatcatgtagtgcaaatcactttccttaacatttattatcccttgaatccgtcatagaggtatttagccctaattctacaacggtccgaataattccatccataaagtcactttcaatatgattccacccaaaactaagttagtacctgacaatgcagtccggtgagatagtctcgagaaatgcagccgccttagcaccaaaatcactgagtccatagtgatccgttatttttaagcctcttactaagagtcaatcgtatttactggctagtttctattagttttgctaattgctaaatatgatatccaaaagtatgtaatagcatagacgaacgtttaattattggctcttattgtgatggagcaatttggagagaaggatccaacaagtgtgaggcactttgtggccaaaatgtgtagacaatgcagaaacaatatctaaagcataactatgaacctcagacttccttgacatccgaagaagcattgatatccacattcccggtgcaagcttcaccgcctcactcagacctttgaatccattgctcactcttttcattgtcccttcttcctgcagttttgaattgacaagattattttcagaagattccgttgcgaaagaaagaaatagggaaggatgatttactgaccgtcttaagattgatggtcttgttgagctcaagagcctctacttccaggaaaatatcaaccactctgattatgtcttgaagaaggaagacccgaactctctgccctttctcggataatatgaacagtagcagatcttctgttgcggaaactactgaatgcatgtcgaatgatttcagttccgatgatttcttcaacgttttatcttctggagagtctcctgaagtcgcagaagcctgttctgatattgctgctacctggaaaatagagcttgttagctgctcattcgttagattattcaataatcataacgagaggagctatatgacagtaccaggcgttcaagacgattccaccttattgatccatcattacaaatgacaagctcccttagtattttcctcatatctgggcttggatctgctaatagcctcccgataacaaatggatatgcactctcaatcactttaaactctggatcaagaatcttagccgtgccttccagtgaaccaagagatcttataacaagagcatagtctggaggcagcgaaaagttgaactcgtacataacatcatataattgttccatcaccccctgtacagcaaaaagtaaggattatggtagaactataatgacaggacagggtaaaactataatcacggtgaagaatcctgtcgatggaatctcaccaaaacgaaattcacttaactatgacaaggtcagttgctgattggggttttaagagtaggaaaacatctacagaaataatacacctctctcagaaatccgaatttctcaaatttatagtagccatccaacgttttgaactatcatgaagctgagagtttggtttaatgcatgagatagcttccagacataagtcattctagcagaagtaaagaaagtgctaatgaggtcggtctaattaccatcattgtaaaacaaccaggctcctactattactcctattaagttttctccacctttgtggctactcaaaagcattaggttgtaaagaaatcattttaaaatgtgccttttccgacttgcatgtttagatgaaacatttcagctcataggcaataatattaaaaatgctgataaaggctttgccacaattttaaatttcagtgaatctgtctttaggtttagtgtaattttcatcacaagatgaagatacctggaaatcttgtgatattctcgtagtagaaccaaatgaagtacgcaaagcatttgaaactgcttgtatatcaaccccttcaggcaaaaatcccaaggacaggaaatcatttgccaaacttagagaatcacggttgacaaaatgcaccagctgtaacagcaatagaactaatcaaaattgacaaagtgaaggaaacacaatctcaaatggagaagttattctttcgccatcttaagccgcatataagaaaaattgaaaagaagcaagaaagactgcaagcatatctaagacacagaaggcaaggataaaatgaagtagagcttacaatttgaataagtcccacacggtaatggcgtggaatattccccatcattccgaagtcaaagtaaacaagagacccttctttagtagccacaagatttcctgggtgcggatcagcatgaaagaatccaacctcaagaagctgctttaatgaacaggataagccctgcgaaccagaccaatacaaggttcttaacaaaacatctacacctatctctcagaataacaaagttcaatccacagattcatttgccactttgtgaggaatggacgataatttataattaggtaacagttattttgttacctgatcgatcaagtcccttctatcaagggaagcccttttcagcttaatttcatctgttaattttatgccatcgatccattccattgtgagcactgctgtgcgtgtaaaattccagtaaattttagggactttgatgttctctgctctgtgattcctggacatattcctaggtccagcgttatcatcaatctgctcattccctgccaatgttcaaagatatattgcatttgacaatgatatttcaaaagagaatgaacaaatttatacaagcgaacctacctgagtcaaaactgtatagagaggcaaatcgttctgcattttttgcctcgagaacgtaatctatttcgtcaaacatatgcctgacctgtttatccaagagagacatgaacatgttagtataatataggtaagcagaaaactagtccgaacatatcagataaatgactgaccatctcattcaccgctaccaaaagatccttacgggctttagcaaatcgtttcagttgtcccccaatcattttgaataagagggcatcacgtgttagaatgagtgacattccaggtctctgaaccttaacggctaccaattgtccagaatgcagatgagctgcaatacttaagggaaaaaatgaaacatttagcttctaataactctaaattgagaaaaatagaaaggagaataacggtagagaccaaacggatagaaaatagcagaccacggttataaggtatctaacctttgtatacctgacccagggatgcagcagcaacaggtttaagactaatatctgcaaaaagttttgacactggagcacccagttgctcttcaatacatcgcatggcaacagtagttggaaatggaggaatctggtcctataatcatcaagaaaaaatactttatctaattattcgagcatagccatataattaacttgaaagaaagaaagaaagatttcccacctgcaattttgaaagttcctgacagtatatagatggtaatatgtctggtctcgtgctcagtgcctgtcccagctgcaagtcaaatgatgtatgatataacgaggaattaaaagaaaaggctaagattagtatatttaggggagtaatggattagcaaataagtaacatgccttaatgtagaaaggccccaagctgataagagtctcacggaactgcatccaaaatgtgataaagtactattaaataaatttgtccaggccttgtatccaaaaagtactcttcatgttaacttattaaacaagtattggcaaacaacaaatcaccatagattgcgaatttactgaccttgacagcccgtttcctcatatcctgaacaaacagctgccaaaaggcaagcttcaccacatgatacgaaatgattgcagctctatacaaagccaaaaagggtccaaaacgatacactgcagaaaaacttttcgagctatatgctcctagagcatgtccaaattcagtttcaagggattctctccgcaactttgcatactctgccgtaggtattccaccatgtacgctggtgaaacccgtcgaatacctgcaaacccaatcccaaaaattttttatcccaataaaacatcctgaaatctcgataggttgtgtatctgcaaattattcagcatgatcaagaactcacgctctgcgttgcaagcaaaatggtgaaacccatgaatttgtctgtcttgagagttcattattcttcaagcttggagacagacaaatagtattgtcatcacggaacgctacaactatagcaacaacaacctcatcaacataaagttcaatctccaaaaggaaaataggaaatctcagcagcaacattcatcaccatttagcaaagttaacagtgaaaacttcactgaaactgagtttgagcaaccaagggattacaaagcaaagagttttcagcattacaaaactaacatccaagtttccaaaattccccaaacgcagaaattgtatgttctcgtgataatcacaattctagtaaatcaagtggattctcgagtcagaaatccagaatttcaacacgaaaatcatccacacccgaaatttataccgaataacatcgaaatttccataaaatgcaagacctataaagagaagaaaaacgtacttctccggagcagcgaaacacgacggtgatggcggagcgcaacaacggcattcctcatcggctaacaacacgaacgagacgaagatctattcagtcgaacagcaagcgaaaatcccatagtccgttagattcaccactcgttagcttttatgcacacaaactgttcgataaaatgcgtaaacgagattgtccgtccgaagaagacgaagaaagttttgagagtctctttctccacgtaagagccgaagagagcaaccgagcaaaagacaccgagaattagtcgccacgtccatgacacgtggcaaattccgatggagtcggcgttactgttactaagcgggatcaggcccattaaagcttaggcccatattttcaacgtaactggattaagtaataactttacttctgttcccaaacagtactgcaaaaaaattcaaatcggagaagggataaatcgccgacgactctttcttctctcacatgtcatactaatacctaagtcgtcgtctctggcagagaaaattcggattcgattgagagatggagaactctgtggatctagtaccggcgatggttgtatttctcgccgcagtccacgttatcgccttggtacttgtctctcatcgtttttacttttgtgctctctgtttcgaattagtttttgcagcgacgatcgttgatcagttttctgattattggatttgtaggtttactggatttatagattggcctctgatcgtccacctcagaggaaaaaaattcagtgaggtaactacgattcatcgattggtggattacgattccgatctgatgttgcgtttatcggcgtttttgtgattgttaagtttgatgaatttgtccttaagtaactttttggaattgaacttggtagtttcttgtgtttatgggaagtgatagattttgttacattttccagtcattggttcatagcatcatgatttttgcacttattatagagatttaacataagttacactaccgaactgtgctcaaacgttatggctagtgagagatgtgttctttgttcttggtctcatccaacactttctcatttgccattattcctgcagcaccattgattgattattagttgggttggttacaaatagtctattactacaatcttcttttctgtctaagtttcactctttgaggtagggattttgtttcttaaagctgcattgttggtttgtttttggagttgactgtcacaattttgattgttgataagtgaccaaattaaggagaagcaatatagatatatggttataactatgttgagtaagtcgagaactattagaaatcagtcggtgtggaccgtgtggttattagataatttagattggtcatgtaatttttggactttttttagtgaaggatacagactttagatttatagtcaaaagtaaactctaattttaggggagttattggacgttagattttaggtttaaaattcaagagagttttagtgtgttattcaatcgttactactataagtggttcttgatccaggaaaagtttgattaccgattataattcagtttgttaagccaaacgaaataatatcatatttggtttattatcgattctgaaatagaattcggttgaaaatagactgataaatattattatttcatgaaagcgtattgaaaattaaaaaaccataaattttaagattgttgttatttacaaattagatacaactcattcaatgacactgacacaccttattaaaagagaaaccaaccctctcaaaaactaaaagaatgttagttagatttatacgttaatagaaataatattctgacattcataaacaaaacggtccagtgacagtgagagctcgtgctaaaatctcatttttaggaagaagtgcccaaggagtagtaatataatcagatcccaccactcgaaaatagagagtcaaccacagagagagatatcaacaaatcacacacgccatgaaccaaaccaaaactaccaccgacgataacaaaaactccaaaccggccgaaaccgaatcaaccatcaccgtaccggaatggataaccgaaacaatcaacggtggctccttctgccacgtagatctcgagaccggaaccaacggctgggcttcaccaccaggcaacgtgttctctctccgctcacataactacttcaccgccacaaaacaaaaatctcccggcggcgattacctcctctctctcgccgccgtagactggctcaaatccaccacaaagaaactcgatcacatcctctctcgtcccgataaccgtgtaatccacgctttcaaaacatcccaatctcgtagcttcatcttcgccgttaatttccaggtcccagggaaagaacactacaacttggtcttctacttcgcaacacaaaaaccaatcccttccgattcactcctccacaaattcatcaatacagacgaagattcgtttcgcaacgagagattcaaaatcgttagcaatgttgtgaaaggtccttgggttgttaaagcagcagctgggaaatttggtgcatttgttgctgggaaggctatgaagtgtacttattatagaggagataattattttgaggttgatgttgatataagtagctcggcgattatgacggcgcttattaggtttatgttggggtatgttacgtatttaatggttgatattggttttgttgtggaagcgcaaacggcggaggagttgccggagagattgattggtggtgctaggatttgtcatatggagttgtcctcgtcgtttttggttgatgatgacgagaagaagagtttacagccacggcggagaatgatgggtgcggcggaagataacgacgatgagatttgagatttgagtgaaagaaaagcaggctacgtcaaaaaaaataaaaataggtcaaggtttttttttttttttttcatctaaaattaattaaatctcaaaagagtcattcctgaggaaggttgtttacgtaagtgatatggttggacatgaactttacgcggtaaattatccgctttaacatttgcactataagaaattaaagataaagaaaaacttgaaaattcttccttgttattctgcaattcctccaaatacactgagaaggtcggccattcggttggagaagacaccatcttcaccagatctgaagagtctgtaagaaacacaacatcttgattgtcggcgccaatcatgcacttcatcgcccatagaagagcttccacttcggcatgtagtgaggatagccttcgtctgaggtttgctgctcccattgttagcgtctcttcatttgctaatgtacagtatcatcatgtcccagaaaaaaagtcgttttttttcaaaatcaacttttacttttatactctcaccgttttaaattagttggcaattaaagttttttaacgaatataaaaatgattcagtttttctgttttagccctaaagtaatgtcttattttgtttaatatcattaataaatatgtttaaaaaattataacataactaaaaaatctgttaaatatcggcattgaaaactgaagaaaactgaaaaaaaaaactaatttaaaacaaaactgaacttctaagaaaacaactaataaaaacggaaatggtgttatatatccaaacaattttactattaatttttattatttatacaaccaaacacaattaagatgttttaacattaattataaaatatctatacatatttcacaattgttataagagatatttaaaagatatgtgtaaatttaaaacaatgaatttttttatcatctatcatcaaaaatacatagtttataaaaatctattaaaaattgtctataatgtgattcaaaattttaaaacagacatatattactacatcggctaaaatatttagacaatgatccataatcatattacaaataagatcaaaatgaattcaaatccgaatgagaaagaaccttataacttaacaagcatccaaatttaaaagtttttatatagtttaattcggtttagttaaactgtataattttactagatatagtaatttttatattttaatatatatttctatatatatattataattgatatatttaaaatcaacaaattttaataataataagaatatttaaacataaaaaatgaaaattaacattgaaagagttatatggagagacatgtttgaatcaacattaataaaaatttaaaatatcattaacccgtcatttcaatacgattaaatcctcattttcttattttttaacttcatcaatattagacatatcaattgtgtcatttaggtaagattgtataaaataaaattcatttagcaatttatttcttttggccaaaattcagtttataccaacaatgattttttcaatatataatcactcagcaattatatagtaaaaaaatcaaaaattagccacacaaataattagctacagaatttaaagagtttattataaaatggaaaattaaacatgttgaaatttagacccgccgtacatcatttcttaatgaaatgtatgttttcgtatttatgattatacaaatgtagcctaaaatatcattatcgtaaaatataaatattttaaaaaacttacttcaagtgtttatatatgatacatagtcataaaattttaaaatttgtaatcgtcttcgatgtactgtggggtcaatcccaagttaattattattttgttttcaggatcatgttttgtatattttgttttgtccatttagtaatccatatataaatttttttaaaaattatcgtaatccataaataaataaaatttagaaattaaatttagaataagtttgtgaaatttcgtctcatttcgtttactcataatttgtgcagctaaaaaattatgtggttttaggtgtacccaaaaaatttactaaaataaagataaattattttgatcggatcctaatcatgcaaaccaaccaacatcattgatttaaatcattcttctttgacttctacttaaaaactagctaaaagggtctatttgtatacaaaaaagtttcatgctctatatgcctatataactagcgtagaaaaaagtttgatactagcgtaggctgcgtagctgcactacagttctttaaaggtttatgttatacatggaattcaaatcgttgggatatcaatgctcaaaagctggtttaaaggagtatctacaattcataagtctaaacctaccatatttactatgcttattttgcgtatgtaatatataacgatgtcaacttttcaatttagtgtctcatccacgctatcttctgtctgcgtctttgtatatgtttgtgttttaccagcgctatcctctatttgtgtccctgcatctccatctcacccacatctgcatctgcgtttgacttatcctcaatttcaatttcctcatctttttggtgttgaagaagtggataacctctcttccaatctaactcagagaatacataattattcttcaacaagtgcataagaacattatcgtcttcttcttcattcaaatcaccaagaacactaattacctcaagatcttcttctttactcataatttgttcataagaaggctgaacaatagataaatatctcgcacaaacaagaaaacgatctgatttatcgtcgggtcgagcataagccttttctaattctgacacagatcccaacagccatagctgcaattccatggaaaacttttaagataaatcttcgtaacaccaccatgtcaaatgcgtcttttctcagggatacacatgaatattcttttttgcattggtcaaatactcttttggaaccgaatattttgtaatgccatatgacagcaggaagacgatcaaaattgcaatcaacatagcaagctatagcaagccgtagcttgctttcctaaccatctaagacctctaattgtgctatcaactcatccactttgatagggggtttgtcaggcaacaaaggtcaatcacactcaaaatctactgggactttatcttcttttatccagcatggtaatcctgtgacaagataaaactcagtcaatgaaaatctcatcgacttgttgttgatgtaaaatcaaatctcgtctttccttgacaacataagctgtcttacacaaacacaaacacaattaaatttgagattgattaacatataaatatattttgttcaaaaaaaagattaacatatattaattcaaatagattttggttccagatggatacccaaaaccatcatttatgagtttcgtctatacacagaaaaagaattttgggttgaaaatgcgttatgtctaattactaactattttatttggatcttgttcaattagtcgtaaatacccaatgaatatatattaaaaaaacaattcatctcttctctccttctttttcgaatattagcttcaaaacttataatataatcccacagatgactatctattcgagtcctctctcataatgcataagagtaagacccattgttccaattatgtgcaaacatagttaaatttgaaaattttcatgtactcatttaaatttaatataagaaaccaaaatttatagacacatttgtgttcaacatgtgtctattcaaacaaagcataagattttttattcaaccaaaaacacaaaatcacattaataagttcaattttgagttggaagaaatcatagaaattgataatcatggttcaatttcttgacctaaacgaaataaaatcagatatgatttgtcaccgaatctattttaacttcaaaatttggttcaaaatagacagattaatattgtcaattcgtgggggcgtttttggattgaaaaccataaaatttaagattaatgttatttacaaattattctacttaaatacaatacttgtgtagcttaataaaatcatacacaaaatacatttatatgtgtgtaaaaccttaaaatacatcataaattaagtactttgtaaaacttgtatatgatcttataaaccttataaaattttataaactcttcatatttattaagaggtatatttggaaatagacagttgaatcgagcatttgtgaaaaatgacactatcaaaattttcctactttttatttaatttgatcatctgtatttttcagattattttgttattggtcgagtaaaaaaaaggaatcatttatatagtttcttaaaagaaaaaccaaccttatcaaactatacagatgtaagttgcgttacccgtattttaatagaaacagtctgacattcataaacaaacggtccagtaaacaaatcgtgttaaaatctcattttacgaatacgtactaatagaatcagatcccatcatatgaataagagtcaacgagagagagatcaacgaatcacacgccatgaaccaaaccaaaaccactgacgacaataacaacaattccaaaccggacgaaaccgaatcaaccaccaccgtaccggaatggataaccgaaacaatcaacggtggatccttccaccacgtagatctcgaaaccggaaccaacggctgggcttcaccaccaggcaacgtcttctctctccgctccaacaactacttcaccacaaaacaaaaatctcccggcggagattacctcctctctctcatcgccgtagactggctcaaatccaccacaaagaaactcgatcacatcctctgtcgtcccgataaccgtgtaatccacgctctcgaaacatcccaatctcgcagtttcatcttcgccgtgaatttccagatcccagggaaagaacactaccacttagtcctctacttcgcaacagaaaaaccaatcccttccgattcaatcctccacaaattcatcaatatagacgacgactcgtttcgcaacgagagattcaaagttgttaccaatgttgtgaaaggtccatgggtggtcaaagcaacagctgggaaactcggtgcgtttcttgctgggaaggttgtgaaatgtagttactatagaggagctaattattttgaggttgatgttgattttagtatctcggcgatttattcggcacttgtgaggcttacgttggggtatgttacgaatttggtggctgatgttggttttgttgtggaggcgcaaacggaggaggagttgcccgagagattgattggtggtggtagagtctgttatatggagttatcgtcggcgtttttggttgatgatgggaagaagatgggtgcggcggaaggaaatcacagcgaggatgagatttgagatttgaaatttgaaacgaagatacgtcaacgcttactttcttttttttttctttttttttctgggtttcttggtgagtttattatatagaatcttttaatctttttaataataaagattgatagttttgaagtttagagtttttgttgagtagaatttttactatccaatgatagaatcttcgagtgaaatccttaagtgaaatttttttattagtccgtgaaaaagagtgtttattggtaaaaagaagagtgtgtattaggttaaagaagagtgtttattgggtgaaagaagagtgtgtattagattaaagaagagtgtttaatcggttcgtttagaaaactttaattcatttccaatagtttctctgcatatctaaccaaacgaatcagagacaaatcatcacgaatagttctaaatcgctaagattttcataaacaaaaaaaacaatttatcaaatcaaaacacatgtaaccaatgttattcataaccctaaaacgttgactaatcagagaaaagtgacatatacttatcaataaacaaaaataaaatgaagatcatcataaccaattcttctaaatcactaagaaaaaggttaatacctgaaagatttgtgcgtcatgatcacaaggatttgtgaaacaattgaagcaacggacaaagattcaatcacacgattattttatgaaatcatcagaagcgatttttaaattaaacgatgaatcaaatacaaaattaaaatcgataagaataagatctgtagtaaacctgattgattttgcgttaataggaaggtttttgattcaatcccaaaagagatttcgccaaagaatgattccatccatcagacatcactgtgattattgtcttcatctttgaagcaataggctaatcgagaaaaagtttcagaggaagaaacacagaaagtgcacaatgaaaaatagccacgtaaccgaactttaacattagaaaaaactctaaacttaggtgcgtttctaagcttttattattattttgatttaatttttgctcatttaacttaagaattcatctttagaaactgttaaggatcaccaatggaggtggtggtctgagttattaaaaaaggttgattattgaatcattgtgaatttgtgatattggttacaatctaaaagagtttttctctttagggtttatgtcttattttgctctcttaataagcttttcaggagcatgaattttattgttttgaggattttagcttttaaggagctttattcaaatgcatatttataatagtgttattttaatttattttttataaaattatttgttggtttgaattgaaaacacaaaatttatgatcataaaacccaaacgaaaaatatatcaaatataatttgttatatatcaattctttgaaaatagacagatacaaattattatttcgtgagagatttgttgaaattaaaaaccataaaatttaagattgttgttatttataaattagacacagctcattcaataacaccatcttactcaaagagaaaccaaccctctcaaactaaaaaaatgtttaagtttaaatatgcataatttaatgaaaacagcctcacattaataaactaaacggtccaatgactcgtattttaaatttcatttagggataatcagatcccaccacatgagagagagatctcaacgaatcacacaccatgaaccaaaccgaaaccaccactgacgacgataacaacaattccaaaccggccgaaaccgaatcaaccaccaccgcaccggaatggataaccgaaacaatcaacggtggatccttctgccacgtagatctcgaaaccggaaccaacggctgggcttcaccaccaggcaacgtcttctctctccgctcaaataactacttcacccccacaaaacaaaaatctcctggcggcgattacctcctctctctcgccgccgtagactggctcaaatccaccacaaagaaactcgatcacatcctctctcgtcccgataaccgtgtaatccacgctctcaaaacatcccaatctagtagcttcatcttcgccgttaatttccaggtcccagggaaagaacactacaacttggtttctacttcgcaacacaaaaaccaatcccttcagattcactcctccacaaattcatcaatacagacgaagattcatttcgcaacgagaggttcaaaatcgttagcaatgttgtgaaaggtccttgggttgttaaagcagcagctgggaaatttggtgcatttgttgctgggaaggctatgaagtgtagttatcatagaggagataattattttgaggttgatgttgatataagtagctcggcgattatgacggcgcttattaggtttatgttggggtatgttacgtatttaatggttgatattggttttgttgtggaagcgcaaacggaggaggagttgccggagagattgattggtggtgctaggatttgtcatatggagttatcgtcggcgtttgtgatttatgatgatgttgatgggaagaagagttcgcagcaacggcggagaatgatgggtgcggcggaaggaaatcacagcgaggatgaggattgagatttgaaacgaagatacgtcaacgcttactttttttttttgttgggatctgagttattaaaaaaaattgattattttgtttccacgaggtgggcaagatttgagattagtttttttttatatatataatgtaaaaaatttggcaaaattaataaatatgttttgtttatttctaaagtagaacatcattttttaattatctaaacatgattcaactaataataaaacaatttaacaaattaaagaatcaaatttattaattttattttaaaaactaaaaacatcatttatgttaaaagaaatttttcaatgatatatcagaaaattacttacattatgatcggtacgaaaataatatttatcatatttgaaaacatagaaagtggcgccataatatttaaatctattaatctgtagtgtcttgtgtgatacaatgctagcttgtcaacacgataagctgcgaagtttcattgaactgaagagtatagcttgtgcgatacattcaaatgtaaatttgacacttgttaaatgcaaaatatgattacgatgcgaagatatttaaggtttggcaaaacgaagtaaacaaaaacataatcagacatatatttgagaatcagctatttcttaaacatgtaagtgatagctgatccgataggatatataaaatcacaattacttccactttctcttttgttggaggaacttgggaatgcccatttaatgaattgcattctctggattaaacgcaaaccactttcttcagctagagcctttaaatcccacttgttaaatgggtttagtgtgtttagagtgatatgaatctctccatcttcgtctttcatcatctctcttgcactctccataaatcctccaaataccttattgcgtttcctgtgaattgcacactcaaatgttgaatatacattcatatgaataatatatatataatcataataaatattatacatatatatttttaaaagtatatatatgaaagtggttccaaacatatatggatgtatcaggaatccaagatcttgttatgaatttccaaatatcaaacttttgatatataagatctgaaacaagctcatcaaaaaccaaaccctgcatgaggaaaattaaagatgattatgtcgtaatgagctaagcgatcgtctgatttcatggagtgtacattaacaccacggaccacagtgcaaccaagtctctccaactcttccacgttcccttttccattgttgtaattacgccctagatcctctaccatacaaaacataatcgccaaacttgataagctattgttctttatatcggataacgacaataacaaaattgaaaaaaaaatgattgataattttagacatattactacctcgaatatcaagcgatattgcagtgatgttggtggcagaacccaaggcttttgctaaagacaaagaaaatgaaaactctccttctccgaccacgagtattttttgctcattgctatatcgacttaaccttttagattcctgaacatccatctcagatcagttgcatgtttaagtcaattcacaccatgtccttttatacacatgtacatacacatcacagggatgcattagtcaaatttagacaattttagtgttaaatgctggattttgtaattcgtctcttcgaatttagtgatcatttatgtacttttgaaagaccattcattttttttttccgttcatatttttatttttatttttgttaaaaccattcatattctacagaggataatcaaacttcttgttttgtttttcttggttcaaaagttctttctatcacggattagttttagtttaggatcatgaatagccctaataaatatgattatgatatagtaataataatacttaggaagagtgactagctcgttttacattctttatctaatgatgaaatcatatttattattcattttgtaatatgtttatagataacaacattcttcaaaagttaaatatcatttaattttcaagtattttataaaatagaaataacaagtaacaacaattattaattagttggtggcaaggttttttgttttttttgtctatttcagtatttctatataaatgatcaataaaggcatgacacactcccaaagatgctgggatatttaatattatttcttttgttatgaagaaatgaaaatggacatttcactttttggtatattataaaatcagtggagaagtatagtggtgacaagatctacctttgatccaacgatttccgaacacgtatataaaaaaggaaatactacgttagaaaaaacaaaactgtccctttgtttggcgacttattttgaaaaaaacttagtagattttttcttttttttgggaaatactgaatttagaagacaataatgcaatgaatattatacataaattaaattctttcagacacattgtattatttgagatatgtggtcatatatacgtcggctatctttttccctttatcctttattttcttcttcttcttcttcattgtaattcatacgaaagcatgtcaacgaagcttgacttttaacttgcgtacgtcaaaagattcatccttatgatctgagatcaatccaagaaatatccacttcagacaactgttgtcctcggatctgtttttcagacaaaagtggagctcaaaacggagacaaatcttcaatctttgactccttgcagaaccagttatggcaagagaagagcaaaacattgaaaacagaggatccgtacatgtggtcgaaagagaaagtaatttacgtagtgtggtgtgtggtcctgtgcggtggctaaagatgttggcgtcaaagcttcactggagctatgtgtttgctgtggtctccaattgtggaataaaccaagggtttggttactcattgggtcatgtagctacagattattacatgaaagatgttcaaaaggttcagccttctcaatatcaagctctctctgcaatcactaggatttcatggatcatatttaagcctctttttggcattctcactgatgttcttcccatctttggtttccatagacgtccttacttcattttagcaggtaaaatctcgctcgaaatttcgatcaatgtcactttgatttctctataaatgtacaaaactctgtttttgcaggggtgattggagtggtttctttgttgtttatatcacttcaaagtaatctacatctttacttggcactgttttggatgacaatatcaagtgctgcaatggcgatagccgatgtaacaattgatgcttgtactacttacaatagtaacaaacacccttctcttgcatcggatatgcagagtttatgtagtttaagctattccattggagaacttcttggtttctttatgagtggtatcttagttcatcttgttggctccaaggttagcgaatcgtttgctgtgatctctctgtcattcatgattttttctctaatgagtttcacttttcggacattagggcgtgttcggcttgttaacattcacattcgcattagtatcggtagtcggggtcttgtttagtgagcctcgtgttcatggtttctctttcaaacaggtaattctattctctcttgaattcttttaccaacatgagattatttactcattgttgtatcatttctgttaaaccagaactttaccaatgcaatgaaagcgatgtggaggacaatcaagtgctcagatgtgtggcagccaagtctatatatgttcattacccgtgctcttggtttagacattaaagaaggtcttttctattggttcactgattcaaaagatggtcctttgtttgctcaggtaatcccaaaacaagtagcttctatattttcaaaatccaccaatatgttaaaagcctttctggtttgttttcaggaaacggttggtttcattctctcaattggttctatagggtcgattctaggagtactgttgtacaacctacgcctaaaggatcatccgttccgtaaactatttttgtggactcaacttctctttgctttatcaggaatgtttgacctcattcttgtgctacgtctcaacttaaaatttggtttacctgattatctcttcatagtagtggacgggatagtttctaagatgatcatacgtctgacatggatggtgatattcgttctcaatacaaagctttgtcctcacggaattgaagggaccttttttgcgttgttaatgtcaattgacaatgcaggcctcatgacctcatcttggcttggagggaaaatgttgcatgtcctcaaggtgactcggactgagtttggtaacctctggcttgcggttttggtcaggaatgtcatgagacttttgccgatatgttttctgtttcttgtgccccaaggagatcagaacacgttcaagctcccggctgagataatgggcgaagattcggaagaagagggaactcggaatttggaattggcttctcttgttgactatgttgataggagctagcaacggtactattctcttatcatagtgtttgaagcaactgctttcaattagatttttctagaaattgaaatttgcaacttatggtagtattacttcaataacttgattgttacggaagcaatctaaactatttcctattttgcaggttatgactaatatcatcaatgaggatattgagtgtcaaaaagttaaccactcaccactcttatttcttattacttaaataagtcttcaccttatgtttgcaactatcaatgagggtattggttacaatgttcgcttgtcatcacgataaagtaactgtgaaattttattaactctaagaagaagctacttcttaaacatgaaagtaacagctgatgatccaataggataggtatcaacagagttgccaggaaatatccagttgtgaaatttcatctgcttgattaaacgcaaacccgtttcttcagcaagagccttgatatcttgctcgttaaatgggtatatatattgtcttatgagtgacatgaatctctccattttcgtctttcaccatctctctctgagaaacttaagacaagatgtagtttggtttatgttgtcttatcttattaaagaggcgttaaaaccttacttatacaaagcaaaagatataacctaaagtgttgcacaaaggaaatgactaaacaggatatatattgttgactaagctaactaaaatattgaccagcaatagcttcaacatcctccctcaagttggagcatgcacatcgagaatgcccaacttgcgcagaaagtaacgaacttccttttcacccaaagccttagttagaatatctgcaagctgcttgtgagagggaacaaacgaagtcgcaattataccatcaagaatagcatcgcggataaaatgacaatccacctcaacatgtttggtgcgctcatgctgaactggattgacactgagagcaattgcagatttactgtcagagaagatgcgcatagcctgaacgtgagagacaccaagatcataaagcacccgcttgagccacatgagttcttgagtaaggaatgccatagctctatattcagcctccgcggaagagcgactgacagtgggctgctttttcgttttccaagatatgggagtatcaccaagctgtacaaagtatcctgtgagagagcgacgagtgagagggcaagcagcatagtcactatcgcaccaaccattaatctgcagagtagaggtgctagagagtaaaatcccttgtcctgggttagatttcaaatagcgaacaacacgaatggcggcgttccaatggtcctgacgcggattctgcataaactgtgcaagagtgtgaacagaatatgatagctcaggacgtgttacagccaagtaaatgagtctcccaactagacgacgataccgtgaagagtctgaaagcagaggagatgtagacaacgagagcttatgattctgttcaagcggaaacgcagacggcctagcccccaaaagtcccatttcagaaataatatcaagaacatacatcctttgggatagggagaatccttgagcattgcggttcacttcaatgcgaagaaaatatttgagcaagccaaggtctttcatgtgaaaacatgattctagataggatttaaattgagcaacaacatcagggcagctacccgaaatgatcaggtcaacgacatatacgaggacatgaacaaagacaccatcattgttgtaactgaacagagagtaatccgacaaagattgtgtgaacccatattattttaaagcagaagagagcttggaaaaccaacaccttggagcttgtttcaaaccatacagagatttatgaagacgacataccttgctaggatcatcacattgaaatccctgaggcaatttcatatacacttcctcctttaagtcaccgtgaaggaaagcgttatgcacatccatttgatgtacatgccaatcacgggccgcagccactcccaaaaacaaacgcaccgtgctcatttttgcaaccggagcaaaagtttcatcataatccacgccttctttttgacaattacccaagactaccaaacgagctttatatcgctctatcgccccatccgatcgatacttgattttgtatacccatttgttgccaagagcccgctttcctggaggcaaatttacaatcgagaaggtttgattaactcgcagagattccatctcagcagacatagcctctctccaagctttgtcaaccatagcctcgttgtaagttgttggttccattccagcagtaacagctgcgagaaaagccttgtgcgacgaagtgaatcgatggcaatccacgtatttctcaattggatacagagaggaggaagaagcctcaggggaaatcgattcaacactcacagtattggtgacaaaattcttcaacttcatcggtttttgtgtttggcgagaactacgtctaagttgtattggcgccagtgttgtagatgacagtggaagatctgctgtctgtacggtgcttgatactaaaaaaggatcgagagaggagagagagacaaactcacttggacttgaagattcttgattgatttcaggtattattgggccagttgcaacattcggcccaactgtagcttcaccaatatttcgtccaataatagttcttggcccaatagcttcttcaataaaaggtggcccaacacaatccaccaatacacgttcatcttcctcattgcacgacatcttggagtatggaaactctgtttcctggaaaatcacatctctagacacgaaaattttttgttcttctaaatcaaacagcctccaccctttttgtccatgtggatacccaacaaatacacatcgtcttgatcgtgccgcaaacttatctcctttgtgattttggttatgtgcataacacaaggaaccaaatacacgaagatgagagtatttcggagccgttttatataacatctcatatggagatttaccttgaagaagcatcgagggagtgcggttgataaggtaagccgcagataagatacactctccccagaactgaattggcaaatacgattgaaatcgcaaggtctcgcgatattcaaaatatgtcgatgcttcctctcaacccttccattttgatgcggagtcccaacacatgaagtttcatgagcaatgcctttgtgtagaaagtactcacgcatacatagaaactcagtcccattatcacttcttactgttttgatctcagtgtcaaattgtcgttcaactaaagcaatgaaatctttcaaatgtttctgagtttcacttttatcagtcatcaaataaacccacacaccacgagaataatcgtcaacgattgtcaagaaatatcgagcaccagagtaagaaggtgttcgataaggcccccacacatcacaatgaattagctgaaaactatccatacttctattatcacttagaggaaaagtatcacgggtttgcttagctcgcatacaagtatcacatacattctccaaaatctctttaccactagacaaaagttctctaggcaacaaattaactatcttgtctgatgcgtgtcccaaacgcctatgccatagatcaaaaggggccttcacactcgtgtgcacagcagcagcattctccattccccgaaaacaaaaacttccattctctcttttaccaattccagtcaccatcctcgtagtgcggtcctgtatcacaaggaagtgatcagcaagttgaaccacacaatgattctcatccatcatttgcccaacagagatcaaatctgattccaactccttgacatagaaaactgattttaatatcagatgcgagcctaatctaactgttccctcactgacagcaactctcttatttccatcagctaagataattaaaacaggagacatggatcgcatatcactcaacaattccaggtttccagtcatatggtgtgaagcacttgtgtcgagtatccaagaagtgaaaagagaacatgtacctgattgagtttcatgagcattggacttgttatcgcttcttccagcattgagaagcttaacaactccacgccattgctcatcagtaagcccactgactgcatcacgatcgctatcagtgataacccggttcacatgttcagaagatggaaacggtccagtcatgacgacattcacatacgttggacgaggttgtcctccattaaaaccaggcccaaatcttcctctgccacgacttgttgagccatttgaatttgattttcctcttgggcgatctccccaccactctggatatccaatcaacacaaagcaattttccggcgaatgacctccacagttacaatgagtacaaagtttcttgttttgaagcttctctgaatttgcaaacttctctgagattacctcagaacgtagccgcatttgaacagcaaaagcagtgacatcggttctctcttcattagacgatctgttgttcaatatatcttcttcttgtcgcacaatgttgtaaacctcttccagcccggggagaggaacacgagacgtcaaacttgaccgtatggtgtgaaatttagtttcattcagtccataaagaaattgatgaaccatgtcatcttctcgatctttttcttggtctgttccaagattgcagatacacctaccacatttacatatccgaagagggcgatagctgtagatattatcccaaatcttgttgagttttccataatatccttccactgtcataccctcttgcttgcaagtcgcgagatccgccttcatcttctgattctttggcccattagaaacagaaaaacgcttccgaatctgttcccacaagtctctcgccacatcacggtgagagatatttgtcagcagctctgagtcaatagtcatcttcatccaagagaccaacaaaacattaatcgttaaccaatcttctagatctggagaaccatctagtggttgaggaatggttccatcaaggaaaccaaactttttcctagaccgcaacgccgtcttgaaaccacatgcccactcttcatagttatttgtcttcagtatcggatgggagatcacagctcccgaattgtcagctgccgtcaagtcgtacagcgaaattgtgcgtcggacctcaattacagatggaggtggtggtggagcatcagtcatagcttcagagaaaactcacttgaaatactcaattcgaaaaacacagattgcgctctgataccatgagaaacttaagacaagatgtagtttggtttatgttgtcttatcttattaaagaggcgttaaaaccttacttatacaaagcaaaagatataacctaaagtgttgcacaaaggaaatgactaaacaggatatatattgttgactaagccaactaaaatattgaccagcaatagcttcaacactctcgcactctccataaagcttttcactacctcatggtgtttcctgtgaattgtacacacaaatgatgatgattactatataccaaagagtttaacaggaaaaaatgttgcaataagtaatggaccaaactttatgttattctcacgtatccaaatgcataaatactaaacaaaaatcagagcggttccaaacatgcgtacggtacggatattttgagttatagatcaaatactgagatcatgattaatagactcctaatatcctacgcatatcggatcagatttcaaatgttttgtccatccctatatcacaatatacatgcatgatgaaataagctttcattctcacgaccaaaaccttaccctgcacgaatgaaatgaaatatgattttgtcatatcgagctaggcgacaatctgaggtcatggaatgtatgttaacaccgcggaccacggtgcacccaagtctctccaactcttccacgttggcttttccattgttgtagttacgacctagcccatctaccgtacacataaaacattaatcagtaaagttgataagctatattgttgagtttatttttcatgtagtgattatgctagtatatgatgataacaattaaaacaatataaaacgattgatggttttagatctactactacctcgaatatcaaaagatgctgcagtgatgttggtggaagaaccaaatgctttggctagggacaaagagaatgaaaaatctccttcaccgaccagaagtatttgcttatcactatagtggcataccattttacaatctgctgtttttcttttcacaacatgtccttatatacacatgtataacacatatggatgcatgagtcaaattacgagaactcgtattaaatgtttagttctgtctcttcgaactttgtgatcattgaagtacgttgaagaccattcatatttctttttttttttggttcaaatttttttttttacaacgggtttattttaagtttaggaccatcaatttattttggccctaataaataagattatcatacactggaagaggtgacttgctatttgcattcttttttctagtaatgaaattatttttctaaaatgctttcttgataaagatttatatttgcgaaaaaagaatataaaaaaagattcatagtttctaaaacaataccagaagttttattagtttttttgtaataggtttatcaatgacaaccaccacaacatcctccaatgttgaatatcattagagattgatccgggttatacgtcagaacgatatccttttacaaaatagtttaaattttaaattacatttattttgttaatattgtttgttttgttaagtatttaagattatacaattttatttcttaattctataatttcaccgtagtattatcagatgaattttgtaaagactgaaagtgaaaatactaaatactttaagaatttttggctaaaaatctacaaaaacgtacatgtagattatcagtttcaagtattttataaaataaataaaaaaagtaatataataaagagtaacaacagttagtagttggtggcaagcttttgtctaagtctatataaattatcaataaaggtgacaacaatatcccaaaatgctgggatatatatatttacttttgttataaagaaatgaaaatgggctttttggtatttcatgatcagtggagaagtagtggtgacaagatctatatttcacccaacgatttccaaacacgtatttaaagaggatatactaggttaagaaacacaaacaaaactacttctgttcctttgtttggcgactcttcaaaaagcttttggattttattttattttgggaaatactggaattagaaaacttatacacataaatcaaattctttcagatacattgtattctctaatatactttaaagttacgtaattttaattacaaattcttacgttcacctttaacaacaacgaaaaaggttcttcttatgtagagaaagaaaagtcaaaagtattgatgaagtaatatggtgactttgatgcaaaaccaagcttaattccatttaacaaagaactcatcttcttctattgaattaataaccttataaattctataaaaagcttctatttttgaggtaaaattgcaaaaaataagcagaggaaaacagacaagaatgttcttagtaagagacaaagaaagatgtgtgttctggtcaaacatttagcagcaaaagctttgaccttttcctttcgtctctcttgatctaagttttatcctttagtttctttattcattttctttttcttctcttcttcttcttcaatggtcatttgttgttcatacgaaaacagggtcaacgaatgtgtgcaaatttcatttttgtttcttgagtttaattcaagattcatcatatttgattcccaaatctttgatttttgacttgcttacatcaaaagattcatcctttttttaataatctgagctcaatccaatccaagacataccaacttcaaacaactctcttgtcctcgcccctcggatctgtttttcagaccaaacccatatcaaaagtttcaacatttaagctcaaaacagagccaaatcttgaatctttctcctccttgcaagttatggtagtagaagagcaaagccttgaaaacggcggatccgtacatgtggtcaaaggagaaagtaatttccgtaatgtggtgtgtggtcctgtacggtggctaaagatgttgtcttcagagcttcattggagctttgtgtttggtgtagtctcactatatggaattaaccaagggcttggtggctcattaggtcgtgtagctacagagtattatatgaaagatgttcaaaaagttcagccttctgaatctcaagctctcactgcaatcactaagattccatggatcattaaaccactttggggcattctcactgatgttcttcccatctttggtttccatagacgtccttacttcattttagcaggtaaaatctcgctcgaaatttcgatcaaagtctctttgatttctcttttaaatgtacaaaactctgtttttgtaggggtgcttggagtggtttcattgttgtttatttcactgcatagtaatctacacctttacttggcactgttttggatgacaatatcaagtgctgcaatggcgattgctgatgtaaccattgatgcttgtactgcttacaatagtatcaaacatccttctcttgcatcggatatgcagagtttatgcagtttaagctcttccattggagcacttcttggtttctttatgagtggcatcttagttcatcttgttggctctaaggttaatgaatcgtctgtctactatgatctttttcatttgtgtttcctctctaatgctgtatttggcttgttttgcgacattagggtgtctttggattgctgacattcccattcgcgttagtatcggtagtcgggatcgtgtttagtgagccccatgttcctggtttctcttacaaacaggtaataattattctctctttggtagcttgatcatgagggtattgactcttgttgtatcatttcaggtgaaccagaaatttaccgatgcagggaaagcgatgtggaggacaatgaagtgttcagatgtgtggcggccgagtttgtatatgtacatttcccttactcttggtttgaacatacatgaaggtctcttctattggttcacagattcaaaggatggtcctttgtttgctcaggtattaccaaaacaaatagtttctattttcaaacttcaccccaaaataagtaatatgctgaagaacctacctggtctgttttaggaaacagttggtttcattctctccattggttcaatcggatcgattctagcagcaacgttataccaactagtcctaaaggatcatccgttccgcggactttgtttgtggactcaacttctctttgctctatcgggaatgcttgacctcattcttgtgttccgtctcaacttaaaatttggtttaccggattatctcttcatagtagtggacgagatagtttctcagatgatcggacgcttgaaatggatgccgctgcttgtcctcacttcaaagctttgtccccacggaattgaagggacgttctttgcattgctaatgtcaattgacaatgcaggcctcatgacctcatcttggcttggagggataatgttgcatgtcctcaaggtgactcggactgagtttggtaacctgtggcttgcggttttggtcaggaatgtcatgagacttttgccgctttgttttctgtttcttgtgcctaaaggagatcaaaacacgttcaagctcccggatgagataatgggcgaagattcggacgaagagaaagatgaaaaagaaggaactcggaatttggaattggcttctcttgttcactctgttgatagaagatagctagtgttcttttattatagtgtttgaagcaaatgcttcagtttttcagcagttttgccgaacttcacttttacttctggaaagtgcaaaaggcacacactacatttttctctgaatgcataacaagtttgtgtgtttttggtatagaagaaacaattctttgtgaatttggggacctacctaatctacttacatttctaaaatagttccataagaaaaacaagaatccagtagaagaaacaattgagtgagaaatctttcagaaattgggatacaaaattacaagctgtgtctgagaacaagttctacaatatcttctggatttaaaaacacaaaaggttaaaatcttgagaacagaccatgaggtgagaacaagcataatcatcattatcatctcgtgcctcgtctgcgccaatccctgtctctctctttgcttctatcattatcgtctcgatcgtggcttgaactcttttcacgtcgatctcgatccctgttcaaatcatgttgcctatctctgtctctgtgtctctctctatccctgtctctccccaagtcatgatctctctccctcgttgatgatttccgtggcggactttggctcttgttttccccacggtgccgctttttagaggactcttgtgaatcttcacgcttctccttccgctctattattgatttctctgcagttaaaatcaatgtgtgaatacctaatttaatagtgtttgagacgcattaatagtgtttcactcattgttgcatcgaatggaaatagagcaaattaacaacctttcccaaaacaaaagaagagtatgtgtatgttgggtgagaagtaagaacttacgatttctgttgccctcgttaggtcctgataagccataatcgacttcaagcctctttctgtttatttctacttttctctctatctcttcggggtttttcatcccctgttcctcaagagtttcacgatactctatcaaagcaacttctatgcgtctccgcttttgtctgcagtaacaaaaaacagagcaagggagaagtctattgagtttcagattatacaattgaatagcaacttctactgaaagtaagttctcatattttcttgttaactttaacagtattggtgcaagctcatgtatgggtaggtaaggcacatttgggtacatacaattgatgcatatgcccaaaagctttctatggctctcaattatccaacttaaccgggtaagagccaaaatacaaaataatgtgtactctataaagaccaaatcaattgaagttcacaagaacacacctccctcactaacataaactacccttacgctgatgttactatttcgaggaattctttgttgtttttaatgctcaagcaccaacatgaagcaataatgcaaattggtgttttttaatctatattttgcttgcttaagttactttcctaatatcttttcataaagagatgcattgatcatacctttgttcctcgtccattccgttgtcaggttgggcacggacacaatcatttcccttgagatcctcgccatcggccttgaaagttatcccaccagtattgtcacttcctgaagaggagctcctcttttgttcatcatcagcttcatcatcgtctctcgcccattttgaagctggcaatatgagttcattcttctcttttcccacaaaggctttcagctcaggctgtgggattggtattgtcgtgggtagattcacaggctctttcatttcaacctctgcgtagctgttcttgatatgctcccgctcactcttaacttcttcccaagttgaatggttttgcggatgctttggaatttcatccactgcttcatagccgcgttgtttctctgtgtcttcaaggcttagtagccgggtaaccatcattactctacctcctacaagagacagtccgttgtgccgacaacgcctctcaagctcagcaattggtaaattcatcagctcttgccttgcagctcctttgcctattgccagtgcagcatctggatttatctttccaatatcactcatattgtcagcgtaacttttgttctctatttcaggtgcatcaccgcagatagaatgaaatgaggtaacaccagagactcctgatcggagaaatgtggaacgtagtccatatatgtatgcgtctgaaaagagaaaccaatctgcccatacttgcagtactttgagaacccgttcctgcaaaaagtcagaaagagtttagaaaagtatatttataagggaatgaaaaccatcaacgatcatttttctttctgacagtacttttagagcctcagcagtaattcttccagttatgcttcggtacagatcattgaagctttccattatatcaggtagagttgcttcgaatttggttcggtatgcagatgcatttttaacacgtgcactgctattatgaagaatatcagacacaagcatgagtctagcaactttggttggaattgatgtctcttttagagtcagggactccgtcaaaacttcaacaacctgtggaattaagtacacatatataagtaggaagaggcatatgaatatctattttattaacgagtagttctgttcaaattttttgtggtgtctagaaaaaaccaactaaatgtactgaaatatataagtcagaacatattgtacctctccagctgcatctgcattatctaaagcgaaacccatagcttcttttatctgactcctttctaaagtaagagcacgcaacatgtcctcgaactcatccctctgaggatcggtcagagtcctctcaacttccgcacgctgtaagatttaacagtgtcaggtatcccgcacaccaaaagaacaacttagctaacaaaagaaaaagaaataaataaattagaagtaagagtgcaagaagattactctggttcttcccgccgcataagtgctggcagactctttttcgtgctcctgggtcctagttacaggcagtggtggcggtatccatctgcaataagagcaaatagacagtgttaatacaacagatgtcatatgcaaaggtaaaccaaccgaacacccggatcagtttcaaagttggcaaggttcaataccttccactaccagttatcatgatatacggctctgttctccacctttgaagtgtatcaccctaaacaatgcaaaaatattcaatcagcttatgacaatgcaaatatatgcctagttaaaaggcaatcaaaatgtacctgagcgaaggaatatagtctccagacgtagtaagtatgctcctttgagccaagctcgaacataaacttgaacagtggattcccacggcccctctccatgatagcttgttcaaaagcacattcaccatccagaacatagagtgccaatgtatcaatgacatgtctgaggtgctcgtcctcaggggtaacaacagtgatatccggaacattaggggtaagaacctgttcaatgcaacggaagtacatatggattaagattattaaagacgggcagctgtaagagtgtcgtcaactataggtgccgtatcagcaagttacttgaatcagtatcattacaaacaagagaagcattaagtactgagaagtttcaagtatctggggactggtttagtgccattgggggtttggaaagtagaggatgcactacaaatagaattgatcccaagtttggtttttagttctgcttttgtctttcattactttaagaaataaagacaatcaattctgaaacttaacagtaacatttctggactataaagtaattcaaaagccttccacgaatatcatatagaacttataaagaaccaattcaagccatgtggaaccaagtttacataccagctcagaattttgatttggaacagaagttattatcggtggacccgtttgaccagaaaaaaccaagttgcagccctgccaatgaaatatttaaagtttttagagttaaactaaagagatataaaactggcagaactttttatgcaaaaaatggcaaggaaataccaataaattcagagatcgggccatacataggttagtgaacagaattaaagaagaaatatatctagaagagcagcacaggatgcatcacaaacctccttactccgaatagccatatgtccaggtggtggagcgggtaatgcttgtgacggtagagaaactgctttaccccatccaattttcagttcatactcgtacacgatgatccctgtaaaattggaaattttccttcataactttctttaacattgtcacatgcaatcaggtatatagttagtacaaaaccagtcgactatagacagatagactagtcaataatgccagaagggtcattagtttccaacattaatcaaccactgggtatatgtttcgatcaacaaggaaaccaatcaaattttgttgaactgaagtactcaaactaatatgcctaaaacgtttcttgttcaactatccattttaatctctcatatatatcacacatgttgcatctacctagaaaatgatttctaaccaaggctaaaatagagagtcctagatagaagagaggctagctaaccttgcatttcatcttttgcagcttgtccatcagccctattcatgaaggaaacaaagccacagtttctttgtcgcctcttctcctcatctgttcttggccacataatcttgacactagctatgggcccaaatcttccgaaagtgcgcagaaggaaattctcatcaacctacgtgagcataaaattataccttatgaatattaagaatacaatggcgagagaaaacaacatatgatccaagtaagaaaagaaaaaacacctttggggacagattcccaacatacagattcgtagtttgtgggtcaccatcgtcaaacgatcctggcctcccactgggatcaaaatcatcaggtagctcatcaaagcggctagatggctgaatacagaataagtttagtatagaaagccgggagtccagagtaaatatgagagcagaacaccgatgaagagagcaaaagagtatgatgaagagagcacaagagtataatgaactaaccgagctatcgccctgacggtcacgatcctggtttcgtctttctctcatttcttgttcacgtttcaactcctccatgaaattatctatatttcgagtctttcccttttctctttccctaggcctctcctcctccctctagaaagatgaaataaatgaacttacaactaaataattgtgcttcaaacaacaaacccaatgaacaagagaattacagtgacaaaatccatgctactgaccttcttctccggttctttacccttggatgccagtggtggtggaaggaaagagggaacatacctacaaagattaagtggacgataatcttctatataacaagaatacacgaatgaatttcaacttatcaagcaatacccaagaacatcattcctaagacctcagctagttacaaatacatgattaataatattttactcaagcctggtaacaaacatatcaaaagtgtataactcatcagcaaaatcacgagcgaccaagctctttcgatctacgatagcaaagcgagattgattcaatcaaaagcaatcagttttacctactccccttctttgaaaccgaacccccatctttggacttttcacctgccatccgcgaacgcatagaaaaaaggtccatacacttattaatgcgttcccaatataatcaaagcattgctctaaccatttgacaccaatcaaaaagaacaaagtacacacaaagagagaagcaattgtaaacaaacagttaaaaagctgtgtagcctttgcaaagactaaccttcagaatcaaccttaggcttgtcaccaggatttatcgtcccacctcgaacaaaagtcttagtagttgcattatccccttgaaacgattccacgaattcttgatacaaacgagccgtttcatcctctgctttctgcgattaagatcgaaaaccccatcgattaatcaatcaaatcaatctccgatgaacaaatttctcaaattctacccaggaatagcgatgaatcgattgaaaatttcaactcaccttcttcctagcttcttcttcttctctgtgtttctggaatggtgttttcttacgagtgatcgagaatgaactcattgtttcagcatccaactgctcctcgggaaacttgtacccaacgaaacagagaagccgaattgatgattgagaaagatcaaagtagaaagatacgaagactatggattctgattcggaactagggtttggatgaatcgagaaaggtgacgattgatcaggaagcgagctagggctcgaggagagaacacaagacgagctaaaaacgggagatagggaaaaataataattaggataaaatatttgtattttcagtcgtcttttaagaatttgtggaattttaaattaattattgcgtaagcataaaattttgataaataaatttaaaaagttacatatacaaaaaatgataataaacaaaatttaaatctaaattgatatttattataaactggaaagaatatattgtttcaaaaataaaaacttttaaaataactatgagtgttaacatatatttgtaatagaacaaaattttttttgctgttgtttataaattataactagaagaattgaaatttgagattgaggttaaagagttaacgttctatttaatagagagatttagagagtgatataaataagaaaatacatatttagaagtgatttggagtaagtaaaattttacataaactgtatctttatatattattcccacaaagaatattttcatatatttagagttggttatcttagttaagaatggttcagatgatgatgaagtaaagttcattatagtggtttcctaggctacaattccacaatggtatcaacatcttcaacttctctatgtaaaatcatagcatccaagaacatcccactttgttacttacagcgagagccagacatttcgacggagaggtgtcataagactactcaagtccaatacaaataaaaattcaaaacagaattgccataacgagccaagtttacaatttttaaattacaatgactagtaagacaacaatgtttacctaccaaatcaacagtttgatctaaagtaaacagagaaacaaagaaagtatattccaacaaaaaaaagttcctggtgtttctatcctcgtaacattttgaatagaataagctttctctcttttctttgaacaaccaaatcgatcaacacatggatcccaaaaacaaccaaacaaaaaccatatacgtggactgcgttatggagcttaatgttgttgatagatttacaaaaccaaccattcggttcttttccttgatgattcaggacattcctgtagtccctaggattgaacctgaagcagtttcagagttaagatggaacagattccaccagttcttgtaattttttcagaccaacggtggctatgagttccatcgagacaaaaacttcattagattttgctttctcttcttcctcttcctcttctttgagaccgcctgtgagtttaagcttctctgcctcggattctgcttcttgcgcttcctcaagtagaagattagcttcttcaaggtcgctcagttccagagcagctgatctctcagcttttgcagttccactgtcaatccgcaacctctggaatctactaatagccaattctttttctttcgacaaaatcaacttctctatctcttgtagcctcttgatggtttcttcaatctcatgctctgctttttcgagctcagcgttagcttttcctgtttccatctgtgtcttatccttttctaaatttaaagacttggcttctgcagctattcttccagcttctttaaaatttctcgttgatgcagccactttcttctctgcttcaagctccggcatccttttctctatgaacataattttatccatgaaagatgtaatgttctgttggatgatcgactttttagaagatcgctccttaagtaactctcgggtactggaaacctcctcttgtagcttctgtacttcctcagaaagcttctcttcgatatttacaagcttagctctctcttctctagttttagacacatatgacatcaaacctttccgcaatttaataacttcctcatattcacaagcttcatccgctgaaacacgggcaagatcacgaagtttggctcctctctccttctcagatgtcatgaactcgtccacgtctttcttcttccttgataaatcttcagtttccttgtcaacctcagtgagaccagcttgcacatcgtttaacattttatccatacttgtttgcaattccttgaagccagtcaccacattgttaattctttcctcaactgcctctatttgcgaatcgttctcgtcaatctccttctcctttgccttcaccaaagcaagcagctcctcaagttcatttgccaaatgttctttcttcttctgcagtatctccttctctttcatatcttgttcaacagatccctcaagaataccattcaacgacaaccgaacgttatcaacaacaacagattctatatccaattcgacttttctaacctcaacatcttcagaacatgaatgccatttctccatttcatctgaataaaaagcttctgctttctccagaatcgatccagcatcattctcagcatccgtgccaaaactacgaagcagacaggcagattcttcttcagctgcaatctgagaaagaagaacctcttccattttcgactcaatagcatcgcaatcagattccgcttggcgaagcaatgccaacaatgctagcctatctctttccttagcagcgaggctttcgctaatcctctcagccgcatcgaaatcctctgtctcgatcgcttcctcaagctgcttctcgagctcttcgtgcgtcgtagaagctaatctgagattctcagatgcttgccttttcttcctaatcgcattcttacgagcagaagtaaccgaagcagccaaatcacgagaacgatttagcttcgcttcgatctgagccttaactaactccaaccttgagctaccattaccaacaaccacagtaacaacaggagagtctaaagattgattaccggaatcaaacacttgcgcgacggaatcagatatttgactaactgaatctgatacttgactaacggaatcggattgttgactaacggcatcatcttcgtcttcgtcgagattgttggtttcgtgcctaccgtatccaattcttaatccagccgctctcttcttcctccgtgacacctgacgtccataattcttcgccggagattgatgagtagtgataactgcctccatcggctcaggttggtgttgaaccggagtcacaatcgttaagtctgaaaacagattctcgtccaaagcctccgtaatatctggctgagaagtagccgtgatcagtgtcgcctccgtcacatctggttgagaaggagccgtgatcagtgtcgcctccgccgccttggtttcttcagattgaggcggtgagcttaccttgctgtcaccggagaactgagacgccggtgtaaaaagctccatcccttcgaacagggaatccatatcgtcgccaccatccatcgccgccgatctgatcaatcaccgatctgatctacatttgagtttgaaaccttttaataattcataaaaataaattcactagtttaatgggccttaaatgtttgacttgtcttgggcctattaacggcccatatttgataatgctgacgtcactctttcccgattgtgttagcgcctcttcatctccataaagataaaaatttcaacacttgtcggcgactcagagaatctaaccggaaacctaatctctttacctctgagtctatctacgccggatttttcaattttcaaattctcgattcgattgaagatggaaggaggtggaggaagtagcggcggaggagctggaggagtggttccggaatcagcgattgaagcggtgaatcaaacacttgcgtacctcaaggaactgaagccacagcttgagcagatgctgactttagctgagccagaggttctcgctgcaatgcaaccattacagcgagctaagactatgcacttgctagctgaagccaccactactctttacgaacgtaacactctttcttctttgtgaatctgtttcgattgaagtttgtttgtttgtgataaatttgaatttttttgttgttttgtgtgtttacagtgaggttgagatgtactggtgttgatcctgatgatcatcgtgtaaaatctgaaattgtatgtgtctttggatgttttagttctcttattatcttgttaacttaatcaaaatggtatcttttgttgtttgattgatggtagtattggttttgtaggagcggataaacgtgtacagagagaagtttcagaagtgtgttgatcaaagtaaaggtaaagattgattttctggtgcctggattgatttgtagagagatcaaaaacttgtttggttctgtgtgtcttttggtttaaaccatttgtttcagtttgaattggccattgtattgtctcgtggattaagcaagtttttttggctttctcttttcattggagaattgctgctttcaattacctttgttgggggataatatttcaaccatgttcaaggattatgctctcagcttagaatttatttagcctttcgtaattttagaggctaataggtgctaacgatttcttaagcgttaaatgatatcctctgtgtaccttattgttgattagtacattttgaggacttgcgtttctgatcctttgtttgttgggattatgtatctgccttatatagttttccttgttttgttcgatgtttagtgttgatactatttttcgtagatatgatgattttctttaaaagactctttattgcttgtacccatcttaaatgcagggaagtagtgtttccattagaaggctttctcttttcattggagaattgctgcatccatttaccttataaagttgttggggataatatttcaaccgtgttcaaggattttgctctcagcttagaatttatttagccagtcttaatattaggcagataggtgctaacctcttcgttgattagtacattttccgaggacttgcttttctgatcctctgtttgttgggatgatgtatctgctttagattgttttctttgttttgttctatgctcagtgatgattttatttatttttggtagatatgatgattttcgttgaaagactctttattgcatgtacccatcttaaatgcagggaagtagtatttccattggaaggctttctaataatgaatcgcgcctaatccattgttctggacttatcttttagtcaccttactattgcatctacctatcatcttatattgaaaggagatttcctctcgtagtctattgaatgaaattagggagactgattcgtgatctagtttctctgtatttgtttttccgttgaatagctttaaaatcaaagtggatagtttcaactttgttttgtcaagatttacttccatttagacaacttatttgatttgaatttatttgtggctcattgttgatgttaatgtttcgcgatgtttttcgaagttttttcttattgtggaagatccatttgttcttgtctactatctcaaattttggaggctagtgtcttatctttgtttatcaacgagcttttatattccgtttagaaagtgcttactcaattggtaacacttgtgctctgcgtttttgtgaaatgactcgtgggcctttcgggcaagaatcgttttgtcgatatgctaccgggtactaatgggccgactagttcgacttagtttctcgaaagtatttcttttcatgcacatcgtttcatatttaacttgtctaattgatgtttggtttatctgataaggaaattttgtagtcatttcgattttgttagacattgaatggctacctctaatcaatatcttatcctctaaatgttctcttatctatttctcttttttttttttaccgtaggacctttgcgcccgaccactgtcttaaaccgtcaggcagcaacccgtttcatcgaacattctctacctgatcttacatcgagtaagcttttgtacagtttgttgtttccacctctctcttttactgtatatcattgtttctctaacagtcattgctaaatgaatctagcccaaaagcaaagcattagagacctcagtaaaggagagaaatcgaggatcaggtattctgaaacatctgcgagaaagaggaaataccaatcaaatgagaaacagtctgttcagtcagctgcgaaggactttcttgaaaaggcagctcgtgagattatcggtcacaatgaaaatggtttgaagggccctttagtagcggcagctgatggttcagatgatgtcgaagttggtacagcctgatttattaccaatatatcatggtaatgttctcttctgattatctttgacacctgaaagcaaatctctagaattgccaactaggtggatgtctaaggaaaaaaaacgattctttctcctaatactttatgactatgatcacataatgaaaacactgtttccttccatttgttttgaaaactatagtctctttatgagttatccttagggatttatttgcttctcctcatggtatgattataatatctttgagtcatataaaggatgtaccaataaggaagatttgttcattgtagtgatttctctcctaggctacaaatagcagaatagtatcagcatctttagtcctcttcgtgtagatcattgcatccgttacttatctgctgattatcgtgaagttttcagcaccatttctgtctctacatgccaggatagtatcaacttctcagttctcttctctttgtgaagcattgcatccgttactttgtaaattctcagtccttcaactctttctcttcttcatattttgcagctgctgctacattttctggaacgtagttgtggcattcgtcatcgtcgacattgcagagaagttggttttgtcaagttttaaaatttttggacctagttagtgttgtggtgtatgctgtttgtacattgcattgtgttagttactgttttcggaaagctcttgaagttggtgcattttgtattcggaaataacattaatatttaaaaggcaaaagaattcaacaaatcttgtggatcaaagaatcaaaaagcagagatagaagttgaacaaagcaggttaaatcaaagcaaaacaatcgctaataatccaacaaatcccaaaaccccaacttggcgagttaaagaagaagcagagccaccactggctggagccacagtgggagctcctaacaaagctggagatggtgcaggagaaggagaagaaccagtaaaaaaaccaccggtgtggccaccacgagaggacatgacaacaatatgaagcttctcaccttcaacgcagttgcttttagagccgctgatgaagaagtaaggaccagatctctctagcttcactttagtatctccattgctgtagttagctgctgggtttgtggtgttgcagttaatgtatgcatctttcgtcacttgcaaaaccgagtccttttcctcatcgtacttccacactgttcacatacagaagtttagaaatttcaaaggaaaagtgctgatttttggaatgaattgggggaaagaaaactgaccgagagtgtcgccaacgcgaaaccgtaaactctcagcccatttgtttagggactcagaaggcgaagaagggatcttccaggagctggttttgcctccgacaataatctctttgctacagacgagattagtcaacaagaagaagattagaaaaaatgttgcaacaagagttctctgagccattagaatgaagtttgtgtatgagctatatagagataaagagaaagattttatgttgcttatttgggctcttttgtgattgattgggtctttatataggggaagaagagaaactagccgttggaagtgaatgttgttttgcagctactctctgttggtcccaacggttgttattttaaacgtgtcaagtccttaccattgagactcaggttccaagaaattagatatacagtaatttcattttcttaataacggtcagagacagaatttattgatgtccgcaaaacgcaattaacgggaagagagtgcttagaatttgatgtaatcaagaaaatgctaaagtaaagtttacaagagagtataaaaatataaatagaaatgaaagaatcacataattgtcaattaaggaagataatccaaagtgacatttgggaaaatcaaacagaatacactctaaaaaaagaaaaggtttacatataaaaccttttcttttgttacttgtaaaccaaaaccagagcgaaacaagaagagacccctattgagcaaaaacaaacttgtgaaaatcattaactatattaccttccttctttctttcgtacttctcttgaatgtttttctgaatcaatcgatctttaccgaggaatagatgagtcttgtgaaccagagacaagcgtagaacccgattgttccggtcagcacgaaaaacgcgtaagaggcgatgagcatgtatccaaagtagagcatagctgagacgagcttagtgatctggagctttgtgaagaaatagaaggctgcgtagaggaagagatagaccgcagaagagcctgaggtgaggtaagacctccaccaccagagatagtcttcactgcaaagctggaagtagcagagaacaatggtgatctcggcgcaggtgaccataaggatcacaaagacgaggaagaggaaaccgaagatgtagtagaactggttgagccagatggatgtgaggatgaagaagagctcgatgaagactgcaccgaacggtaagattcctccaatgaggattgagaaaattgggttcatgtaccaagcttgctccgggatttgacgtgggattttgttggttttcacggggtcatcgagcggtggcttcttgaatccgaggtaagcgccgacaaagacaagagggaccgagattccaaaccagaggaagatcagagcaaacattgttccaaagggaacagctccggatgatttttgtccccagatgagagcgtttaggacaaagaagatggctgagacgactgcagggaacaagaaggctgttctgaaggcaattctcttccattctgttcctttgaacattttgtagagacgtgaagaggcgtaaccggcaaagagtcccatgaagacccagaggaggagcatggctgtcataagacctccacggttggaaggtgataaaaatccgagcatggcgaagatcatagtgacaagtaccatgcctaaacactggacacctgtgccaacatagacgcagagaagatctgaattggctggaggcctgaaaacatcaccatggacgagtttccacccagtctcttcttgagcttcctcttgagtctcaagctcgttgtaccgtgaaatgtcacggtaaagggtccttagcataatcatcgctaccataccagagaggaagaggacgatcataagagagttgacaatagaaaaccagtgaatttgattgtcgctcatcaaaagataagcatcccatctagacgcccacttcacttcactttcctgaagacatcagcgcaaaaatcaaaacagtgagaacaggaacacaatagtatctcactaagacaaaactatctggtgataaactgattagtcaaacaagaacttgcctgaaagtcaacatcatatgtgaagataatttctttcttattttcgacttcttgaggggtagctgagctaacaaccagtcgcttagtgtggggatcacaggtagtcaaacgggtcttctcactccattgtccctcgtattcatgcttgacactacaaatcaagtataaaatatttagttctgcaaaatagaggagatcccaagagtccaatctgttaacaaaaattgcacctgtatggtttgacctcaaatcccacaatccttgcagcatcggtttgcatatctctatgataccggacagtgaatgccaagtgattgtgcataaaatacttttgctctttgctctgtaaatgcaaataacggtttagaaaatcatgctatcacatgcaacgcaaatagtgaagaatccaagcctacttaccccttcatactggcctttaagaccaacatgatatcctagctgatacacaacagaaggagaaccctgacccggatcaattctttcgatcggaaccactagaggaagattatcaaggatcctaacacacacacatacacaagcacaccatgagaacagtaacagagagagcactactattaaacaaaagtcaatgtcctacatgttaactcgatactcatcatcaatcttctctttaaacgctttggcagactttgcatcaagcataacacgaccgagaacattacacatttgcgcctcacgcattttaaactacattattccaaactccacaagttagcagtcaagtaaagagaaatacataaatgtatcaaaacagagacaaaccgaataaggagcattttcgattcggtcaccacgaagaacttcaccaagattctcagtactgtccacaatcttcttaggacgacaaaaaggaagagagtaatacgaatatggaagctgagtctttatagatgtcaacttgtttactttcactttcaattcatctccctacataaaccataaaccaaaacttcaaatcaccactacgatttgttctcgattataagctaatcatgacaattagagataactaattgtgtaactgtattgaaaatgcgacattgttatagatcaagagatcgtaatgagaatgcgaaattcgagcctaaagtgtcggtggcaacaacactaacgattgcttcgctaattgaatcctaaaaccaaaactcgaaaccagatctaagagatataaatcagatccaaatcaataagattcgaaattgaattcatttttaccttttcgaaatcctgaggagcaacaccaggaaggtaaaaagagtgagcgacatgaatagagagcagaagaatcacagatccaagaatttgtaatcttctagaacttctataaaactccatagctatggcggttccacagatctggagctaaaagctttttaacgatcttgtgtttctattttgtgagagtctcagagagaagaagaagcagcactatgaattagatccttgtttctctctccgttattgcttcgtttctgtaacatcgttcttctccattcatattccgccacgtgtctaaccccgtcgagaaaactttaaatgggcctaatttcttaagcccatgatgatccataatgatcgtcaactggctatacagtattttgatgtccagttaaacctatatgccacaaagatgttttataaactagtacaaaaatttcatacgtttggaattatttacgagttagagatttttacgttaattttcgacttaattataattaatgcatgtaaagaaagaaaccatatcgatgagaaaggaaaacagtatattttattaattataaacgttacagtaacatttacatcatgtcgatcacaaaatatataaaaggcaaggccttgggattagactcatcatcagatgtatcatcaccatcaccaccttcttcgtcattggtgtaatttctcttgatcttttttcgagtaattcctaggttttgatgaagatgaaggctttttgtgttttgggttctttgattcacaaacctccttttttggtttttaagatctttggtggctgtctctaaggatgctgaaagcatacatctcatgaggagtccaagcctttgatggatatgagtccaaataaggataattgttcggaaaaagagatgccaaagatcttgaaatcatgcaagaaggtttttgaatcaaacaaccgaatacagaaaaggcattcttcatcttcatgagaggatacattgtgaaagtgaaaaccccgaagtcttccttccaaaaagactaagagtgacaatactgatgatgaagatggtgatgaattgttgatgatgatgatgaatccaagcctccattgagctttttgaagaaatcgtcagacgtcgttgaagctttaatggataaattgaagattcaatcgcctctggtgacttcttcaagaagttcaatcccctagagagctttttaagaaatctccataagctttaatggaaaaattgaagagaaagaaggataaagaagcatgagaaggaagtatatgtaacatgagtagtagaagaagagtacttattaaccatatatagtgtccccccaaaaaaaaaaaaaggaataaaagccaagaatcataatatatatataaaaaatgaaaagtaaattgtattattttgaagaaaatcatatccaaatccataagattcaaaattgaaatgtaacccaaggtaaaaaataaggccatgaataaaaaaagaaccacagatccaaaaagttgtaatgatcttctagaagttctataagactcaatagcttgttagtgtataattgagtttggttgtttgtttatacaatcgtaaaagttgttttgttttatgttaagagtcatgactgaagagttactatacaactcttattgtttgtgttgtttcggccaagatctgtttcacgtctataaaaagatgttgtctttgttttgtaacagatttagattttctaattaattgtcaaatactattcatgctctgtcttctttcttccttctctcgttcaaaatctctctcttttgtcaacatagctatagtggcggttccacagtcctggagctaaaagcttttgacgattttgtgcttgtagttgtgagaagaagcaatatgaatggataaaattgattagggaaaatgatagtcagctaacaaatagacgccatcacagtcacacatgtagacttcataatgcttggtttactacatgaagtattgccatcacatgcaaaaatatcacatgttaaagttgaggactggttcaggattgttaaatgagagtagtggtggtacgtaccagtgtactaaatgcaggagtcagattgttccagcatttgaaattcagatgagccgatgctatcattgtgaaggatgacgtgaagaagaagcataagaagaaaagagtctaggctttgagttttgttgaagaatgagaattagttttcacaaatgttcatctttggttttgtttcaattattattctttagctaaggaatttgttatgaagaagaagaaggattcacctaaatttggtataagtggatctttgtgtatttggaaaatatatttgtgaatagcaacaatagaagacagaaaaattcattgacttttgaagagtaaatctatccatgaagaatcttcggttggttctcataactattatggattctcataatgatctcccgacttggaggatgatgaaattacttgtatatgttgtcgaatcttccgaccaaagtatataaccggaagatgacatatttagagtgttcttcacgtcatgtggttgttacagtctcaatcttgtgttatgtgatatataacatcttcttcttctaaaatatcatacctacaattccaggaaatgtaaagaaagagacagcttttagagaatcaatgaatttgattgttgctcaatcataaaaaaatatatactttttatgactttataaaagtattaatccaataactgaagattttaaattacttcttacaaatcttaaattaataccaaattttaataaacttttttaaatcttgtttgaataacaatagattctacatacattttaactcactaaaactctatttaaatcataaaacaataatacccttaaactttaattcagtatgaactagtaattgaaaaatatgagaaatcatcttagattcttttattaaagaaatcatattagattttttttatcaaagaaatcatctaacattttttttttttgccaaccgatttattaatcatctaagattctttctaagaaaatataaactttttggaaaagttaatgattaaaatgctacggacggtattagaaaataataagaattaaaaagattttcgattaattgtatttattgtaagagctttatagatttcatactaatattttttaattcatataaagttttcaaatatagttttactatgcattttctttaatccttttaatttcttagataaaaagacaaaatgtaaaataaacataacagttttatgatgttaaactattttcatacgtagatatccaggcttttctaaaactggtttatgtaatttattttttctttctctttttccttaaatagtagtattacattttattacgtgaatttcttcaaattatgagtatttaggttttttaatcgaatcaaaacggatctaacggataatttacctataaacatttgttatattgagtcaaaacaatatactatttcccttcttaattgctagcttgaccttcttaatggtttctcactataacattttttacacaatgataaaagatctatgactatggttagggatattatttagtttaataaaagaattttgaaaggagaatttgtgtataggcatttggttggagtaggaccgaaggaaggtcgttggagttggacatgtattggggccaacatcagatgggtaagtagttaggttgtgccaaagtggaaccccctcactgattgacttctatctttattagtagatggtggcataaagtggaagacatattaaattgattacaattgatggatgtctactatttctttggttaataacaatgaatcagaatatatattaatttgtagttttgtattaatgaactagatattcaccttggaaataacatgctacgaaaaacgtttcatctatatcacaagaatgattgaaactgcaaaatcgtttaacaatcgtcgaacaaataaaccaaagagtattttgcttgctctctctatactattttctaaattcagaatccattttgttgttattggatatagttactctattatattgcatctgttatacgtcattgtcccttggtctgacaccacaccaccttcccccacactcatcggttagaatctaggatagcaccaaaattttgtggaccgtttcaatatagttttgttcagactagacggaagtgcttttgtttttatttagcggtttttggcaagagacattaagagtttcgtttgtttgagtcgagtccatatgaccataaaagaagatcaagctcacgaatcaaatccttaaaccgattatacttttttgtaaatgatacaactaaccgcaaccgggctcacaacaatatgatgaaatcggatcggactagacttggacactaaaaggtcaggaccgatcgaatccgtgtgaccctattccttgaattcaattttctctggatgttattatgagttatgaccttttccagattagacaattaattttagatattttgatcctataggattagtatacatagagttgatttgtgggttttgttttagagtacgagtaatatcgttgttaatttggcttaaaataaccttattattcggatagagtttggtgacccagtggtattgttggttcagattccatccatttcagctcgacctgcatagtactttccttgcacccaaggctaaataatgcatgattcataggacctactacaaacattatctttctctttttgtttttatataagtatttctagtctatacatttcaccttttaatttgtgatatatgcccatgcgtccatgcaaaggttatgaattctgtgacaccaatattaaatatttacatgattgggttcacttttgagtcatcaataattttaaactggtatcaagatttgatgtttggtttgtacatttatcagttcgcgtaagagatatttagttcccacttttttttaccttagatatcattaacgctttttggccaacaaaaaaaaaaggaagatattattaacgcttttgtaattttatacttaacatacgatatatgaaaccttacgtcaaatatggaattctatgttctttaagtacaaatttctgtttttagtagaattttactacacaaaatataattattttatgtttatccgtgctattacaagttgtttgtatcgctgaaggcaaaacaaaacaaacaaaaaaacatttttagcggtatattagtttacaatttcaaatggtcggctgttaaatttttgatattataatatagacttttaattattttacttttgtggtaatttgaatattttttccaaattataatccttttgaataatcgagctgttggaagaaaatgaaaacaaagtatataaaaatatctctacggaaaatatcaatgactaatattgaacaaaatactttttgttaaaggtaatacatatctcacgtttcctgaatgtttgcattacgcaacattaatatacaacgacaactaaaactacgcttttggaaaaatcagaatgcaatgactcgtcgaagtttcagaatgtttcttcctgtaattatttagaataatgcggttttagaactttaattaacaattttgtcctgtcttagtccttagtaatcattttactctttaaattattttgtgcctttggaaatcgagaaaaggttgatcgtttcggagtctatacgacacgaacacgtgccctgttcttctcaaagctccaattatgttacaagttttgtccgttactttttcttttatcacgcaagcaacgttaccgtgtccacttgtcaaacagttatatgtcactaatctcttgctaaacctgacaaattatcttccaagatagtttatttgcgaccatcctatattaataatttcttaagagaaaatttgtttctaagtagttcttgttattaacgttaatacatgttccaattcctagagagataattggtatattcggaagatagaagagatagtgtaaggttttgtactgtttatttatacgtggactgtggtatggatgtgagatatgagtacaaagatgacaattttcattagcgaatatctattagcaaacttctattactccattatttctactagatgtgataaaatggtatttatagaaaatatcttatcctaatttgtagatatacttgttggataattggtttggatcgtccgtaaaactatagacgatccattatattactttttaggcggatataatataaaattaacaatttttgttctagtgaaatagtccatgtaacccggtatagttgtcgaaaaaagaatggttggcatcgaaatatgtttttaagcgattataattaatggttgatcagcgaaacataaagtatcatcctacatacttgagcatgtttagtaaaagggatgatggctccagggctcccggaactaaaacacctacaatactcatgtaaaaagtgattaacatcttttaaaactttttcgaatacgacataatacactgatctcataaaccgtttttatcagttcgatccaagaatctaccgttttcctaacatcaacgagatatggccataagtcggattctaacaaattcatcatcatggcgcataaggcgaaactatatctacttttagtaaataatctaaatgattaaaataagttgctcaaagagaataaaataaacctcaacttctatatacacaatatacaaaaacttccttgaatctaacaactgattaacaaaaatacacagtttaatttacataactatcattacattctcttagcagtcactaccagaattttcatcactaacataattaccattactcttaacaatattattattatgattatcaccgtgccacgaccacactatctcctccaacgctggccggacatgttcttcatacaacctattatactccaaagtatctcccgccgacttacacaactcaacgacggcgacttccggcgcaacctcgaaaacctcagcagtcaccgcgatctgtcctttcctcccttccgttttcccaaacaacttcaccttaaagtctttagtcctcttcaccttcatattcatctctttccctatcccttcaagcttccccattatctccgacgccgaccaccgtgacgtaaacatagatctcagcttcctcttactctcgaacaaacttgatagatcaaatcctgatgacatagaagagatgaattcaaacgcgttaaagaacttcggcgagaccggtgttgttgttgttgttgctgttgttgctgttgttgttggtgtttcgtcttctacgttttggatctcgagctcatcgatcttgaactcgatcggagagttgatgtttttacgaaaccacggtgttcgcataatcgccggtatcgagatccgtttgttaggatcaacaactaaaagctttgaaatcaacctcttggactccggtgaaaaccacggcggatactcaaactccgatttgaagatcttccgatacattttcattaggttctcatcttgaaacggtaagaatccagcgagaagcacgtacaagataataccacacgaccaaatatcacctttagctccgtcgtaacctttcttcctcaaaacctccggtgcaacatacgccggagttccacactgagtatgaagcaaaccgtcttgtaaaatctgttccggtaaagcagagagaccaaaatctgaaaccttaagatctccgttctcgtcaactaagagattctccggttttagatctcggtgagaaacgcctctactatgacaaaaatcaacggctgagattaattgttggaaatacttacgagcagagtcttctttaagctttcctttaacgatcttggagaaaagttcaccgcctttaacgtattccatgataaagaagatctttgtttttgtagccatgacttcttttaactcaacgatgtttggatgacgaacaagtctcatgattgagatctctcgtttgatttgttccatcataccttcacgtttgacttgatctttgttgatgattttgattgcaacgctttctccggttgttatctctttgccgtaataaacttttccgaatgttcctttgcctagtaaccttcccatctcgtatttcgcgaagagaacacgaagttgttgttgctcttcctccattgtaggggccgattggtaacgactgtctgggtgaaaaacggatgagtgatttaagagagggtaaagtttaagtttggatcccatgtgtatatacagaagtagaatgagtccatattcagtatatggaatatgagatagattggtgatgaatgatgaagaagaaggtggtttagttttataagaaatgaagcaaaggacttgagaggggatgtatgaggcggccacttgtaaatatattatgtgggttaattaagagatacttaagaagaaagagactcttattatcaatgctgcggttttagagatgcaagtttttatactatgggttatttttctctctatacaatatgtatttacataagtcttttttaaatagtaaatatacttattatattaacatatatttaatgtccctctttccgttacacttttcagcattgaatttttaagtttatagtattaaataaaaattaatgtaaataaccaaactattttatatagaaatgttaataataattgtaacttaccatttattggtgtaaggaaatttgttaccgtccaataataatggcaggctaatgtgggtgggcaaatgatgcaatcctctagagcctaccttaattttgattaatttttgatttaagaaaatatcatttttaataagagttgtatagatttaatgaaacaaatatgttattaagggtccaagtttttaattcatttgtaataatagtccaaagattttggtgaaagagattagtgttgttgactgaaatatcgaatataaataagtgatgatgacgcaatggtagtatttgtttgtagctatcgttggagaagatatttctagcggaatttttgtcattagctccaagtatcaaaaaagaaaatactaatgacacaaatagtgagtatacttatacatgcatctatatattaaagtttttatgtcgacgagaaaggacacgatgtggaagtcaatttcgtcatgttgttttggatctttgttttttgaggctaaactatagctaattaatactaaacacgattactgtatatacacgtagaaatccttaaatgttgagctggtttatttatttcactaatatcattttgttaaacgtacaatttttattccaatcgagtaagctttttcctttaagttgtttggaattttgtttgacatgaaatcagtaaaaaaataatcaaagtatttggtatttatacaaaggcctagtaacaatataaacaacttacaaaatcaaatctatttatagaacgatcttaaaatatcaagatactaaaactttgggaaaaatacaaaacaattacaaactttaagcttaggaaggttgttaaataaaagaatttgttagagtttctaaataatttaactatttaagggtctattggattaaggattttgattattttggtggattttaaaattagtgggcttttaataaatatcaaatatattctaatgattataaaaaggcttgagattcagtgggctcttatgatttttttaaaatgctgctaaggagaattttcgtatcaaaagttagatacctctaggcccatagttttgacgaagacaacaactgtgaaagaaaagtgttacctccaaaattgttctactacctcacagaacataatgtgtaagattaacgtcaatgattttttttatttttttgtcatctacgtcaataatttgttaataagagattagagatccaactactaggatataaaattttaaatagtaaatgcaataataatagtagaaagatcgaacaagagatcaaagtgagaatcagagcttaaccggagattaagagagacatgagaacaacgaatggtcaagatgaataatggagactaccatgaagagatcaatacgatagaatccgacgataacgaggcatgaatgaggctttttttttgtttttttacgttgatgttgtatatatgggagatttcatatttttaatttgtttgaagtcactccaaatttcatgtttaacaaaaaatagtaataatatatgaagtttcataaaatcctttttcattagatttttcccccaaattgctatattcctattagcatcacattttctatgaattttcatataattaatcgtataacgagatatttcaaattatttttcaaaagtttcaagttcactaattacacatttgagaagatattattgatgatttggaagtccttcaaggctttaacaaaaaaagatgattagtgatttaatttgggctactgtcacggatgtgttactatccgaattcgaactcgtgtatattacatgacaaagaaaaacacatttaaaaatcatcgattaaataacatgaaaacatatatacactcttcaatttttttctaaattttagattttggtggaaaatttgtagaaaaacctaataagtagatctaaaatcgaaagttcaacactaacaacatttatattgttgattgttcataataatttataataaaactaaatcaaaaatatttatagtgataatataatataatatatttggaacaaatataatatctaaagcatcaagtttcacactaaccacatttatattgttgattgtttatcacacaccgtagatttgctgccacgagtcaaatccacaatccttttcgcaagcgtttgacccagacttttgatactcgtttaattataaacacacaaatatcaaaataacatatcaccttatcttgaaaattgtggcattatattcttttgtgtggacaagaataatatgcttaattaaataaacttataatgaaagacttccatgccaccacatccttgaagcttatgtaattgaaatgtcgtgaaatgatgtataaataattaaatatgaaatcgtcacaattattgctcaaaaaaagaagaaatcgtcacaattatatatcccacacaacaaagtccaaaaagaaagaagttatcaacaacaaaaaaagaaaaaaaaaagtcccacaaacacaaagtgtaatatctaaaaatccatatctccatctctcccctctatctatcgctccctctctctaattcttcggacacaaagcataagacttgaaggtaatcctacagaaatatcaaatattacatattctcaattattattttttaaacacaaagtgttctttacttgttcgaatgttgcatgtctcttgaccgtgaaaagaaatttaggattcttcattacgacagagtgatgattttttttgttttgccaaaaacgacagagtgatgatgctttggtggttttattttatggggttctatatttttcatctattggtgattgattacaaaaacttttaagactttagataatatatttttgttgagtctttaaaatccaattttcttgaatcaaacttaacacattcatagccctaaaaaatcttctaaaatttctcgtggcccatgtgtttggtttagtagtttttttcctttttaaagtcaaaattactggaacaaacattttaacatcagaatttattgtcacactcataactaatgaacaccacactttttttttggggttaaatgatccactaagcttgctagttataaacttatagtatttcttttaggattgtaaaatataaattgttgcattcgtcttcttttcaaccataaactaatttgctttgtataaacttatccttttgtgtaggaagcaaaatgagtttgtggtatatcattgttgcattcgtcttcttttcaactataatcattgtaaggaacactagaaagacaaagaagaatctacctcccggacccccaagacttcctattattggaaacttgcaccaattgggatctaaacctcatagttcaatgttcaaattatccgaaaaatatggacctctaatggctctaaggtttggaagtgtgtctactgttgtggcttctacaccagagacagtaaaggaagttttaaaaacatttgacgcagaatgttgttcgcggccttatatgacttatcctgcaagacttacatacaatttaaaagatattggcttttgtccctacaccaaatattggagggaggtacgaaagatgacagttgttgaactctacactgcaaaaagggtacaatcatttcaacatacaagaaaagaagaagttgcatcactcgttgatttcatcacacaagctgcgtcattggagaaaccggttaacttgaacacgaagttaatgaaactatcaggaagtgtgatttgtagagttgtatttggtatcaatcttaaaggaagtaaacttgagaatctttatgaggaagttattcaaggaaccatggaggtggtggggagttttgcagcagcagattacttcccgatcattggtagaatcatcgataggatcacagggttacatagcaaatgtgagaagattttcaaggcaatggatgcattttttgatcaatctataaagcatcatctagaagatgagagtattaaggatgatatcattgacttgctcctcaagatggaaaggggagagattgaacttggggagtttcaacttactcgagacaacaccaaaggaattcttttcgtaagtaatatgaacctctcactttgtaatatactttcattcttcacatgttgcataaattttaaaaatatgtactctttgattattacagaatattcttaacgctggaatagacacttctgcacaagttatgacatgggtgatgacatatttgatttcaaacccaagagttatgaagaaagcgcaagccgaggtgagagaagttataaaaaacaaagacgatatcattgaggaagatatagaacgactcgaatatctgaaaatggtagttaaagaaacgtttagggtattaccgctcgttccacttctaattccaagagaggcttcaaaagatgtaaagattggaggttatgacattccaaagaaaacatggatccatgtcaacatatgggctattcataggaatccaaacgtttggaaagatccagaagctttcatccccgagaggtttatggataaccagattgattataagggtttgaactttgagtttttgccgtttggtagcggaaggagaatgtgccctggtatagggatgggtatggctttggtacacttgactcttatcaatcttctttaccgatttgattggaagcttccggaaggaatggaggtagaagatgttgatcttgaagaatcatatggacttgtctgtcctaagaaagttccacttcagcttatcccggtccttacccaatggagttgattttatattttcatagttctaaatgtaacccttaagaagtatcctaaagttcttatccttatcactagatgagtatccacgctatgttgcgtttgtttttaatattcgtttttctaaatttcatatttatggaattatgtgtagacattagattattaaagacttatgttgagaaagttaactacaatgctaccatatgaaatgaacattaaaaaatagctgaaagaagtaatgtaaaacggttttttgaagtgttatgtgtctttacatttagcatgatgtacgtatcttatgttttttttggattgaggagaggcattatcatagttcgattatgcaatgtagcattgggagattttcaaaactgccgatatagaagccactacttcattttactgtttcgtgcaaaaacaagtacattcccagatgtcgtttacactctagctactgtatgatatcttgataatcatcaattgtcgatttacaaatgagcaatataatatgcacgagacacaacaatggttgatgactaaacttcagagaactttgaatccacttgtagttgtagagtatatttgcatattcaggaacttatatatatatatatatatatatatatatatatatatatatatgtataaactaaggaaatactacataaatatattttctttttgagtttaactacatgaataagtaaaatatttacaaaacatacctggagttattctacaatggccagtaaaaaacattaaaaaaaaacttacacaaatccaatatatttatagaaatatcttattcataaaatatcataaaaagaatagcttaaaagatactaatagaaaaacatttcaaactttaagtttatgaagttttttatttataattagttagtgtttctaaataaaaaaaatgttgaaaaaacataaactttcatatttggaacgaaacaaacataaaatttaaaatgccatgtcaaaagcaattgtttttattgttttaaatttgaaaattcatgttgttttggatattattttttcatttctaaatcattcaaggagtgtatttgattattttggtggattttagaattggtctgcttttcagtgaatttcaaagatattctaatgattgttaacaaaaggcttttcgattgagtgtggttttataaactgctaaggagaattttggtatcaaagttagatacccctacacggctagtgatgaagaagacaacactaagaaaaccctgtgaattgtgaaaaagatttgttacctgcattattgttccatcactatctcacaacataaaatgtgtaagaataataacaaaacgtcttgcgtctccaatctccaaagctaaccaaaaaaaacaatcagaagaagaggaggaaagaggagtagagacgccaatagatctcacggactctcacctattgttaaaataacgccaataatttgttagtacgagatctagtaatagtagttttatttaaatacaaaaccctgtgaaagagatttgttaacttcaaaattgtacttttatttaaatactaaactgcagtaatagtggaaagactgaacaagagatcaaagtaagaatcagagcttaaacgagattatgagaaatatgagaacatgagacctgcacgattgaatgatgatgagacatgaaagggtttcggttcctttttttttacataccttaaatgttgtctactttttttttttttttcaccaaattcttatattaaaattaaaaagatacatgaagattagttttcatcggacaaacccgaataacaaacccgaataacaagtttgaaaattgaaaagttgaccaaacataactcaaacatagagacactagctgaagtaagtttgataggagaccatgagacgtttcgaaactaactaacacaagcatgcccatgagagaaatcgtaaacaacacaaaaacctcgactggtaagaaaatagtcaccgtaactagtgacattaaaacgaaattcaaaccatcaaacgtggttctaggttggaaacaacgtggatttgccttagacgcagacatagagacgtcggagaagtattcggtaaacaagcttcgctgacgatgggtgagatccaaatcaaaaaatgtggtactgaatcgggagtgaaatgggcctacaggagaagtatccggcgtaagcagagggaacccggaaaagtattcggtgaactgttgagagatgaaacgggaaaaggcaaaaggttggcaaagggagagacaaatgtatcccaagacgatgaaggcagatgatgagcgttgcacaatattaaggcagaccaaaataatatgcgtacaacccaataatcttaacgagcctttacgaaatctagaagttcccaagatgggacaagcccaatttaaagtcttcttccaaaaatgtgaagtgaggatttgacctaatccaagcgaggccaagaacaagaggcggcgacagttgacggaggtgacaaggtcatcgaccacaaagattaagagagggcaaagatcactagaaagaggagacgaggagacaacaaccatcagcttcacacataagagtcgattctcgtggctggggaaggagaggagaacagattcaacaacgaagtagccgctggttcttccaataggaggtggagcatgtcgggccggtgggccaaagatcttcagaaaagagatgccaccagatctgcactcgacgagatgcaacaacgagatggaaaatgatgagaggcggaaagacgggatacaaacttgaaaatttcgggacaaaacgcgtttggattcttcgggagatgagcagagaatcaaaaagaagacaacgtccgacgccgacgagccatagctacaccagcgtcgaaagacagaagtttttgaagtgtttcgagaatagcgtctgggagagtttcaacttttatggttaatggtctttttttttattatacctcttttataaggttttttaaagatttcttttttaataagtttttttttggttttaaaaggttttaaaagttaccataaagatgactaggggtccaaacctccataagcccgcatatacatcaaggagcatttttgaaaaagatatttttataaatattttatggtaaaagacgtttttgaaaaaagtaccgtgaaaaggcatttctcaaaatattacaaacttataatcattaaataatttcttttagtattttagtaaattttattcattgacttttaataaatccatgccaccacatcaatgtgtttgctttttttgatcgattgataaagaagactcggaaaaaactctttttttttggattttccatttgcataatttttagattatccaattaatatacaaattatctgccatttggaattatacttatattaataactatcgtccaattttaaatttcatttgctctacaaacttgaaaaaaaaaacttgaatatataaccctaaaagtagagttcaaatgtgagcatccacattagttatttttttcagtgtctattgatgattatttttaaatatcaaagaataaaaaagcaaaagaaagaaatatagatgtctttaaaatgaaaattatgtttttctagaactatttgagacatctatttttgaaatgtctttacttttaatattattttatgtgaaaacatctgaaaagttgttagaatgagaatggtctaatattttcaactgcacgcttatgtaattgaaacgtcaccacagcgccaaatgctctataaataattaaatatgaaatcgtcacaacacaaagccacaacacaaagccacaaaacaatctctatcttatccatctaattttctttggtcatcactatcttatccatctctccctctctaattcatcaggacagagcataagaattgaaggtaatcctacggatctcggcttctatgatgttgcaatattgtagaagaaactctttaaattctcgaatactttaattttaactatatgtgttcttaaactaagaatcaaagtaagtgatcaaattcaaaattgtactcttttttttctgtgtaggtagcaaaatgagtttgtggtatatcattgttgcattcgtcttcttttcatctatgatcattgtaaggatcattagaaagacaaagaagaatctaccacccggacccccaagacttcctataattggaaacttgcaccaactaggatcaaaacctcatcgttcgatgttcaaattatccgaaacatatggacctctaatgtccctaaagtttggaagcgtgtctactgtggtggcatctacaccagagacagtgaaggaagtcttaaaaacatttgacgtagaatgttgttcgcgaccaaatatgacctatcccgcaagagttacgtacaatttaaaagatctatgcttttctccttatagcaaatattggagggaggtacgaaagatgacagttgttgaactctacaccgcaaaaagggtgcaatcatttcaacatacaagaaaagaagaagttgcagccctcgttgatttcatcaaacaagctgcttcattggagaaaccagttaacttgaacaagaagttaatgaaactatcaggaagtgtgatttgtagagttgcatttggtatcaatcttcaaggaagtaaacttgagaatacttatgaggaagtcattcaaggaactgtggagttggtggggagttttgcagcagcagattactttccggttgttggtagaatcatcgataggatcacagggttacatagcaaatgtgagaagcttttcaaggcaatggatgcattttttgatcaatctataaagcatcacctagaagatgagattattaaagatgatataattgacttgcttctcaagatggaaaggggagagactacacttggggagtttcaacttactcgcgaccacaccaaaggaattcttgccgtaagtaatgtgaacctctcaatttgtaacatactttcattcttcacatgttgcattaattttaaaaatacatactgactttgattattacagaatattctcaacgctggaatagacacttctgcacaagttatgacatgggtgatgacatatttgatttcaaacccaagagttttgaagaaagcgcaggccgaggtgagagaagtgataaaacacaaagatgatatcatagaagaagatatagaacgactccaatatctgaaaatggtaattaaagaaacgtttaggataaacccacttgtgccacttctaattccaagagaggcttcaaaagatgtaaagatcggaggttataatattccaaagaaaacatggatccatgttaatatatgggctattcataggaatccaaacgtttggaaagatccagaagctttcattcccgagaggtttatggatagccagattgactataaagggttgaactttgagttgttgccgtttggtagcggaaggagaatatgccctggtattggaatgggtatggccttggttcacttgactcttatcaatcttctttatcgattcgattggaagcttccagaaggaatgaaggtagcagatgttgatcttgaagaatcatatggacttgtttgtcctaagaaaatcccacttcagcttatcccggtccttacccaatggacttgatgttattttttcatatttcaaaatgtaacccttaggaagtatcttaaagttcttatcattattatatatgaataaagaaattatttgatgaataatgctcattttatttggtaacgtaaccttaacttttaataaccattgctaaagttagtctaacaaatttagagatttaattacacaaaagagactcttatcaatcattcgttccacatattttgttcattccacttataatgttgatcagttttttctgcattgccctttcagttgtcactatttaaatccctactcacaatcgtttcgtaaacattggaccccagctattgatatgcttgctggaaattttggcattacctctcatattcaaataaacatatacctcatattgaaaaaattggcattattaattcgtttgtgtggacaaatatattatgctttattgcaaagtaaacttatcgtgaaggaattctatccaaccatcctttgaataaacaaggattgataagactccaaaaactattactataattttgtggttgagtgatagagattcccctgtaacaaacaaggattgataaaagacccgtgaaaactctcttttaaaagaattcacgtaaaatatattttatcaaacagacaataaatactaggatttcaatataaatataattgccgaccaggaaaatatgtggtggttcatttcttttggacaccgccacaccggtcaatttgatcagtcatcttatgaagattattacatatgtgtttgacgtaagacgtacattataaaagggcaatttgtatataataaattattagtttaattttccaaaaaacaccactaaaatatattatttccaaaagtaacaaaactaaaactaaacaataccttcaaaaatcaaaactaaaccctaaatcttaagcaaccatatcccataaaaactatattctaaacttcaaattgaaattttaccattgaacatcaattttggtgtttatggtatttttgaaaaacatttttagtggttttttagaaaatcctaagaatattgaatacccaagcaggacaaaataaaataatttgagacagcatgagaaatggaatcgttgagttggatacaggtaggaatccgaagaaataattatgtttcaaagacatgatatactgcaagaaaacatagtaaatttttaccaattttcctatgaaaattttggtacgaaaaaaaaaccatatacctacaacctttttatgaatattttgatagaaaaatggtaaaaaaaatttatgatttttttacaaaatattttacgaattttcctacaattttttttttgtataaataacatgcatatatatatataaatattttacaataattttgaattatatcataaataagatcaacattaataaaataaatgatttttttttgtaagatgtgtttggcgagacattatttaataaaaatggtaaactataaaatatatatattttataaatatatataatttgttaacttttatatatagtaacttcaaaaaataaaacgttttgcggtataccgcgggttaaaatctaactatacttataatacatataataataccaaaatcgttgctaagaatcagacctagatacgtcgccggcgctgctaatcaatcctcgatcgaattccttttaatacactgtcacggatatgaatatctctatcaggtttgtcgtgtcacctgattcttgcttcaagattacttctttataccattaaagtttggatttagcttctggtttctcatctactaaaaaaataattattaaaagcaacattagtatttagaacgcaaaaaatatatatatgtggatagattaaatttctttgtaaatatttatgggacaacgagtacgaaagccattttgaagattcaaaataacaaaattatcattttgttaaagtgttttgtaagagttcaaaaccttgaaggtttaaagtataagtaaatattcgtttgaagatttttaaatggattttttcctaaaactaaacgttgaataaaacttgtggagttgtggtattgcaaaccaaagttgtactatagagttggtgggtgtgaaaacttctttcattgggagacctatgatttgtagctatataccttttatgtagttgccaataagtcagtatataattagaatatgtataaaaacccttataaatttaataataatatttatgaaatgagataaatatttttactaacaacaattatttctaactttaggtatacttaatatataaaatatattaccaaaataaggagctcaaaatgtgatgttttctagtggacgcttatataaatgtgcgattgtcacacagtgtcatctctccctctccgtctccctctttctaaaatctgcggcacaaagtatatgaattaaggtaatcttcaattttatatttatttgtgtatatatatgtgtattagatgttgcaatattgtagattttgaacccggaatttaatacaaaaaaaattcttaaacccggaaaacaaaaactaggtgaaattaaaataaataaataaaaacgaaaaggtaaaatttgttaaaagctataagcgttatttattacttattcgaatattgcatgcattttgcctaccgtgatcatataacgaaatttgcaattcttacggcaaattgattctttggtgatcatcttggtttgtgcagctctatatatatttgcatccacttaacatgtttttttttgggtagttggcagcatcatgctatttatttatattctcttgttaatcatcaaataaactgaacaaattgaaaattaatttactttacataaactatccctttttgtgtagaaagcaacatgagtttgtggtatatcatagttgtgttcgtcttctttgcatctatattcattgcaaagaacacaagaaagacaaagaagaatctacctcccggaccaccaagacttcctataattggtaacttgcaccaattgggatcaaaacctcaccgttcgatgttcaaattatctgaaaaatatggacctctagtgtacctaaagcttggaaaggtaccgtctgttgtggcctcaactccagagacagtgaaggatgtcttgaaaacgtttgacaaagattgttgttcgcgagcttttttgacatatcctgcaagaatttcatacaatttgaaagatcttgcgtttgctccctatagcaaatattggaaggcggtacgaaagatgacggttgtcgaactctacaccgcgaaaagggtaaaatcgtttcgaaatataagagaagaagaagttgcctccttcgtcgagttcatcaaacattccgcttcgttggaggaaatagttaacttgaaccaaacgttagtgaaactctctgggagtgtaatttgtagagttggttttggaatcaatcttgaagggagcaaacttgagaatacttatgaggaagtcattcatggaaccatggaggtgctagggagttttgcagcatcagattacttcccggttattggtggaataatcgataggatcacggggttacataacaaatgtgagaaggtttttaagggaacagattcatttttcgaccattgtataaagcatcacctagaagatggtggtagtaaagatgatatagttgacttgctgctcaaggtagaaaggggagagattggacttggagagtttcaatttactcgaaaccacaccaaaggaattcttctagtaagtaatggtaacctaccaatctataacattacattattcttttgttaagtaatttgtttattttgataattacaggacattcttcttgctggagtagacacttctggccacacaataacatgggtgatgacacatttgattaaaaacccaagagttatgaagaaagcacaagccgaggtgagagaagtgataaaaaacaaagacaatatcacagaagaagatatagaaggactcgagtatctgaaaatggtggttaaagaaacattaaggataaacccacttgtgccacttctaactccaagagaggcttcaaaagatgtaaagatcggaggttataatattccaaagaaaacatggatccatgttaatatatgggctattcataggaatccaaacgtttggaaagatccagaagctttcattcccgagaggtttatggataaccagattgactataaagggttgaactttgagttgttgccgtttggtagcggaaggagaatatgccctggtattggaatgggtatggccttgatacacttgactcttatcaatcttctttatcgatttgattggaagcttccagaaggaatggaggttgaagatgttgatcttgaagaatcatatggacttgtctgtcctaagaaagttccacttgagctgatcccggtcctcactcaatggacttgattttatattattatagttcaagatgtaataatttggaaatatcttaaagttaaataaacaatcacttgagctgatcccggtacacttattgtcaccacattcgaactcgtgttcacgatcctttagcaagcgtttgagctcacctttgacatatgcgcgtttaataacaaacacacgaatattcaaacgaacatatatcaccttatcttgaaaaagttggcattattcgtttgtgggacatctttagtactctctctatttttaattaagtgtagtttgaagatatattttttttccgtgttgttttcacttttcaatgctaaaattaaatgtattttatagtttttaattaatcatatttttttattggttagattagttgtaattaatgatgtttttatagaaaagaaataaattaaataagatttgtatattttcttaatttatgtgcaaaaaccttaaactacaaatattaagaaacaaagaaagtatgatttattgtaaaataagcttatcatgaagatgttccgtgcaaaacacatccttgaaatagtaacagtgagataagatataaaacatcttattaataaaattttgtgattgattgaatttgactcccctgtaaaaaacaacaactgattttaaaaaccatacatagaaaactattttatagaacaacaataaatactagtttttcactatataaggacttgattggttcttgaaaattatatgtattgattattgggagatttgcaaaactagcctttttttactacccttttgcaacaataccctttcatgttgtccatttttaaaaatatctctccccttgaacaaaatgaccaaattaccctcatctaataaaaacatgtaattggaaactgaaattttcccgccaattttttggcgccaaaatattttttttcccgccaaaaaaaagtttccgccaaacttttttccaaccaaaaaaaaaaattcccgccaacaaaaaaatttcccgccaaatttttttttcgtaaaaaatttttcctcagccaaaaaaaatattttaaaaatccttgtaaatattttttagcgccaaatagatttacaagggattttaaaaggattttaaaagatttacaagagatttttaaaaagttttaaaaaatttacaagagattttaaaagagttttaaaagatttacaagagattttaaaagagttttaaaagatttacaagtaattttaaaaggttttaaaatcccttgtaaatctttcaaaacacttttaaaccctttaaaaatctttacaaatcctatgtaaatattttaaaaccctttaaaatcccttgtaaatattgtaaaacccttttaaaatcccttgtaaatattttaaaatccttttaaaacaattttaaaccctttaaaaatctttaaaagacctttgtaaatcttttaaatccctttaaaatctcttgtaaatcttttaaaacccttttaaaaatcccttgtaaatcttttaaaaaccttttaaaatcccttgtaaattacccttttaaaatcccttgtaaatcttataaaacccctttaaattgccttgtaaatcttttaaaactcttttaaaattccttgtaaatctatttcccgccaaaaaaaaaaattgacgggaaaaatatttttgaaaacaaaatttggcgggaaatgtttttcaaaaatttttggtgggaatttttttcgaaaaggtttggcgggaaaattttggcgggaaatttattttagaatattttaggcgaaaaaatattaatatttcattttgttaacctaaaacaatttccaaataagggtaaaatggtaattaaaaatttaaagagaatataaataaaaatggataaaacaaaagggtagagttgaaaaggggcatcatgaaaagggcatttgaaagaatttttcttgattatttgatatccaaaattttataatatatttttagaaaacgagttaaccattgtgggaggaaataactgaccttgtcttatatacaataaattgttgcaagtgtttagtttaaccattgtaacatttgatttaagaattattgtttaaatatttttaaactgggtgttttggaaagttatttttttttttaaataaaagttagaaattttgagaagataacatttttttggataattttcaataattctgtaagaattaattactcaaacaataaatattggtatcttgtcccaatctttaagttgaaatagagaatccaaagcaagtaatttaaaaagaaaatggttatgagattttacatcaaagtaaggtcatgggcttataattcaaaaactcttagtaaattttgaatctgggcatttgcccaacctgccacccccatagacgggcctggttttaatcataactttgaaattattatatttgggccacaattaggccattgaaacaggcccagttttgtagagacacggaatctaaaaaactgaagatgtttcagcgacgagatacaagtttctaggagaggaaattgaatcgagagagagagagagagacaacaatggatccagagcaaatcaacgagttcgtcgtgggctacttgaagaagaaaggattcagtagcgctgctaaagaccttgaatcttatcatcaccagaacaataatggtagctccttcacttctgtcgattatcataacgatcctgagctcacgaagctcattcgctccttttctcagtaatctctctccctatctctctctctcgtttcaattcttaatgcgaattgtgttttgaatttttgggaaagttttagtgtcttttgtgaattttgaaaaccgtaaggaaaaattatgtaagctccaacgtttttgagaatctaaaaatgaatataattcactttctgggtgaagtttatgtgaatatttctatcagtttatctgtcaaatttaagattttgatgacatctcagtggcaagaaattaggtttttttgtatggcttatgtagagagagctaatggtaatgaaatgtctgttcttttgtttgcagacaagaagatgatccaactcggtaccgtgaaggttacagcaaactaaggtcatgggcgtataattctctggatttatataaggtggggatttttttttgtgtatcccttggctgttttgggtagagacaggcttaattgaactgacgagatgattctaattttgtagcatgaattgcttcgagtgatgtatcctgtgtttattcattgttacatggatctggtggggaaagggcacactcaagaaggtacttgtcaatatagcaaattagatgtactgagtattttttttaccttcggtataagatttttggaaacagtgacttatgctactgtgggaaataatacgtctcttgtattccagctagagccttctttaacagcttccgcaaagatcatgagatggtacacttacgggatcttcagaagcttgaaggcgtgctttctccatctcatctagaggtttatgataaaccttatatggtcatataatattgataatggatttttttttttttttttttggttattatctttcttatgatcttggttcttatcaggagatggagtttgctcgttctcttagaaaaagcaaggttaacatcaagttttgtcaggtagacttgagtgaaaattgactagtagctgtaataggcaactgcttcgaggtttctggtctgattaactgaattccgtgactgcagacctctaatatgcttactgaatgttgcagtattcatatgagctgttacttcagtatctacatagtacagtatcgactttaatgcttggtattattaacgagcacatcaatttccaaggtaaatgtgtttctttctcttatatatgcgatagcttgtagcagttttttgagtagaaaattgaatcaattggtcatggataatttgttgcagtctactcgggacagcctacttcctcatccgatgacatagaagctgtcaccattgtcgggagttttcaggacactgctaatcacattaatcaaaaagaaatacagtggggagtacgtatttcccctaaagtttcttttctcttctatttttccagagttataacatgttgatgcctcatcccagggatgataacatatttgcgtagttaatagctacatatgcatttttcttttacagttgcttgaagattcactagaagatcgccttgagaagacaggaggtctgctgtctgattctgagaagggacaaggagaaagtaaagacggggatgcagatgatagtaaggtgatacatagcttcaacttagtcaataatttctgaactgaaatcccgtttttactcgtcaattgattctgtgtacagaaaagatccactgaaattggaaagcaaggctcttccttaaaaaagttgaagaaggacaaagcgggtaatgcaacagcaaaagttgcacgtctggagaccattacggtgtcaccggcgccgcgtgtaaaaccagaacttgccttgccagtaatgtactttcgaatcccttacccattttttgtgttgggatttgattaaaaaggaatgaacatgtgatatctatgggtgatgcatgattgtttaggagaaatgaacatagtctttgtatttgtcaaagactcaacctcctttaacataaatcaattttgctccatctccttgttttctctgtcaggtccacagatgtagagcaatccatccttgaagaccttagaaaccgtgtgcagttgagtagtgttgcaatgccatcagtcagcttttatacatttgtgaatactcataacgggtaatgtccacctctcctcctaattttaactacttatttgcaaccttgttactcactcttttattctcccccaggttaaactgttcatctatatctcatgatggatctctggttgctggtgggttctcagattcttcaataaaggtatgttattctcggatggttggatacatttccctttttttgttttcttcctctcttaaatgatgccaagtgacaattatggtgttcaggtctgggacatggctaagataggacaagctggcagtggtatgttaattctctgaaaaattgtattgacatccacgtttaagaatgatatttatctcatacgtttcgcttgtcatttttgttgatttctcataatgattgtttttgtttccatgagagttatagacactaagctgtctggttccaggtgctttgcaggctgaaaatgattcaagtgatcaaagcataggaccaaatggcagaagaagttatacattattactgggtcattcagggccagtttactcagccactttcagtccccctggagattttgttctatcttcttcagcagatacaacaagtatgtatctgtccatcactttacaaatccatacactggctcattagttcagacttttttagttaccaaccctgtattcataagtgcagtacgactgtggagcacaaaactaaatgctaatctcgtgtgctacaagggtcataattaccctgtatgggatgcccaggtatagttaattcaatttaacccatgtttcttacataacctgcaatttatggtggctggacatgtatatatattatatactcattttatggtgcagtttagccctttcggtcattactttgcaagctgttctcatgatcgtactgcacggatttggtcaatggaccgaatacaacctcttcggataatggcagggcatctatctgatgttgatgtgagtgtctccctcatcttcattgtttgggtttaatttgcaaaggttaaatcgaagggaccaattgagttgttaattaaatgcatggataaatttcttaaaacgttttattatgcaattgaagtcattaattcaccgtatcaatgtttacaatggtttatctaacattttacattgtttattgacttagattagtacccacttgttattttaacgtgaccctgacattcataatttaagaatcgtccagtttatagttgatccaaagattgttagccaatacgcttaaagtcataaggttacgatggattacttaactatttggattgacattaagtcagatcagtaacttcaatttttctttggatacctattgatgcgactttcgttgtacttgtcaaatgcatttgatttcagtgtgtacagtggcatcccaattgtaactacattgctaccggtagtagtgataagacggttagactctgggatgtgcaaactggagaatgtgtccggatattcattgggcacaggagtatggttttatcattggcgatgtctccagatgggagatatatggcttccggtgatgaagatggcactataatgatgtgggacctctcaactgctcgctgcatcactcctctcatgggccataattcatgtgtctggagtctctcatacaggtgaggtgtcaagagaagaagaaaatagctttatttgatcattcaacttttattgagttagtaatacacaatgaaaacgtaatatgatccttttttcagccaactattggttttggttgatatgctttatcatctctggaatttcttctaggacaacattttttaaagggtagttcagggttatgatatagagtggtatggtgtggctatttctattaattctacagtgacttactactgaactggtagatttttctatatccacgcactcttgtgttagctctaacatagggttcttgtcatgggttgtggaatgttgtataggcctaatgtgttgggtcgttaatggaatgactggttttggttggtaaaatccacttgcttggaatattggaaccgtaaactccactttgataaatcatagaactactacaatttatgactaacctgttttcctgtttcagcggggagggctctcttctggcttctggatccgcagactgcacagtgaaactgtgggacgtcacttcaagtaccaaattgacaaaggccgaggaaaagtgagtttgctctttcaagttgtattgttgttccctttgaatggtagattgttttgttaaaaacgatttatcatttgtgattgatcaggaatggaaactcgaacagattgcgctcactcaggactttccccaccaagtccacaccagttcacgctctccgggtaagttatgctttctttactagaattaattccaccattctctaaacaccgtggtatttctctcatccctaagtttatcatgttgtgcttgtgatcaacacatcccgataatgagtgaccaaacacttgattagaaccaaagtttcagggtgtgtgccaaacagattttatccatcagtatcatatagaacctttcctctaacacctaggattcgttgatcgaggcatacactaaaactcatgttttacattgatgcagttttctcggagaaatttgttgtttgctgcaggagcgatctctaaacccgcaaactgatcaaaacaatggtatcagatattgatgctttaacattcttacaagctgttgtagatctcagaagaaatcaggtgtagaatagttatctccaaagattatttgcttgtggcttttgtttctcatttctaaatcccaaaaatgttgaagattcttttaatgaacaactactcctgcttatgtatgccatgtgtcccaatccaggaatcacttatcttcgacttggagcagatttactttaagcatgtcaaagccacattcttccttctaataaacaccctagtttaagcatgtcacctctatcatgaatcaaaacctactcgaaatgaataaggcaaagaacaacaaccaaatattctcaaaatttataacgttaataaaatagaaacatgtaatgaatctccccaaaaagacatcgtgtgtcgagagaaatctttcttaagacagggtgggtggttatgtggtatgttgtgaattatgttttttcttagagaacatattttttagaaacttttcagatactaacatattttttattttgtgaaaacatttaattctcctaatttctagagacggtacttaaataaatagagagctgacgacaaaaataaaataaaattgagagctgaagaagaaaagaaagaaaaaaacatgttttgaaagacatttgcatcaaaattttggatgagacataaaatctaccaaaagtagatttggttgtgtgactagacaattgtctacatttggaattatatgtgggaatgtggtactcgttatcttcttatatgagatctctcccggtcagttttctcattactttttcgaaaacaaataaagttaacatgatgcatatctagtccatttttaccatatttttatactagtgtgtgcataaaaataatcttggacagactcagaactatatcatacaatattatttggaaagtatattttaaatgtaaccttatcttttgtaagtaattatatagatatgcaattagaaaaaaaaatttaaagagtaaattaattcatctctttaagaattaaaaagtcaaatactaatttaattaattaaacttaattaaaaacgaaatacattattaatttccaaaaaagtaaccaattaaaatcaacaaattggatttgatatctaaattatcatattaatttttttattaattattatagttcacttctcatctttatatgattctatttttgcgaaaaataatatcatcgctataaaaaaataattagaattttttcgcatatgccataatttaaatttttaaaaacgaatataaactattcaatacatgaaacaatattataacgggtcaaaaatagatttaagaaaactttctactgagtactgggtcataatatgaatatttatattcaatttcatatatattgttttgaaaatttataatcttatatactacaataattaataacatattagatttttttatgtgtatgatgtgattcaatttttaatacaagctggaaaatcctagaattgacgggtttagatcgatattaatacaagatggtatactacaggtgaaactctaaaattaacaatcaaaatacaagtgtataattttaaacactaaacaatataaataatatcaacaaaacatatacaactcgtagtttattatacatttaaaatcaaataaaataatatcgtatatttataatcatctttacaataaaagtttttagtttaactaaaatataagcttacatgcggtatactgcaagttaaaattataaataagcaaattaccatcacgatgtttgtaccttctcacatacacacctatcaaaaacttaaaacctttcaagacctcttggtatattcaaattaggatttcttcattcatggaatcattcttccaagggttttaggatgtcccatgaaatgattttggcagaagaggatgtaaaacttttcgaataaaacgtagacagcaaaacatatgtttttttgggagtttttagataattaaatcagagaatggggctgggcatatgagtaacctattcaagttcgggtagaacccgttcgggtagaacccgttcgggtttgggattaatgggtatatgatttactacccaatagaataattctaaatatttggttctggttcgggtcgggtccatttgggtttgcgtcagtttggataaaaagtttcaggccctaaaaatacccaaaaaaattgaaacgggtattttgtatgtagatagtgggtctccaaacaaaaaaaacttttagatttgttaagttttaataaatttaattatatttgaatatattttactaaattttgacaaacataacacataatttttgaatagtttagttgttttggatatttaggtccaaaattaattgacatatttagatttataattataattttagataattagattatattacgattaaatataattaatattttggatattaaattaatgtttgggtttttgaataccctctttggataaagggtaatttctggaccaatcggatatccacgggtttactaaaactctacctaataaggaaatttcctaaaattctaacccgctctaacccggttttttggttcggataatggattggttatcgggtctgttttttcgtgagccctatcaaagataatctaatatagggcccaattaggttcacaaatataaccaaaacattatacaaaaactaattttaagttaggccaaaaattagatcttttaatacaaaggaaacatgtttcttactagaacaacttgtatacaaattttacacatttacttaaaattatatatgttgtatttattataaaaataatatttttaaacaaattcaatccaatgcagcattatatccaaatagtaaaaacattgaaaaatattatgacaacacttttatattatactatttcttatgtaattcaaataaagtatacaatttagtttatacacaatattaatgtccgtgctatacagcacgggttatgatctagtaatgatgtaatacacaaccttatgtgggaaaccaacaacaagtaaactatatatcaattcaaatgacagattcactgctacaccacagttaaaaacaatcaatcatttctcatcgaaataaatctgccatcaaataattccaatgagtttttttttttttggataaaattccaaagaggttactagtgtgcataactccacgtggtaagtaaacccatagtggatgaatgttatgtctgcaattgataatatgtcaattttgggttaattagtttttagtaattttttaccaataaaattattccacttttagaaaataatcactgcagatttgtaactttcgttcactttgaaaacttttattgaattgaataaatttagctaatcatgttaactattagattataataaggcccaaaaacacttagatgaacccggttagtggttaatacttttactatatgatacttaattacttaccgatagcattgacagattaaaaaatacacaaaagctttgtcaaacaaagagatttgaaagacgaatcaaatctctctacatacagggaaaattatgaatagctacatgtcaccatctgtttaaagtaagatccaatgttctcatctgtatcttttgactatgattgatgactatgtgacctatatcatataaatacaacgtggtaaattgttatactcattaagctaccatagtccataatacactttaatttcccaattcacgatttcacattactcactaatctaacattttatgatcaatctattgagtattgaggattgatgaaacaaagaacgaaggtatacttaaatggagatgtcatataactcagaaagaacttcacatatacatttattaaaggaaaattagttttcttatgaaaataattagccattaattagaaactgaaaactcttaattagctttttcccatttttgtgtcggccatatgtaacgttggacccatcaactaggtcacaattggcatacgacaaatatacataactttaaaccattagatcttttctctttcattacaagctaaagtaattcaaatttagctaaataaatttaaactaaaactttggaaatgtggtttagattgttatcaaaagcttaagtgggtttgatcttgccgatgtggcttccaaaagaaaagtattaattggttgaagaaagtgacttttgtcatgcaacctagttgtatgtcatgatgtgaaattaagtgggaaaccaaaattcatattgacaaatccactaaactctttagatgataaagtagaagagcgtgtggaagtttcaaatatcatttcctttaagattacacaacaagagaaaggttgatccatcataaagacgaaatattctttaagtcatatacatggtctacaatttctcactaagatacaaagtaaaatcgataaatataataatgaacgtacgagtggtttccaagttgttctaaccaggtgctttgtcaagatcatcgatctatattcttacccgaaatacttacttaactattattacaaagttcgaataaccagttcttttactttgtgattagtttgagctttggtttgactcaatagaagacaaaagaaagaatagatgaaggagaggaccacacgagaagccaaaggagacagaaatggtcacttacctcgtggagttatacaaaagtagacataaacagacctgaacaaatttggatggtccatgaacagtactcttccttttcaatttttattgtcatctttctcttctgtcatttcatcatgatgtacttactattttgagaaactgcttcgttttccattgtcttttcgatcccttaacttcttttagaaaatgttcatacttaaaatattaaaggattccttaacatgcactacaaaaaaaaaattattatggattgtggattaccaatggtatagtactcatttggtttacttagatatttggtcattcataaactgaaaatctagaaacccaaataaatctgaaccggaatcaaagcgaaatttaaattctacacacttaatgtatttgttggactattgaaggaggaagcagccaaaaagggtaagagtcatatatatagatagaggtatttagatggtggagttccaatcaactagctttaaagtgttttgtgagaagggtgtgacagcaaaccaaacctacctatcgctctcatcatagtactttggtccacttattacaaaaccctaagaaaatgttctagtgtagggtctttgtttcctttgtctattcctttctaataccatctacttctgctcccattcactgatataaacctcttctcatagctattattgatagaaagagacagagaaagagaaagaaaaaaatcatctcctgaaaaaatctatccctttttagctctcatggacgcttcaatagtttcctcatccactgcttttccatatcaagattctctaaaccagagcatcgaagacgaagaaagagacgttcataattctagtcacgaactcaatctcatcgactgcatagacgacacaacgagtatcgttaacgaatctacaacatccacagaacaaaagcttttctcatgcaactattgtcaaagaactttctatagctcacaagcacttggtggtcaccaaaacgcacacaagagagagagaacgttggcgaagagaggacaacgtatggcagcgtcagcctcagcttttggacatccttacggtttctctccacttcctttccacggacagtacaacaaccataggtctttagggatccaagcgcattcgataagccacaagctaagttcttataacgggtttggtggtcactatggtcagatcaactggtcaagacttccatttgatcaacaaccagccataggtaaatttccctcaatggataattttcatcatcatcatcatcagatgatgatgatggctccttcagtaaattcacggtccaataacatcgatagcccaagcaacacaggacgggttctagaagggtcaccgactcttgaacaatggcacggagacaaaggattgttgttaagtacaagtcatcatgaagagcagcagaaacttgacttgtccctcaagctt

SEQ ID NO: 742 - DNA, 110680 bp, Arabidopsis thaliana
gaattcttttcgtaagtaatatgaacctctcactttgtaatatactttcattcttcacatgttgcataaattttaaaaatatgtactctttgattattacagaatattcttaacgctggaatagacacttctgcacaagttatgacatgggtgatgacatatttgatttcaaacccaagagttatgaagaaagcgcaagccgaggtgagagaagttataaaaaacaaagacgatatcattgaggaagatatagaacgactcgaatatctgaaaatggtagttaaagaaacgtttagggtattaccgctcgttccacttctaattccaagagaggcttcaaaagatgtaaagattggaggttatgacattccaaagaaaacatggatccatgtcaacatatgggctattcataggaatccaaacgtttggaaagatccagaagctttcatccccgagaggtttatggataaccagattgattataagggtttgaactttgagtttttgccgtttggtagcggaaggagaatgtgccctggtatagggatgggtatggctttggtacacttgactcttatcaatcttctttaccgatttgattggaagcttccggaaggaatggaggtagaagatgttgatcttgaagaatcatatggacttgtctgtcctaagaaagttccacttcagcttatcccggtccttacccaatggagttgattttatattttcatagttctaaatgtaacccttaagaagtatcctaaagttcttatccttatcactagatgagtatccacgctatgttgcgtttgtttttaatattcgtttttctaaatttcatatttatggaattatgtgtagacattagattattaaagacttatgttgagaaagttaactacaatgctaccatatgaaatgaacattaaaaaatagctgaaagaagtaatgtaaaacggttttttgaagtgttatgtgtctttacatttagcatgatgtacgtatcttatgttttttttggattgaggagaggcattatcatagttcgattatgcaatgtagcattgggagattttcaaaactgccgatatagaagccactacttcattttactgtttcgtgcaaaaacaagtacattcccagatgtcgtttacactctagctactgtatgatatcttgataatcatcaattgtcgatttacaaatgagcaatataatatgcacgagacacaacaatggttgatgactaaacttcagagaactttgaatccacttgtagttgtagagtatatttgcatattcaggaacttatatatatatatatatatatatatatatatatatatatatatatgtataaactaaggaaatactacataaatatattttctttttgagtttaactacatgaataagtaaaatatttacaaaacatacctggagttattctacaatggccagtaaaaaacattaaaaaaaaacttacacaaatccaatatatttatagaaatatcttattcataaaatatcataaaaagaatagcttaaaagatactaatagaaaaacatttcaaactttaagtttatgaagttttttatttataattagttagtgtttctaaataaaaaaaatgttgaaaaaacataaactttcatatttggaacgaaacaaacataaaatttaaaatgccatgtcaaaagcaattgtttttattgttttaaatttgaaaattcatgttgttttggatattattttttcatttctaaatcattcaaggagtgtatttgattattttggtggattttagaattggtctgcttttcagtgaatttcaaagatattctaatgattgttaacaaaaggcttttcgattgagtgtggttttataaactgctaaggagaattttggtatcaaagttagatacccctacacggctagtgatgaagaagacaacactaagaaaaccctgtgaattgtgaaaaagatttgttacctgcattattgttccatcactatctcacaacataaaatgtgtaagaataataacaaaacgtcttgcgtctccaatctccaaagctaaccaaaaaaaacaatcagaagaagaggaggaaagaggagtagagacgccaatagatctcacggactctcacctattgttaaaataacgccaataatttgttagtacgagatctagtaatagtagttttatttaaatacaaaaccctgtgaaagagatttgttaacttcaaaattgtacttttatttaaatactaaactgcagtaatagtggaaagactgaacaagagatcaaagtaagaatcagagcttaaacgagattatgagaaatatgagaacatgagacctgcacgattgaatgatgatgagacatgaaagggtttcggttcctttttttttacataccttaaatgttgtctactttttttttttttttcaccaaattcttatattaaaattaaaaagatacatgaagattagttttcatcggacaaacccgaataacaaacccgaataacaagtttgaaaattgaaaagttgaccaaacataactcaaacatagagacactagctgaagtaagtttgataggagaccatgagacgtttcgaaactaactaacacaagcatgcccatgagagaaatcgtaaacaacacaaaaacctcgactggtaagaaaatagtcaccgtaactagtgacattaaaacgaaattcaaaccatcaaacgtggttctaggttggaaacaacgtggatttgccttagacgcagacatagagacgtcggagaagtattcggtaaacaagcttcgctgacgatgggtgagatccaaatcaaaaaatgtggtactgaatcgggagtgaaatgggcctacaggagaagtatccggcgtaagcagagggaacccggaaaagtattcggtgaactgttgagagatgaaacgggaaaaggcaaaaggttggcaaagggagagacaaatgtatcccaagacgatgaaggcagatgatgagcgttgcacaatattaaggcagaccaaaataatatgcgtacaacccaataatcttaacgagcctttacgaaatctagaagttcccaagatgggacaagcccaatttaaagtcttcttccaaaaatgtgaagtgaggatttgacctaatccaagcgaggccaagaacaagaggcggcgacagttgacggaggtgacaaggtcatcgaccacaaagattaagagagggcaaagatcactagaaagaggagacgaggagacaacaaccatcagcttcacacataagagtcgattctcgtggctggggaaggagaggagaacagattcaacaacgaagtagccgctggttcttccaataggaggtggagcatgtcgggccggtgggccaaagatcttcagaaaagagatgccaccagatctgcactcgacgagatgcaacaacgagatggaaaatgatgagaggcggaaagacgggatacaaacttgaaaatttcgggacaaaacgcgtttggattcttcgggagatgagcagagaatcaaaaagaagacaacgtccgacgccgacgagccatagctacaccagcgtcgaaagacagaagtttttgaagtgtttcgagaatagcgtctgggagagtttcaacttttatggttaatggtctttttttttattatacctcttttataaggttttttaaagatttcttttttaataagtttttttttggttttaaaaggttttaaaagttaccataaagatgactaggggtccaaacctccataagcccgcatatacatcaaggagcatttttgaaaaagatatttttataaatattttatggtaaaagacgtttttgaaaaaagtaccgtgaaaaggcatttctcaaaatattacaaacttataatcattaaataatttcttttagtattttagtaaattttattcattgacttttaataaatccatgccaccacatcaatgtgtttgctttttttgatcgattgataaagaagactcggaaaaaactctttttttttggattttccatttgcataatttttagattatccaattaatatacaaattatctgccatttggaattatacttatattaataactatcgtccaattttaaatttcatttgctctacaaacttgaaaaaaaaaacttgaatatataaccctaaaagtagagttcaaatgtgagcatccacattagttatttttttcagtgtctattgatgattatttttaaatatcaaagaataaaaaagcaaaagaaagaaatatagatgtctttaaaatgaaaattatgtttttctagaactatttgagacatctatttttgaaatgtctttacttttaatattattttatgtgaaaacatctgaaaagttgttagaatgagaatggtctaatattttcaactgcacgcttatgtaattgaaacgtcaccacagcgccaaatgctctataaataattaaatatgaaatcgtcacaacacaaagccacaacacaaagccacaaaacaatctctatcttatccatctaattttctttggtcatcactatcttatccatctctccctctctaattcatcaggacagagcataagaattgaaggtaatcctacggatctcggcttctatgatgttgcaatattgtagaagaaactctttaaattctcgaatactttaattttaactatatgtgttcttaaactaagaatcaaagtaagtgatcaaattcaaaattgtactcttttttttctgtgtaggtagcaaaatgagtttgtggtatatcattgttgcattcgtcttcttttcatctatgatcattgtaaggatcattagaaagacaaagaagaatctaccacccggacccccaagacttcctataattggaaacttgcaccaactaggatcaaaacctcatcgttcgatgttcaaattatccgaaacatatggacctctaatgtccctaaagtttggaagcgtgtctactgtggtggcatctacaccagagacagtgaaggaagtcttaaaaacatttgacgtagaatgttgttcgcgaccaaatatgacctatcccgcaagagttacgtacaatttaaaagatctatgcttttctccttatagcaaatattggagggaggtacgaaagatgacagttgttgaactctacaccgcaaaaagggtgcaatcatttcaacatacaagaaaagaagaagttgcagccctcgttgatttcatcaaacaagctgcttcattggagaaaccagttaacttgaacaagaagttaatgaaactatcaggaagtgtgatttgtagagttgcatttggtatcaatcttcaaggaagtaaacttgagaatacttatgaggaagtcattcaaggaactgtggagttggtggggagttttgcagcagcagattactttccggttgttggtagaatcatcgataggatcacagggttacatagcaaatgtgagaagcttttcaaggcaatggatgcattttttgatcaatctataaagcatcacctagaagatgagattattaaagatgatataattgacttgcttctcaagatggaaaggggagagactacacttggggagtttcaacttactcgcgaccacaccaaaggaattcttgccgtaagtaatgtgaacctctcaatttgtaacatactttcattcttcacatgttgcattaattttaaaaatacatactgactttgattattacagaatattctcaacgctggaatagacacttctgcacaagttatgacatgggtgatgacatatttgatttcaaacccaagagttttgaagaaagcgcaggccgaggtgagagaagtgataaaacacaaagatgatatcatagaagaagatatagaacgactccaatatctgaaaatggtaattaaagaaacgtttaggataaacccacttgtgccacttctaattccaagagaggcttcaaaagatgtaaagatcggaggttataatattccaaagaaaacatggatccatgttaatatatgggctattcataggaatccaaacgtttggaaagatccagaagctttcattcccgagaggtttatggatagccagattgactataaagggttgaactttgagttgttgccgtttggtagcggaaggagaatatgccctggtattggaatgggtatggccttggttcacttgactcttatcaatcttctttatcgattcgattggaagcttccagaaggaatgaaggtagcagatgttgatcttgaagaatcatatggacttgtttgtcctaagaaaatcccacttcagcttatcccggtccttacccaatggacttgatgttattttttcatatttcaaaatgtaacccttaggaagtatcttaaagttcttatcattattatatatgaataaagaaattatttgatgaataatgctcattttatttggtaacgtaaccttaacttttaataaccattgctaaagttagtctaacaaatttagagatttaattacacaaaagagactcttatcaatcattcgttccacatattttgttcattccacttataatgttgatcagttttttctgcattgccctttcagttgtcactatttaaatccctactcacaatcgtttcgtaaacattggaccccagctattgatatgcttgctggaaattttggcattacctctcatattcaaataaacatatacctcatattgaaaaaattggcattattaattcgtttgtgtggacaaatatattatgctttattgcaaagtaaacttatcgtgaaggaattctatccaaccatcctttgaataaacaaggattgataagactccaaaaactattactataattttgtggttgagtgatagagattcccctgtaacaaacaaggattgataaaagacccgtgaaaactctcttttaaaagaattcacgtaaaatatattttatcaaacagacaataaatactaggatttcaatataaatataattgccgaccaggaaaatatgtggtggttcatttcttttggacaccgccacaccggtcaatttgatcagtcatcttatgaagattattacatatgtgtttgacgtaagacgtacattataaaagggcaatttgtatataataaattattagtttaattttccaaaaaacaccactaaaatatattatttccaaaagtaacaaaactaaaactaaacaataccttcaaaaatcaaaactaaaccctaaatcttaagcaaccatatcccataaaaactatattctaaacttcaaattgaaattttaccattgaacatcaattttggtgtttatggtatttttgaaaaacatttttagtggttttttagaaaatcctaagaatattgaatacccaagcaggacaaaataaaataatttgagacagcatgagaaatggaatcgttgagttggatacaggtaggaatccgaagaaataattatgtttcaaagacatgatatactgcaagaaaacatagtaaatttttaccaattttcctatgaaaattttggtacgaaaaaaaaaccatatacctacaacctttttatgaatattttgatagaaaaatggtaaaaaaaatttatgatttttttacaaaatattttacgaattttcctacaattttttttttgtataaataacatgcatatatatatataaatattttacaataattttgaattatatcataaataagatcaacattaataaaataaatgatttttttttgtaagatgtgtttggcgagacattatttaataaaaatggtaaactataaaatatatatattttataaatatatataatttgttaacttttatatatagtaacttcaaaaaataaaacgttttgcggtataccgcgggttaaaatctaactatacttataatacatataataataccaaaatcgttgctaagaatcagacctagatacgtcgccggcgctgctaatcaatcctcgatcgaattccttttaatacactgtcacggatatgaatatctctatcaggtttgtcgtgtcacctgattcttgcttcaagattacttctttataccattaaagtttggatttagcttctggtttctcatctactaaaaaaataattattaaaagcaacattagtatttagaacgcaaaaaatatatatatgtggatagattaaatttctttgtaaatatttatgggacaacgagtacgaaagccattttgaagattcaaaataacaaaattatcattttgttaaagtgttttgtaagagttcaaaaccttgaaggtttaaagtataagtaaatattcgtttgaagatttttaaatggattttttcctaaaactaaacgttgaataaaacttgtggagttgtggtattgcaaaccaaagttgtactatagagttggtgggtgtgaaaacttctttcattgggagacctatgatttgtagctatataccttttatgtagttgccaataagtcagtatataattagaatatgtataaaaacccttataaatttaataataatatttatgaaatgagataaatatttttactaacaacaattatttctaactttaggtatacttaatatataaaatatattaccaaaataaggagctcaaaatgtgatgttttctagtggacgcttatataaatgtgcgattgtcacacagtgtcatctctccctctccgtctccctctttctaaaatctgcggcacaaagtatatgaattaaggtaatcttcaattttatatttatttgtgtatatatatgtgtattagatgttgcaatattgtagattttgaacccggaatttaatacaaaaaaaattcttaaacccggaaaacaaaaactaggtgaaattaaaataaataaataaaaacgaaaaggtaaaatttgttaaaagctataagcgttatttattacttattcgaatattgcatgcattttgcctaccgtgatcatataacgaaatttgcaattcttacggcaaattgattctttggtgatcatcttggtttgtgcagctctatatatatttgcatccacttaacatgtttttttttgggtagttggcagcatcatgctatttatttatattctcttgttaatcatcaaataaactgaacaaattgaaaattaatttactttacataaactatccctttttgtgtagaaagcaacatgagtttgtggtatatcatagttgtgttcgtcttctttgcatctatattcattgcaaagaacacaagaaagacaaagaagaatctacctcccggaccaccaagacttcctataattggtaacttgcaccaattgggatcaaaacctcaccgttcgatgttcaaattatctgaaaaatatggacctctagtgtacctaaagcttggaaaggtaccgtctgttgtggcctcaactccagagacagtgaaggatgtcttgaaaacgtttgacaaagattgttgttcgcgagcttttttgacatatcctgcaagaatttcatacaatttgaaagatcttgcgtttgctccctatagcaaatattggaaggcggtacgaaagatgacggttgtcgaactctacaccgcgaaaagggtaaaatcgtttcgaaatataagagaagaagaagttgcctccttcgtcgagttcatcaaacattccgcttcgttggaggaaatagttaacttgaaccaaacgttagtgaaactctctgggagtgtaatttgtagagttggttttggaatcaatcttgaagggagcaaacttgagaatacttatgaggaagtcattcatggaaccatggaggtgctagggagttttgcagcatcagattacttcccggttattggtggaataatcgataggatcacggggttacataacaaatgtgagaaggtttttaagggaacagattcatttttcgaccattgtataaagcatcacctagaagatggtggtagtaaagatgatatagttgacttgctgctcaaggtagaaaggggagagattggacttggagagtttcaatttactcgaaaccacaccaaaggaattcttctagtaagtaatggtaacctaccaatctataacattacattattcttttgttaagtaatttgtttattttgataattacaggacattcttcttgctggagtagacacttctggccacacaataacatgggtgatgacacatttgattaaaaacccaagagttatgaagaaagcacaagccgaggtgagagaagtgataaaaaacaaagacaatatcacagaagaagatatagaaggactcgagtatctgaaaatggtggttaaagaaacattaaggataaacccacttgtgccacttctaactccaagagaggcttcaaaagatgtaaagatcggaggttataatattccaaagaaaacatggatccatgttaatatatgggctattcataggaatccaaacgtttggaaagatccagaagctttcattcccgagaggtttatggataaccagattgactataaagggttgaactttgagttgttgccgtttggtagcggaaggagaatatgccctggtattggaatgggtatggccttgatacacttgactcttatcaatcttctttatcgatttgattggaagcttccagaaggaatggaggttgaagatgttgatcttgaagaatcatatggacttgtctgtcctaagaaagttccacttgagctgatcccggtcctcactcaatggacttgattttatattattatagttcaagatgtaataatttggaaatatcttaaagttaaataaacaatcacttgagctgatcccggtacacttattgtcaccacattcgaactcgtgttcacgatcctttagcaagcgtttgagctcacctttgacatatgcgcgtttaataacaaacacacgaatattcaaacgaacatatatcaccttatcttgaaaaagttggcattattcgtttgtgggacatctttagtactctctctatttttaattaagtgtagtttgaagatatattttttttccgtgttgttttcacttttcaatgctaaaattaaatgtattttatagtttttaattaatcatatttttttattggttagattagttgtaattaatgatgtttttatagaaaagaaataaattaaataagatttgtatattttcttaatttatgtgcaaaaaccttaaactacaaatattaagaaacaaagaaagtatgatttattgtaaaataagcttatcatgaagatgttccgtgcaaaacacatccttgaaatagtaacagtgagataagatataaaacatcttattaataaaattttgtgattgattgaatttgactcccctgtaaaaaacaacaactgattttaaaaaccatacatagaaaactattttatagaacaacaataaatactagtttttcactatataaggacttgattggttcttgaaaattatatgtattgattattgggagatttgcaaaactagcctttttttactacccttttgcaacaataccctttcatgttgtccatttttaaaaatatctctccccttgaacaaaatgaccaaattaccctcatctaataaaaacatgtaattggaaactgaaattttcccgccaattttttggcgccaaaatattttttttcccgccaaaaaaaagtttccgccaaacttttttccaaccaaaaaaaaaaattcccgccaacaaaaaaatttcccgccaaatttttttttcgtaaaaaatttttcctcagccaaaaaaaatattttaaaaatccttgtaaatattttttagcgccaaatagatttacaagggattttaaaaggattttaaaagatttacaagagatttttaaaaagttttaaaaaatttacaagagattttaaaagagttttaaaagatttacaagagattttaaaagagttttaaaagatttacaagtaattttaaaaggttttaaaatcccttgtaaatctttcaaaacacttttaaaccctttaaaaatctttacaaatcctatgtaaatattttaaaaccctttaaaatcccttgtaaatattgtaaaacccttttaaaatcccttgtaaatattttaaaatccttttaaaacaattttaaaccctttaaaaatctttaaaagacctttgtaaatcttttaaatccctttaaaatctcttgtaaatcttttaaaacccttttaaaaatcccttgtaaatcttttaaaaaccttttaaaatcccttgtaaattacccttttaaaatcccttgtaaatcttataaaacccctttaaattgccttgtaaatcttttaaaactcttttaaaattccttgtaaatctatttcccgccaaaaaaaaaaattgacgggaaaaatatttttgaaaacaaaatttggcgggaaatgtttttcaaaaatttttggtgggaatttttttcgaaaaggtttggcgggaaaattttggcgggaaatttattttagaatattttaggcgaaaaaatattaatatttcattttgttaacctaaaacaatttccaaataagggtaaaatggtaattaaaaatttaaagagaatataaataaaaatggataaaacaaaagggtagagttgaaaaggggcatcatgaaaagggcatttgaaagaatttttcttgattatttgatatccaaaattttataatatatttttagaaaacgagttaaccattgtgggaggaaataactgaccttgtcttatatacaataaattgttgcaagtgtttagtttaaccattgtaacatttgatttaagaattattgtttaaatatttttaaactgggtgttttggaaagttatttttttttttaaataaaagttagaaattttgagaagataacatttttttggataattttcaataattctgtaagaattaattactcaaacaataaatattggtatcttgtcccaatctttaagttgaaatagagaatccaaagcaagtaatttaaaaagaaaatggttatgagattttacatcaaagtaaggtcatgggcttataattcaaaaactcttagtaaattttgaatctgggcatttgcccaacctgccacccccatagacgggcctggttttaatcataactttgaaattattatatttgggccacaattaggccattgaaacaggcccagttttgtagagacacggaatctaaaaaactgaagatgtttcagcgacgagatacaagtttctaggagaggaaattgaatcgagagagagagagagagacaacaatggatccagagcaaatcaacgagttcgtcgtgggctacttgaagaagaaaggattcagtagcgctgctaaagaccttgaatcttatcatcaccagaacaataatggtagctccttcacttctgtcgattatcataacgatcctgagctcacgaagctcattcgctccttttctcagtaatctctctccctatctctctctctcgtttcaattcttaatgcgaattgtgttttgaatttttgggaaagttttagtgtcttttgtgaattttgaaaaccgtaaggaaaaattatgtaagctccaacgtttttgagaatctaaaaatgaatataattcactttctgggtgaagtttatgtgaatatttctatcagtttatctgtcaaatttaagattttgatgacatctcagtggcaagaaattaggtttttttgtatggcttatgtagagagagctaatggtaatgaaatgtctgttcttttgtttgcagacaagaagatgatccaactcggtaccgtgaaggttacagcaaactaaggtcatgggcgtataattctctggatttatataaggtggggatttttttttgtgtatcccttggctgttttgggtagagacaggcttaattgaactgacgagatgattctaattttgtagcatgaattgcttcgagtgatgtatcctgtgtttattcattgttacatggatctggtggggaaagggcacactcaagaaggtacttgtcaatatagcaaattagatgtactgagtattttttttaccttcggtataagatttttggaaacagtgacttatgctactgtgggaaataatacgtctcttgtattccagctagagccttctttaacagcttccgcaaagatcatgagatggtacacttacgggatcttcagaagcttgaaggcgtgctttctccatctcatctagaggtttatgataaaccttatatggtcatataatattgataatggatttttttttttttttttttggttattatctttcttatgatcttggttcttatcaggagatggagtttgctcgttctcttagaaaaagcaaggttaacatcaagttttgtcaggtagacttgagtgaaaattgactagtagctgtaataggcaactgcttcgaggtttctggtctgattaactgaattccgtgactgcagacctctaatatgcttactgaatgttgcagtattcatatgagctgttacttcagtatctacatagtacagtatcgactttaatgcttggtattattaacgagcacatcaatttccaaggtaaatgtgtttctttctcttatatatgcgatagcttgtagcagttttttgagtagaaaattgaatcaattggtcatggataatttgttgcagtctactcgggacagcctacttcctcatccgatgacatagaagctgtcaccattgtcgggagttttcaggacactgctaatcacattaatcaaaaagaaatacagtggggagtacgtatttcccctaaagtttcttttctcttctatttttccagagttataacatgttgatgcctcatcccagggatgataacatatttgcgtagttaatagctacatatgcatttttcttttacagttgcttgaagattcactagaagatcgccttgagaagacaggaggtctgctgtctgattctgagaagggacaaggagaaagtaaagacggggatgcagatgatagtaaggtgatacatagcttcaacttagtcaataatttctgaactgaaatcccgtttttactcgtcaattgattctgtgtacagaaaagatccactgaaattggaaagcaaggctcttccttaaaaaagttgaagaaggacaaagcgggtaatgcaacagcaaaagttgcacgtctggagaccattacggtgtcaccggcgccgcgtgtaaaaccagaacttgccttgccagtaatgtactttcgaatcccttacccattttttgtgttgggatttgattaaaaaggaatgaacatgtgatatctatgggtgatgcatgattgtttaggagaaatgaacatagtctttgtatttgtcaaagactcaacctcctttaacataaatcaattttgctccatctccttgttttctctgtcaggtccacagatgtagagcaatccatccttgaagaccttagaaaccgtgtgcagttgagtagtgttgcaatgccatcagtcagcttttatacatttgtgaatactcataacgggtaatgtccacctctcctcctaattttaactacttatttgcaaccttgttactcactcttttattctcccccaggttaaactgttcatctatatctcatgatggatctctggttgctggtgggttctcagattcttcaataaaggtatgttattctcggatggttggatacatttccctttttttgttttcttcctctcttaaatgatgccaagtgacaattatggtgttcaggtctgggacatggctaagataggacaagctggcagtggtatgttaattctctgaaaaattgtattgacatccacgtttaagaatgatatttatctcatacgtttcgcttgtcatttttgttgatttctcataatgattgtttttgtttccatgagagttatagacactaagctgtctggttccaggtgctttgcaggctgaaaatgattcaagtgatcaaagcataggaccaaatggcagaagaagttatacattattactgggtcattcagggccagtttactcagccactttcagtccccctggagattttgttctatcttcttcagcagatacaacaagtatgtatctgtccatcactttacaaatccatacactggctcattagttcagacttttttagttaccaaccctgtattcataagtgcagtacgactgtggagcacaaaactaaatgctaatctcgtgtgctacaagggtcataattaccctgtatgggatgcccaggtatagttaattcaatttaacccatgtttcttacataacctgcaatttatggtggctggacatgtatatatattatatactcattttatggtgcagtttagccctttcggtcattactttgcaagctgttctcatgatcgtactgcacggatttggtcaatggaccgaatacaacctcttcggataatggcagggcatctatctgatgttgatgtgagtgtctccctcatcttcattgtttgggtttaatttgcaaaggttaaatcgaagggaccaattgagttgttaattaaatgcatggataaatttcttaaaacgttttattatgcaattgaagtcattaattcaccgtatcaatgtttacaatggtttatctaacattttacattgtttattgacttagattagtacccacttgttattttaacgtgaccctgacattcataatttaagaatcgtccagtttatagttgatccaaagattgttagccaatacgcttaaagtcataaggttacgatggattacttaactatttggattgacattaagtcagatcagtaacttcaatttttctttggatacctattgatgcgactttcgttgtacttgtcaaatgcatttgatttcagtgtgtacagtggcatcccaattgtaactacattgctaccggtagtagtgataagacggttagactctgggatgtgcaaactggagaatgtgtccggatattcattgggcacaggagtatggttttatcattggcgatgtctccagatgggagatatatggcttccggtgatgaagatggcactataatgatgtgggacctctcaactgctcgctgcatcactcctctcatgggccataattcatgtgtctggagtctctcatacaggtgaggtgtcaagagaagaagaaaatagctttatttgatcattcaacttttattgagttagtaatacacaatgaaaacgtaatatgatccttttttcagccaactattggttttggttgatatgctttatcatctctggaatttcttctaggacaacattttttaaagggtagttcagggttatgatatagagtggtatggtgtggctatttctattaattctacagtgacttactactgaactggtagatttttctatatccacgcactcttgtgttagctctaacatagggttcttgtcatgggttgtggaatgttgtataggcctaatgtgttgggtcgttaatggaatgactggttttggttggtaaaatccacttgcttggaatattggaaccgtaaactccactttgataaatcatagaactactacaatttatgactaacctgttttcctgtttcagcggggagggctctcttctggcttctggatccgcagactgcacagtgaaactgtgggacgtcacttcaagtaccaaattgacaaaggccgaggaaaagtgagtttgctctttcaagttgtattgttgttccctttgaatggtagattgttttgttaaaaacgatttatcatttgtgattgatcaggaatggaaactcgaacagattgcgctcactcaggactttccccaccaagtccacaccagttcacgctctccgggtaagttatgctttctttactagaattaattccaccattctctaaacaccgtggtatttctctcatccctaagtttatcatgttgtgcttgtgatcaacacatcccgataatgagtgaccaaacacttgattagaaccaaagtttcagggtgtgtgccaaacagattttatccatcagtatcatatagaacctttcctctaacacctaggattcgttgatcgaggcatacactaaaactcatgttttacattgatgcagttttctcggagaaatttgttgtttgctgcaggagcgatctctaaacccgcaaactgatcaaaacaatggtatcagatattgatgctttaacattcttacaagctgttgtagatctcagaagaaatcaggtgtagaatagttatctccaaagattatttgcttgtggcttttgtttctcatttctaaatcccaaaaatgttgaagattcttttaatgaacaactactcctgcttatgtatgccatgtgtcccaatccaggaatcacttatcttcgacttggagcagatttactttaagcatgtcaaagccacattcttccttctaataaacaccctagtttaagcatgtcacctctatcatgaatcaaaacctactcgaaatgaataaggcaaagaacaacaaccaaatattctcaaaatttataacgttaataaaatagaaacatgtaatgaatctccccaaaaagacatcgtgtgtcgagagaaatctttcttaagacagggtgggtggttatgtggtatgttgtgaattatgttttttcttagagaacatattttttagaaacttttcagatactaacatattttttattttgtgaaaacatttaattctcctaatttctagagacggtacttaaataaatagagagctgacgacaaaaataaaataaaattgagagctgaagaagaaaagaaagaaaaaaacatgttttgaaagacatttgcatcaaaattttggatgagacataaaatctaccaaaagtagatttggttgtgtgactagacaattgtctacatttggaattatatgtgggaatgtggtactcgttatcttcttatatgagatctctcccggtcagttttctcattactttttcgaaaacaaataaagttaacatgatgcatatctagtccatttttaccatatttttatactagtgtgtgcataaaaataatcttggacagactcagaactatatcatacaatattatttggaaagtatattttaaatgtaaccttatcttttgtaagtaattatatagatatgcaattagaaaaaaaaatttaaagagtaaattaattcatctctttaagaattaaaaagtcaaatactaatttaattaattaaacttaattaaaaacgaaatacattattaatttccaaaaaagtaaccaattaaaatcaacaaattggatttgatatctaaattatcatattaatttttttattaattattatagttcacttctcatctttatatgattctatttttgcgaaaaataatatcatcgctataaaaaaataattagaattttttcgcatatgccataatttaaatttttaaaaacgaatataaactattcaatacatgaaacaatattataacgggtcaaaaatagatttaagaaaactttctactgagtactgggtcataatatgaatatttatattcaatttcatatatattgttttgaaaatttataatcttatatactacaataattaataacatattagatttttttatgtgtatgatgtgattcaatttttaatacaagctggaaaatcctagaattgacgggtttagatcgatattaatacaagatggtatactacaggtgaaactctaaaattaacaatcaaaatacaagtgtataattttaaacactaaacaatataaataatatcaacaaaacatatacaactcgtagtttattatacatttaaaatcaaataaaataatatcgtatatttataatcatctttacaataaaagtttttagtttaactaaaatataagcttacatgcggtatactgcaagttaaaattataaataagcaaattaccatcacgatgtttgtaccttctcacatacacacctatcaaaaacttaaaacctttcaagacctcttggtatattcaaattaggatttcttcattcatggaatcattcttccaagggttttaggatgtcccatgaaatgattttggcagaagaggatgtaaaacttttcgaataaaacgtagacagcaaaacatatgtttttttgggagtttttagataattaaatcagagaatggggctgggcatatgagtaacctattcaagttcgggtagaacccgttcgggtagaacccgttcgggtttgggattaatgggtatatgatttactacccaatagaataattctaaatatttggttctggttcgggtcgggtccatttgggtttgcgtcagtttggataaaaagtttcaggccctaaaaatacccaaaaaaattgaaacgggtattttgtatgtagatagtgggtctccaaacaaaaaaaacttttagatttgttaagttttaataaatttaattatatttgaatatattttactaaattttgacaaacataacacataatttttgaatagtttagttgttttggatatttaggtccaaaattaattgacatatttagatttataattataattttagataattagattatattacgattaaatataattaatattttggatattaaattaatgtttgggtttttgaataccctctttggataaagggtaatttctggaccaatcggatatccacgggtttactaaaactctacctaataaggaaatttcctaaaattctaacccgctctaacccggttttttggttcggataatggattggttatcgggtctgttttttcgtgagccctatcaaagataatctaatatagggcccaattaggttcacaaatataaccaaaacattatacaaaaactaattttaagttaggccaaaaattagatcttttaatacaaaggaaacatgtttcttactagaacaacttgtatacaaattttacacatttacttaaaattatatatgttgtatttattataaaaataatatttttaaacaaattcaatccaatgcagcattatatccaaatagtaaaaacattgaaaaatattatgacaacacttttatattatactatttcttatgtaattcaaataaagtatacaatttagtttatacacaatattaatgtccgtgctatacagcacgggttatgatctagtaatgatgtaatacacaaccttatgtgggaaaccaacaacaagtaaactatatatcaattcaaatgacagattcactgctacaccacagttaaaaacaatcaatcatttctcatcgaaataaatctgccatcaaataattccaatgagtttttttttttttggataaaattccaaagaggttactagtgtgcataactccacgtggtaagtaaacccatagtggatgaatgttatgtctgcaattgataatatgtcaattttgggttaattagtttttagtaattttttaccaataaaattattccacttttagaaaataatcactgcagatttgtaactttcgttcactttgaaaacttttattgaattgaataaatttagctaatcatgttaactattagattataataaggcccaaaaacacttagatgaacccggttagtggttaatacttttactatatgatacttaattacttaccgatagcattgacagattaaaaaatacacaaaagctttgtcaaacaaagagatttgaaagacgaatcaaatctctctacatacagggaaaattatgaatagctacatgtcaccatctgtttaaagtaagatccaatgttctcatctgtatcttttgactatgattgatgactatgtgacctatatcatataaatacaacgtggtaaattgttatactcattaagctaccatagtccataatacactttaatttcccaattcacgatttcacattactcactaatctaacattttatgatcaatctattgagtattgaggattgatgaaacaaagaacgaaggtatacttaaatggagatgtcatataactcagaaagaacttcacatatacatttattaaaggaaaattagttttcttatgaaaataattagccattaattagaaactgaaaactcttaattagctttttcccatttttgtgtcggccatatgtaacgttggacccatcaactaggtcacaattggcatacgacaaatatacataactttaaaccattagatcttttctctttcattacaagctaaagtaattcaaatttagctaaataaatttaaactaaaactttggaaatgtggtttagattgttatcaaaagcttaagtgggtttgatcttgccgatgtggcttccaaaagaaaagtattaattggttgaagaaagtgacttttgtcatgcaacctagttgtatgtcatgatgtgaaattaagtgggaaaccaaaattcatattgacaaatccactaaactctttagatgataaagtagaagagcgtgtggaagtttcaaatatcatttcctttaagattacacaacaagagaaaggttgatccatcataaagacgaaatattctttaagtcatatacatggtctacaatttctcactaagatacaaagtaaaatcgataaatataataatgaacgtacgagtggtttccaagttgttctaaccaggtgctttgtcaagatcatcgatctatattcttacccgaaatacttacttaactattattacaaagttcgaataaccagttcttttactttgtgattagtttgagctttggtttgactcaatagaagacaaaagaaagaatagatgaaggagaggaccacacgagaagccaaaggagacagaaatggtcacttacctcgtggagttatacaaaagtagacataaacagacctgaacaaatttggatggtccatgaacagtactcttccttttcaatttttattgtcatctttctcttctgtcatttcatcatgatgtacttactattttgagaaactgcttcgttttccattgtcttttcgatcccttaacttcttttagaaaatgttcatacttaaaatattaaaggattccttaacatgcactacaaaaaaaaaattattatggattgtggattaccaatggtatagtactcatttggtttacttagatatttggtcattcataaactgaaaatctagaaacccaaataaatctgaaccggaatcaaagcgaaatttaaattctacacacttaatgtatttgttggactattgaaggaggaagcagccaaaaagggtaagagtcatatatatagatagaggtatttagatggtggagttccaatcaactagctttaaagtgttttgtgagaagggtgtgacagcaaaccaaacctacctatcgctctcatcatagtactttggtccacttattacaaaaccctaagaaaatgttctagtgtagggtctttgtttcctttgtctattcctttctaataccatctacttctgctcccattcactgatataaacctcttctcatagctattattgatagaaagagacagagaaagagaaagaaaaaaatcatctcctgaaaaaatctatccctttttagctctcatggacgcttcaatagtttcctcatccactgcttttccatatcaagattctctaaaccagagcatcgaagacgaagaaagagacgttcataattctagtcacgaactcaatctcatcgactgcatagacgacacaacgagtatcgttaacgaatctacaacatccacagaacaaaagcttttctcatgcaactattgtcaaagaactttctatagctcacaagcacttggtggtcaccaaaacgcacacaagagagagagaacgttggcgaagagaggacaacgtatggcagcgtcagcctcagcttttggacatccttacggtttctctccacttcctttccacggacagtacaacaaccataggtctttagggatccaagcgcattcgataagccacaagctaagttcttataacgggtttggtggtcactatggtcagatcaactggtcaagacttccatttgatcaacaaccagccataggtaaatttccctcaatggataattttcatcatcatcatcatcagatgatgatgatggctccttcagtaaattcacggtccaataacatcgatagcccaagcaacacaggacgggttctagaagggtcaccgactcttgaacaatggcacggagacaaaggattgttgttaagtacaagtcatcatgaagagcagcagaaacttgacttgtccctcaagctttgagattctttttcttgattcttgaatttagtgtctttttactgttttttcatgtgattgttagtactattttgtgtatatttttttctagtaaagataatctaatgtacatctttttcacatatctactttagtctgagatttgtaaactattaactatacattaatggatttcaagtagacatccaacaaccgtataaagtatagagtaaaggaaaaaagagaagaaaagtgaatattgagatctgtgggaagatttgatttcagagtcacaagaaaaaggaattaatattataattcaaagttaggttacctaaaagttagaacaatcattctatttgtttaaaagttgctaataagacatttaaacagaacaaaacagatagaaataaactatgaagacagttgctgtgtaggatgattgtgacactaaaagcaaaagagtactagaagaaaaattaaacacaatatcaaatacaattctttggtagtatataccaaaatacatgtaacgttaaataaactaataaagcatccaatggggttctctttgttagagattattagaagggcatcacattgctccatatgtaagaaaacattaaaagacaaaacttgtcatagatgttgctatcatcacttcacgcgtgttttcgacaaatggtcgaaacagtattcaccaaataaccaagaacttctctcgactagctaatcgacaaaccaatcagatcaagaacaagccaagatcgtaagtagaaaccgaagcaaactataaatgaacactcactatgatctttgagagttacaagagaattgaataaaaaaaaaaatcatcatcatctatcgagctcaatcttggctcttgaaacagagaaggtaattgttttaataaagtactcccaaaaatgagaacacacacactctcccttaacaagctgcttaaccacgatattgagcttgtttagctctagaattaaccctaaaccggtttaaacttaaacatatcttacatatttgaattaaacaagggtctgtgattgtcatatctttctttttttttcatcagtaaccatgatttattcgaggaaagaaatatttgtttgtatccatcaagaagaaaaagtgtcagatagtgaaccaaaagtgacacagttccataaataaatcaaagaaaaacaaagttagacaagcacacatggtaccatgcagaccatgcatatataatgtaaccaacctgatgagcccttcaatttatcttcatcagtttggccccaaaacatgtcctacttacacttgcctgaagacatgacttatatatatataagttaagcctcaccaaatatgaaataggattttattattggttacatatatagagcaaagcgtctctaatcttgggccacaagccccatagctgaaaatgactaagccgaaaacgacattctccgacagttttgaaggtccagtgaaggatggtccaatggattcttaaattactaaatttctaatttttcggaggtatgaatttgcagatttttggagttgccggtaaaatcacgtaacgcagctcaatcgttctttgttagtgggatatgaccgttatagacccttcatttacatatcaaagtaagatattattttttcggatgatttattatattgaatggagagagttttttgctcattataaattaagatgttatgttacatgttttgactaactttaaacgcgtaaataattgtttatgttagtgttgttgttgtatcaccaccacttgaatttaattgaactcgtatatttcatttcattgttaaaaaaggtatcagttaataatattttgcatctaatatttatatatgttgccggttaattttagtcctttgtatagttgtgtgtgtacgaagatgcctgtcgtcgaggaggacattatatgttcgttggttcaataatagctttgacaaaaacatccgattttgggaagtaaacagctaaacacccacaatgtccacaccacgattaattacatatatatatgctaaaaaagaaataaaattatcttttcaaaaatctctaatgctcgaatcataatgaaaacaatgtacatagtcgaagaaacaacaaagaaataacgaagagaatgtcggttttgaattaggtcgtccacaactcaatatgttatatgtgatcttagaaaaggagcgagatactgaagatagacttctccggtaaacatttttttttaatgtaatgttaaattatattataaaaaaaaattggtactctggtgaacattgaagttcttttcagcaggataatcaaaggaaaagaggtttgaagaagaaaaaaaattggtactctagaaaagtgtgatgaccaagacctactctatatcaatatatggatccctttcattgtgcaaggtggaaaaattatggactaagagagtttttggagactctatttggaagaaaatatagttaatcatttagtattcaagaaagattaagaacacaagtataaaataataactctcttttattatctttagaaactctctcaaaacctaaagtctcaatctctctcaaatctcataagttgtatcacaacattgatacctccttatataacaaagctttaaccttaccctaatgattagataattcttaatatcataagataactccaataatatattctagatatctccaaaaataataaagttcaatttccttttctcttctttagtaacttacgcctcaaattactctcctcaaacttatccaacaaatcatacgttatttacttgtccctttcttgtttggaagataagtgctctgccttactttagaggaaccacaatttctactaattaatatcaatatatatcgggatctttccaattcatttggatcctgattaccaattcatttggttattcataaatgagtttcatttccatgaggtccaccgtccaccgaacaacgttatcgaaaagactaaggaagttgcatgtataataaaagtgatcggcccataacgccgtcgtcactttgacctgctttcatttatgagtctctgactattaccaatcatattcataaccaaataaaattatttttaaacaatgataatggatgaacatggtaattgacaagtaatcacttgaatataatgcgagtaacttatattatcatcacgagaatttgaatataattattacgtacacaacttgttggtctccaaagtcgttccacaaatggccatggctaatgaattgtctaagtcattaaatagacatagtttttttttttttttgacctattaaaatccagcttttcaaaatttcaaaattaatctatcgactaaataaagaagctaatatcttatttaatgttatattagctttctaatatatggtatagcttatctttagaattcagtgggaaaaaaagaaaacagatacaaatgtttagaagaatgatcaagtactaatttaataggctttctgagtctaatgttcattccactaatatattaaactatctttaaaagacggctaaaacatttgtgaagagttactattattggggaaaaaaagaagtcatttgtgaagagtccattataatatcttgtgtgttaacccctatgccaagtccgttaatgataatattttgtcaattattttacatgaaattatatgccttttctttataacttttgataaaaaaatactgaacaaagatcgtaagctcaagctcatatagaaagataagttcgtacctaacaattataaatatatttgataattgtgaatccgtgaattatgttttgctattagtaaatgaagtttgaactaagtactatatatatacattaatcacataaaacagagaatcagtctataaatttcaagtaagtcagcgtaatttctttttgttgtttgtttggtcaaagattaaaaaaaacgtaattatgttgccaacttcacgccctaacagctagtcatcgttttgcttagaacgtacacaaagacacaactcctgagacatggctcgtggctttgtcgatttctatttatttaatttaatttacctattttaccttaatcttcttcaatttttacaaagtctaccaccaacatccacgttgaaccggtttatctaacataactatacatccaaattgttcccatactagttattgtagatgtttcttcacaagaattataactatgatgaaaatatagagaataatacaaaaataagaacactattcttaacacatatgacattgtattatcaattttaaaacttacaaaattgttaggtaacgttctgatgaaaattagtctgtaaccaattaatcaaagagcataggctttatatatataattgattaatcataacttttaaaatagcatgttaaatttctatcttagtatatcatttgtacatttttaactttttatattagaataaaataaaataaaataaactattacttatgcacctattccgtttatctggatatcttagagtaatatacatgtaagctaaaattgatttggctaatattaaaacgtcaatataattttaatcatctaggcgactaattttaaaacacggtatataattaattaaaatttctctcgctgttaaaaatattatgttcatttttgttgttgttggaatgttcaattatgcactttgctacaaactattaaggtgtcaaaattgattcctagaaaaagacaaagtacacacttcagaactcacaagtcctcgttggcgtcgattgacgtcaaaagcttcaattaataatatagggccaaaacgtgaaaataataaattataaggactaaacaacaatttataccctaaacaaaatgagagaagaatgacagaaagcagaaaaaaaaaaaaagaatgtagcttttaagaaagaaggaaacatcatcagaagcttctctctcagattgacagaagaataagattccaagctcctctctttcttctcttaaagaaaagatgttgtgtagaatggtggtggtgactggccggaaaaagaaacccggttcggttccggtttatctgaatgtatacgatctcacacccatcaatggctacgcttactggttaggacttgggatctatcactctggtgttgaaggtaactccttctctctttttcttggaaattatttgtgggttttggttaaagcttaaaacttttgaattgtagattgaaaatttctcatctttgagaggaagagatttgattctgttttagattgtttagttaaagtaagagactttttaagtttgatgtttgttggttttgttttgtttgtttgtagaaattgaaatagactggtttcatttttcaatagattccaaaactggaaactttttttgacccatttttggatcaactcttctgattttctattgagtaataataatcagaacttggttttatgtgactattaaagtgagttgtataatatcttattattagatatgtctgtccaaaaatgaaagtatgtttatatattgagatctaagttgttgtcttaatgtttgcttcctaatacaatgttatggttttagttcatggagttgaatatggttttggagctcacgatcattcgactaccgggatattcgaggtggaaccgaagcaatgtccgggtttcacatttaggaagtctatattgattggaagaactgatttagatcctgaaaacgttcgtgtctttatggagaaacttgcggaagaatatagtggaaacagttatcatttgattactaagaattgcaatcacttttgcaatgatgtttgtgtgcaactgactcgaagatcgatccctagttgggttaaccgtcttgctcgctttggtaagaagttagagaacagaacatttgatttttactctgttttagtaaaagctcattaggtttaggtttgtttttttgggtttaggtttgttttgcaactgtgttctgccggcggagttgaatgagactaaggtgaggcaggtgagatcaaaggaagagaagattccggaagtagagaagaagaaacttcggagtagatcaagtaggtttccacctggtccttcgctttcttcgtcgggttctttaaaccgaagcagaagaggagaaaggagaagacaatgtcttcctccatcaccaactgtgagtgtttagctctagtcctagtaaaattatacctttttgtttcgcaatttgattcggtagtaatgtttaagctacaagatatggattgaacaaacattttcttgatagtaatggtataagattttcacattacatattttgaactatgaaattatcaagtgaagtgaagttcaaaaagaaaaaaaaaagtgaaagtgaagtcaagtccattgggtaaggactgggataagttgaagtggaactttcttgggacaaacaagtccatatgattcttcaagatcaacatcttctatgttcattccttccggaagcttccagtcgaaacggtaaagaagattgataagagtcaagtgtaccaatgccatacctaatcccataccagggcacattctccttccgctaccaaacggcagcaactcaaagtctacacctttatagtcaatctcgctatgcataaacctctctgggatgaaaacttctggatctttccaaacatttggattcctttgaacagcccatatgttgacataaatccatgttttctttggaatgtcgtaacctccaatctttatatattttgaagcctctcttggaatcagaagtggcacaagtgggttgatccttaatgtttctttaatcaccattttcaaatattcgagtcgttctatatcttcttctgtgatatcatctttgtttttgatcacttctcttacctcggcttgcgctttcttcataactcttgggtttttaatcaaatgtgtcatcacccatgtcacagtgtggccagaagtgtccactccagcgataagaacgttctgcaaaataatatatggattcacaaaagttaatcactatgcaacacgtaaagaataaaattatatatggattaactaagtaagaggttcccattacttactagaagaattcctttagtgtggtttcgtgtaagttgaaactctccaagtcctgtctctcccttttccatctttagtagcaaaccaatgatatcgtctttgatattagtatcttctaggtgatgctttatagattgatcaaaaaacgaatccatttccttaaaaaccttctcacatttgctatgtaaccccgtgatcctatcgatgattctaccaataatcgggaagtaatccgctgctgcgaaacgccccaccacctccatggttccttgaatgacttcctcataagtattcgcaagtttgctccattcaagacttatgccaaatccaactttacaaatcacactcccagagagtttcactaacttctgtttcatattaactgttttctccaatgaagcatgttgtttgatgaaatcaacgaatgaggcaacttcttcttgtcttacattttgaaacgatttgacccttttcgcggtgtatagctcaatgaccgtcatctttcgtacttccctccaatatttgctatagggcgaaaatgcgagatcgttaaaattgtatgtaactcttgcgggataagtcatataaggtcgggaacaacactctgcgtcgaatgtttttaagacatccttcaccgtctctggagttgatgccacaacagcagacacatttccaaactttagagacattagagatccatacttttcagataatttgaatagtgaacgctgaggttttgatcccaattggtgcaagtttccaattataggaagtcttggtggtcctggaggtagattcttttttgttgttctcgtgtcctttgcaatgagtataaatgcaaagaaaaaggatgcaccaacgataaaccaccaaatcattttgtcttcctatggtaaaaataaaaagaagagagtatataaagttaattaggctttgactggctcaaagtaatggggatagttttaaaagcattcagacttatttgaactatctgcttatatagtcttccgaaatttatactttgtttgttggcttgtttatggtgttcactatttttgaattgtctacttatattgtacaaacgcacctaaaaaaccttgagggaaatgctcttatatgttaatttggttgatttatttaccaaaattagtagacttttagtgttttaataaaacaatatgtttattgatggaggatttagatttcacgatgatcaattttttaggaacggtaattattgtttttcgttgacaatttatgatggtaaacttaattgagaaaatcaacttactctatatttctaaatttttgaattttcctaattatcacattttgtatctacttatttaatccaaatattgtttactatttaaacatgtcttgaaaacaaaacaaaaaatattcaaaaaaatatctaataatctcagaggtaaaagtttcactaaaacaaacaatgaaccttccattattgaaagattagtgtattcattccacataatactaagattttagagtattcattcaatcaattaattaagaaaatgacaaatctaaaacaaagaagagccatcactctgtaagccaagacaagaatacattcctgaattgaatgactggagaaaacatttactaataattaaatatatttataagagaatatgatcagaaatatctagagagcgagagatccacaaaattacctttaaaatttgtggaggaagagtttacactgtgggagagactttatattttgtagaagtgaattataactttttttgggaagtgagaatttaagaagagacgtaggagatgtggctgcgtggactgcgtccaagtatgtagctgcgtggaatgctttgaagataagttcatttgtaatgaagtcaaatatatctattgaaacatatgtccaaacaaatcttgtacgactttttttaaggttaatgcaatgctacgaaatagttgaaatatcatagtttcagaccagatacattgaacccacacagctttacgattaatcatgtccaaatatttaccaaaactgtgtacatgcctaagaagaactaataaagagaaacacaagaaaaaatgtggtgttgttcctatgataaatctcctaagtggaagtgatggattcaactcccttgaaaaagatttttttccgaagaaaaggaatttaacttggtgtggattttgcttcagcagaaaaaaagaaaaaagaacaagagttattacgtaatcaataccattatctacaacggctcatatatgcgttttacagatacagtctcgttgttggaagtgataaacgaagaagaagcggtggatatatatgtgttattcttcttaatccaatcttattgcatgagaggctcttgtcttatatacaatgactaaaccaatattaaccaatactaaaccggtacacatttgattactcgaataattttagattaaattttagttgacatacaattagacataatgcgttacgtacaaaatatttttagcatgtgtttggttttgatttcggcctattagctattgggctttagtccaaaaactgaaagtatgtatgtatagttggggcaattgtattagtggatgcagctttaaaattttatttttaaacgtatcatcaaatttaggtaaaacgttggataaatggccaaacacaccaaagtctcgaaacttggcctgaaaaacttaggctctaattaataatccacataatgacgaaacttgtaaatactaaaacacttgccaactattagtctatccttaatcattattatgtaaactagcgagcgaaccaaaaattatgcaaacatttttctgctctccacagcgcgtgtttctagctaacatttttcttaatcaaaatttacaatgttaaataaacaaaaaaaaaatcgcacttgcatagcatgaaatagaacctggttaataataacactggaactatctgcaatagtaattgcttcgtcatttaaattacattatcttgtaacttattttagaaccttagaaattaaaaactttaaaacttggcgacaaaaaaggaaccttagatcgccaaatgagtctaattcagattggtgcccactcttacatttatgtatcatggtatatatcttacaataatgcatcaagacaaacattcgagtttacggatttatggtagacgacagaaaaacttctcatattcccatttaatatttgaacgtaaaattggccccattgcatatttgtttttatcgaaatagatagataagtaatgcacttgaggtatttaacgcaaacatgcagtgtatttgaatgaatatatattcgaattatgagagaggaaacaattcacgtatatgaggatatatactattatatagtggcagagtctgaacatatatgtaccaagattataaagaaaaaaatatataaaacatttcactaaattttttcagaaaaatgtatcgttacaaatatatttgataaagatgtatatgtttttcagtacaataaacatatatttccgcgagattttttttttattttacatatctatggactgtggtgaagaatcatcttttttaagagtgacggttataactgaaaaaaaaaaatagttttagaaatagataaaccaatgattctttggcaaagaatgtgaaaaaaagttttcatatctcccccatcacgcacaagcacgattagtaaatccttaagtaaactaatttaaatcattaagacattgttaagtgtaagattttctttgatgtgaaaaaaaaaactatttagaatacacacttgatcaaaggcaacttgacaagcatagcatgagctagaaatgaataccataaacatataaaaatacatcaacagaaaaacaaagagtaattggatgttagtgaaaaagagtttcaccatataagtccatgtttggtcgtctttcaaaccaacaccttcacatgagattctacatttcatcaacaccatcattctcttctccattattgcctttgaccactttcctccttcttttttattttgttttcctatatatgtatacactcacgtagaaagcaattaatatatatctagctgactcacaatattaatagatcttttgagtttcgttctttttgttttaacctatcaataaaaaaaactagctagtttacgtacaataaaagttttcagtttcttatcaaggattcctgcattataagaactgtggagataacagattcgatggtatgttcctactctcatgtagatgttaaatcaatacttcttatcttagatttgaaactaaattctgcgactaaaaaaattcgtctttcaatttacttttaagcatattttgagtttggataattttgctcgcttcaatgtcgtataaatttcagcgtaaaggcttttactaataagaacgaaaaaaatgctttgcccgaaaaaaaaataaaaaaaaaatgcagcttgaaaagttactatatgttgtcttctgatgaaattttgattttcataaatttgtttatttttggttagacaaatatgaaaaccaattcgtaaaacatctactataagaatgtttataccatgcaataataaataagaaataagaagattaattaattaacaaaacgagatagaaaggttaagtaagtaaaaatatctaacactaagcaatggagttattgaaataatttaatggaggataagaaagcattgagtcttatatatagatttatcattgggactaggaacataaaagtttaaatgtataagaagcaacgtatatatatatatatatcactacaaagataaaaaggcaaatcttaccaattttgactacaaagtttttggtaggagtgattttctaaccaatatttattttgtaggaaattgaaattaatttttctaccaaataagccgtgaaacaattataggaacattcttacaaaaatcatataaaatatatcgttgtataaaatttggtaagacattgaaaagaaagtcatgaacagtttttttttctaatttcctacgaaaagtttttcataagattttcgaaagaagatcgtaagaacatttattatcaattgaattataagaaatttgtaaggtttttataaatatgtcgcaaaggaccgtctaacaagtatgttaggtagaatactttttagatatatcagtgtaatagtatttattttcataggaaattgaaaaacaattttatataaacctatttcacatttgttaaaaatacaacaacaaaaaagtaatcatctaaaacacacaaaaattattcattaaaaagaaatattctttgttctcgaagaaaaaaatcattgttttcgggcatagatggacaagaaagaatttgcatctaactcgttgctatctacagtgtatgcgaccagcctcacagaattcataaccctcgcaatgaatcaaaagtcttgtataaaactagtaggattttttatttgtgtccaatatgtgataataataaatttatcgataaggctttagtgtggtcacactagtatagaggcgtaattttgcagagttacaaagtcatgtattatcacgggaaaagcaatacatacaacgtgggtagtactaatgaaaatatcctagatagggtagaaaaatctacattcgcataaaagtcggtaggtacagttcaagttatttacgatgcatatagaaaaatatgtagtcattaccagaagatagaaatagaggagaggaactaaatttagaagcaaaaagattttatgatatgttagacgtatcgaacaatctgttatatgaaagttgtcgggaaggacattctcctttattcgttgcaacaaagatgatgaatataaggacgtattagaatttttctaaagattttgtagatgtttggtccaaacatcatccttgtgtaaatggcttggccgagcattatctttcccaaaatcgacccaaacatctacacaatcttcagacaaattgtaatccgtctttatattcatcatccttgttgcagcgaataaaggagaatgccctcatataaagaactcttcgatgcatctcacatatcataaaaacattttgcttctaaatttgattcatctcctctatttctaatttccataaaagattgcataattttatatatgtatcatgaactatttgaaccgtacataactcctcttttgtgaatgtagtttcttttaccctagttgggacatttctactaaaactacccatgtggtatgtatcattttctcgtgctaataccaaaccttgtaaatcggcaaaattctgtctctttataggtgtgacaatattaaactttatagataaatttattgttatcacatatggaacaaagacaaaatatccctcacttggaagggatctcttctccaaaggagacgaatttaacctggtgtgggtctcgcctcagagagatgtaggacctatggacttgaacttccatatatatatatatatatatatatatatatatatatatataaaaatatatcccccactttttaagcaagactcgtgattcttgcgtcgtggattcgaggaggtctatcgcatactctgtcgtcatcaacttgttttagatgcaaatttctcatgtccatccatacccaaaaatgataaatgtttttttcttcgaaaatatagaatattttttattttgtttttatatgaatttttttttttaatgaataatttttgggtgttttggaatgaatagtgttttttgttttttagatgatgtttttctgttgtatttttaataaatctgaaataggtttatataggaaaataagttttcaattttctacacattttttacccatttcctacgaaaatatatactattacatctatctatataaaatggtcttctacctactaacatagccaactagtatttgttagacagtcgtctgccacatgttcacaaaagccttacaaatttcctaccagtaaattggtaggaaattgttttatgatattcctttaaaacttttatgacaattgtacgtaagaaactggaaaaaaagtttttttactaatttcctaccatttatttttctaattttctacgataatatatttttgcaagattttcgtataaatttttctacgactttttgatgcattattttgtagaaacattacttctagttttttacgaaataaataatttataacaactttgtaagaatttggtagaaaattacttatattaaatttttcatagaaaatttggtaatagttggtaaaactttttttttttttggcaaaacgcgtgtactcatagaaaaattggttagagttgtctgtgtaaatatttatttattttggtcaaaaaacacatatctttccagaacccctctatccattggttttgatggcacgagatatgtgctaggtaacctagtctaggtttgtttgccaatctgtcgagtatcttgtttgaacaatattcttagctagctagtgccacccaaacttcctcggagtaaacgcaagtgaagaaaaaatgatctcgagtttttgtctcagtattgcaaagaaaacacgtatccgaattaaattaatggaatgtaacctttttctgttgatctcatgtcgcggtcgagttccgcgggagtggattatcccttctccacctctagtatactcaaactgaacgtaagtaattactttacggtcttcacctacgtttattgtcatgaccttccgaaagcctccatcatcccaattaaaaatatcttctacaagggtaccctcgccatggaagctcctacaaaatcagattttcttattcgaaattcctgtactctaatatgcattccaatggaattaattacaagggtacactggccatggaggctcacaaagttttctccatctctcgtaaacttaaactcttgagatcctgaatgtatattactatgagaaaatcttttacttctcccgtatagattgagaactcaaggttgaacaagcgttgctcccacattccacattctcatacgatcccttgtgaagagtcgatttagtaccgctagccacacacaaaaagagtgtctaggcgtcgcgtgagtaaaccatccttctttataccagttgatttgataaaagcttatgtatgctgggctagcgttggatatatatgccagtatctagtgttgggattttttatccgagccgaaccggtttttggtgcaaacttggttcagtagtcgagtcggttcaattcggagagatttaaaaataggttcggtttttagttcggtaaactgaacagaacgattaaccgattttttaaaaagtaaacctaaattataccaaattttttgcttaaaaccaaataataggttcacttcggtacaatttcattaaccaaaataaactgataaccaaaccgaatcaaacagattatctattcggttagttactattagatttttcaaaaatcgagacaatgaaccgtttaaaccgaaataaccgaactcacaggcattatctataaaggaacaagcaagcgtttagtgttctagacatgcatacctgacggacatgcagacatagagaaacaatcgtttagttttttttttatatattataatttataaacctcaatagaactaaaaagtttcacctttatcttcttctggatcacaaggtattttatgcacccaagggctggaatcgatagctcaactagaactaaatgaaaatagatatttaacgatgagaaccgatgttaagacaaatgtgaacttatttgacgggagtttagcaacgttcatagataacaaaggatttaaaaaaatatataaaaaaatgagtagtttcaaatatcgatttgtaatttgaaattgtccttgaattatcctcttgcatgcatctcaatcaattcaataagcatacttaaattaggttaattctctatgattcaagtcttgattcatttggttgtttaatcattcttatcaaaagattttcattctttttacgacaagttggatgttatgaatctgcatgctagcttgagaatgatagaaggaagtgtttcgagagatctttctctaatatttttatgtctatttattttgggaagccatacgtgaagtgaagtcgtgaaccttaaatcagaagctcataattaatagtttttctttacatactaactaaaaatgctttcattcacttatttcttagaaaaaattctatatatcattttaaccttaaatttctttatctaaaagaattcaaattaaaaaaattgtatactccgattattgaaattacactgaatattggatccaactatcgaagttcccaaccggctcttctgttctttagcaggaatatcgataatcaactctttttgaaaaaatgaagataatcaacttaaacatgttcaaactcataatctctataaaatattaagtaaaccaaatgcacaacttcacattaactaaagatgttttagaaataagctcaagaacaaaaaccatacatataggtgtgcactacttttggtaaaactcgatcgggtgaacaaaataaatttacagtttactaacacgagttgaatacgaaaataaatattctataaaaagaatggaaaacatacattttcatgtgaatctgaatcgctactttttacccatttattctttatttggtgagtgcagtgaaatttttattggggcaatataaaaccatccttaaaggaaaaaagggtcacagaagttcaaagaagtaatgatgaagaactcacaagcatgcccattattttaaattctctcctttgctgcttcaaaatgctttaaaaaaacagaataatgagataaaactatacttttataattccctcttctttattttcttacttttttagaaagtttgtggggaaacaaaatcaatttccaaacaggtacgtcgaataatcattataaggtttattcgatagagacctcgatccaaaaaaataatatcacgttgagattctaatgtgtatcaaataatattgttttgacacattttgtctcatataactggttattttcttcttttactttatttgttgttaatggatctcggagaatatacatagtcacgtagtcaatttccacttgttaccaaatcaactgtgatcgcatgcattcctacggaactttgagttaaatagtttggaacatctttaaaaactgtatttctttcacctcaaaaatttacttttggaattaaattgtagaatttatgtatgataacaaaacaatatttgagaaataattgagattctgtcatcttaaacttgagaataatgaaatctatgtctacaaacaaattatctgtaccatgcaaagaaatcatctgtagatttaatagaaaatagtttttcacgatttgaaaagaaaccttatcaaatataagtggtcatgcaattttgtgcttgtaatttgagtaatatagcaagttaatttgagaatgatcagatttgttgtttaagaaagaaaaaaacctataaggattatcaaatttattgtgtcgaaaaataaatcatctattgcatgcaaataattaaggtggcaagaaaatctttaaatccaaataattcctaacgtcaaatcatttgtctgctgcaatttagatgcattgcatgtgtactggttatatcgcaacgagctttaaccatattgaattgccattatttagctattttggcttgttgctaacaactgatattatattatcgcgtatatgtatgcaagaagaatcaaccgatcgtcaaggatatattaaagcctgctcatgttatgttttccattctttgctagagaatatttttattttcgtattcaaccttaaggtagtaaatgtaaatcatattttgttacaaaagttaaagtagtggtcggaaaacactagtttccttttattcgcattacaaacaaaacaaataaataataggtttggactgttcgaagaacagagtgttctaaggaaacagagtaattgcagtcaaacacctattttatgtagctaaattattttttctattttaatataaggtgctagaaaacacaaatccctctaattaaaaagttggattttatggtcgtcaagccacagctagggacactctttttctacttagcagcaatcccaaattaccaaaaataaaaataaaaaaatgaaggcccaccgttgaaaaattagaacatgcatggaacaaaaccaaaagctaactcaaaatattcaaactctcatctctcttcactactttagatatctttcttctcattgttgtatcttttcactacattaaattcccactttttcacacacgaacacatgtgtaatttttagtttttggtttcaagtgttcaattggtttacatggagaaaaatcagaaaataacatttttttataatactatacataacatagcatatgatcgattgctcttatagaaactagaatcagtgtttcaaaagaggccaattcagatcaaaatgtcttgaaattagccttctctcactactactctcatcacttacgacgccgtttttgtggaaacaaaaataaaaatgaaaagaatacgctaaaacgacaaggccatttctcacagcgtctgagttggtaaaacagagcaaagctcaatggaaccgtagtgaagcagctcctcaatcatttgctcgatatgatcttcctccaatggcctaaaattctgttgcatattcgcatttccatcttcccacttgatctctgtcgtctccgttactcctctgttcaaatgactttcgttagccgtcacaccgtcactgtccgcggattgtgatcttgcggtctgcgtttgcgtttgtgtttgcgtttgcttggtcatttgaagagaagccatgtagcatttgtggagtttagcggtaagagttgctgatagaagcttggaagaggaagtaggaatggcattagggttgtatgggaaattagtacgagctctcgggccacacattagcctagccgcctcgtcgtaggcccttgctgcatcctccgctgtctcaaacgtccctagccagattcttgttttcctaaaaaaaacaaaaaaaaaacaaaaaagtttagcattactcaaataaaaagcgaccgagggtaatttcgtaatttgagaggatgatgagggagagtttttacaagagagggtgacgaatttcggagacccaagagccccaatgcctctgtctaacgcctcgaaagcgttgttgtggtcgtgccattagtgtgaatggtaaatggaaatagggtttcaggtgagtttggtgtgtttgtggaaatgttttgaaagaagaaagaatgatgagagtgaaggagcgtttttggaagagtgaagggtagctatataagtagtgttggctttagcttcatgagagagagaaatgtttttgtgttaaaattttctttggcaataaactggcaatcaatttggtcctaaattggacccacaccattaccaatacgactcagaaaatctcatggattttgtttgatgtgagagagagagttatattaatttatttaacttaaagtattcttaaatttacttcatttgttgtattcgaagttgctgcgacatgggcaaatggattatctaattctgtcacatattatagtgaaaattgaaagcttcgaaactacatgctaaactgtcggaaaagtgttttttttatttagagatattttttggaaagtattatcgtaatttatctaaaagttaaaatagaatttaaattatgaattaacaaacttatcacagtttttgttagaatacaaaattacaaatgttcaatagtttcatatgaatttatttctgtaacaaaagctaattttttatcaacaaatataaattaattaaaacggtttagaaatcaaacctaagataatttaatccaaacctttttcttttccttttgtcccaagttacacatattatacttagacaattatagttataatatcctaagttatggggtatttttaagataaaactaataaatagctctaaatataataacaaccctacgtatatagcatatatatttatcaattattttaattttcccattgtgaacaagttggatccaaagagatttggctgcggtgaaacttcaaacccactgtacctattttcacatgggtttgatcatcacaacatgtctctatatcatagatactgccaaatttttccccaactaattaataataacgataaataattggaaaatatatagtttgataactagcgagactctttcatcaccattcttcacccatgtgagcctttgataatgactcaatcaaacacccaaaaccatcttcgattatcatcttctcttttcccttctttaatattattttgtattgttattattgaaacaaaccttaatgtattgtcatcatacccatgatttctgagtgtacagtttacctacgagtctgcgacctattaaaaaaaaaactctaatacattatttttcaattaaaaacataggtttaataattaataaatatgtgattatgcccattactgaaacttggagagggaattagtataatattgcataaacttatctacaatttttagatagtagtatatgttaattgtatagggaatgtcacatagtaaccacttcttatttgggtttatatatggatgtttttgtttgccaatttatcttttgttcgacaaagtttcatcaaataaaagtaaaggttatgtcgatcatattcagtcgcacgcatatttaaaaaaaaaataatctccaattgagactatatccttttagagtcaattataattggaataagaggtaatagaagaatatgttgggcaaaagagtgtgtaggtagaatggatacatcaaaataacaagtgccaaatattattagttcaatccagtatcaaattgatgaaagaatcctagaccgcaattatgacgacaagaaaaacaactagagaaggtcattaactttttatcaaataattgatcattttcaccctactaataatcattcttaaccctaataattattcaacatatgcttttttttgtctgtatatttgcatccatgtccataagaaaacgaaaaaaaagaaagtaacttatctctctcggtggtgtagtaaaagaaggatggtactgaatgctaatatcagcaagttacataatggaaatatatatgtacctttgaaataacaacattactacaactgtaattttaattaaacaaaaataattttgatatgtctaacatattcgcttttacttaggtaactattctttgtttcatacgtggtttaattgtattggtcgatcaaacaatatagcaaagcatgtgagggtgagaagctagctagctataacaaagactgtttttattttaagttgcattgaggattttgtctctttgctactattttggcacgtgtgagtagtgatgactaatcttccaagtttcaactagtaccatacctctgaaagagaaaaagtattcaatatctatctcccaaatgcatggcaatgaacaacaacaaaataaatacacaatgttcattaaaaaatagattaaacaaggtatcatccttataaattgtaattgaagcaaatttgtcagatttacacacacaaaatgtgctacggttttgcaactcttataatatgaatttaacaactagatcattcgttaattatgtctagattgtttgtctttatagcatagaggctcatcatatgtttggtgactcatattatataacttatcttaattgtttttttttttttgtcgacttggagataatgagaaactcgaatatatacaattatctttaaccataaaaaaggaaaacatttaacaattagtgttttgggactacatacaaagttatgggaaaatcagacaagaattatgaataaatatgagtagggcctaggtcgtaaacgcgtgacatgggacccaaaacgacatagataaacatgggtgatgaaatggttttgattgtgattcatgtccttttctttcattcagctgtaaattaactatatataccaaaatcaatctattttaaaaattattttaaataatcacactcatataatatatactttctcggttctaacatatagttttgttttttttaaccgcgaacatatagttttgtgcgttgcattctagttacttatatgttagcatacacatttcagatcagttagtttgaagagtaactattcaaggtcacttctttatgttttatgatcatcgatattaaaaccattaaccaaacaacaacttcctccaacacttgtttgtgaagtcaaacgagtcctttaaatgtcatagatgattgaaaatgactttctctagtcacactatttgcgctggctctaactctaaaattaggcgaaaccataccgaatgaacaacgatagattacgattgaactcatattcggttaaatattatgactgaataagatcccctaagatagatatatatacaaagattggagggcataaacattagctaatagtttcatatcgagattgttgatatatataatttcagttacaaaaattaaaaaaaaatatgtaatttgttttggtaaaatgaaagataattactacttattttaattccaaaaaatattgtgacccaaacaatataattaactatacatgtgattaaatttgtagataaatgtgaaataataaggtgacgtccatatcaaagaccgccattctctcgtcccattccacactcagtcacatgcaaatatggagggtccattgaatcctcaacaaaaggtcacaacaagactaatattctatagaacaaatgtagttttaatcatataaaaacatttagtcatatatatatatatatatgattatattatatattaaaatggattggagttaattcaacatggactttggaggtttcatcagagacattgttcctcagcttgcatacacacatgcagtatcttttggtgttatctatgcatttttatgttcttggtacaagagaatctaatctatgttgacaaaatttggttattttaatttcgaaaactgaaagaaaacaaaatattatcaagtttgtttgcctttttgtatattatgtcggaagatcaaaaatctcacaaacataaaaccacaagtacttactggtgactcttgtcatttcagttatatggtttgaatgttgctaatttttggcactacgcaactaattccacaaaatgcataactgctcaaaatttagatcgtttttcgatgaattaagctaggtttgactttaaagatcaagatttataagttacgctaaccaatctaagaagtatacaaaaaaaaaaaaaaaaaaaaaaaaaaaaaaaaaaattgcgaagaaaaactttgcatggatcgtgtagtttacgcttaaattgttaaaattcatttaatctatctggttcaaaaggtcaaaatttgtgatagatacaaaatattcatatagaagaaaatcaagtttatttctttttgtacaacacataacagaaagtctatgatgcgtaatatgcaaaaaaaaaaaaaaatgagttttcatgttcagtcaagtccttttcttttcaaaaaaaaaatgttcagtccaatgttcacccttatagacaaacaatccttttaaaaattaaaaacatttatcaaattatacaaaacaattacaaaaaaaaaaaacttcttctaattcgtattaaacaatatgaaactttataaccatatatatgaaaataaaatttacaaattaaaatctatgacataaagctgacaaatatattgaaacaaacaaaaacatttaaattaataattcattaactactttgtatgatcacctcgaatggtcgaatcgcttagaagcgttgaagatcacttcaacgtctaggaagtaatctccataatttatagatgcgtaacgaataaaacgatcccgtagaacgcttcttagaacactgattcattcatttgtactagtgaattatcattgaattctcattgataagagattttatcagtgagtatctaggtttattctatactagtttttatactcgtattttaatgttcagtcattttattattaatcaaataaaacatcatttgtctcctataactctcacatgcaacttaaccgtttacccaaaaaaaaaaaaaaaaaactctcacatgcacaacaaccgaataaatctggattgaaattaaacgtagcactagtacaaattctcatcaatgaattaaaacctaggactttaaagaaaagaagtagaagtgaaagttggagagattagaaaagaaaagcattaaaatttctccgagagaacgcggttttggagcaaagtgagagcaagtaaatgttacatttgactccaaaaagacaaagaaattgaagtgtgactttttgtcattcccattcaccgcactccatgggatctttgttccctccttatctgttaatccgttgaagtacttcttttgttcttatagacgtaaatacaaattgcttctagtacatcttagccacacaaaaaagttcttttgattataatataattttttttaaaaacatctctgatactactttttttttatgcgactcttatagtattcgtaatgcaaaaatgctaaaaccatctcgcggctcgttcccatgtgcctcttgttcatgaatgcaattttctctgcttaacaacaacatcaattatatatatctttggcttattctaaacttcaaacattgaatatatggatctcaaatcaattccctctgattttccttattcctgtagtaatcattttgcgttaaggaatagttagtacccttttatctgataggccatttttttcgggtaactaaaaaacattactgaaacgtattgattatgacctataactgacaatatatttcataaactgtcttcattgctcaacttaaactaatttattttgttcaatctctacacttgtatttttataggaaaacccattagagtttttttttgtaaagtgtttcttgcatgtattggtacatgcatgtgtgtgtgccaatacaagaaataaatagtatacagcgaatggaagaggaaattggattcactactaggccatgtgatgtgagctttggaaccaggtttgaatctcccaatggttgaatatggaagaagaaactattgactttggcgttagatagtgtttgttctttcagtttcacgttacgtttttatcttctcctgtcactctcatgagtctcatctcatagcagcaccagcacatgtacgtccaaatctaacacagacactatatgtatcttaaattcagaaaaaaaaaaaatgtttatggtctttctttagcttataatgttataactttgtgaactggtttttataactttgaacaagatttttgagaaaaaaaaaatgttttgttttggaaattacgatcggacctaaccagacatatattattgtatcatccaaatttcaagatccaatttcttaaatatcaaaattaactaaaatatatccatataaaatccttaaagaaagcttaagtgtatagatttatatatgcaattattcacgaatatgatgtatttagtttgattacaggatattaattcggaaaatatttaatagttcattacggaccaacctggacaagacaagaagtcaagagccttgcttgcgaactaaaaccttaactaggggaaatatttgaacgtatcggtgatgggtcaataaaataaatacgtcttaaatgggcctagcccactacatgttttacgcagttcaacatcttaaatccgcttaacttgcttctgagtaatttaataagtatataagcctcatagcttatacccttctttagttgttttagtacattataatgaaaaaaaaaatatatataccttttagagttgtgaagcatttcatggtaaacacagtttagaaaataatagttaagaaagtcttgcttcttttgctgaccacttttcaaagccaaaccttagaaacatcaaacaagcatagagacatgacgatgctccaagatatagcttctaaaagaatttgtgtagagcttaatgccatcaaaatgatattggttcaaggatagatcattttgcctttgggtgttggacatgatgttgcaaaaggttgcgagtcttgtgacttatcttcacaccatgatcggtacggtctaatatatttggatgaccgcgcaagacaaataattatgtattttcatatctattttattaagaaattgttttttttaataacaaaaattcacgtttaaaccaattgtaaaagcggagaagctatcgaaaaacaaaggtactagctctttttcatcactatatttactagttcttttttcttcgaattctagcttagttaataacattcttagtcgtactacttgatttgttacataacttagagtcatatattatgtgtttctaataagattttgctatcatttcatgtttttgagttttctatgaaaacactccatattcaaggctaaaaaataattgattgttttccatatgaaatgatttagtttattctttggtatcatctttcaaagaactcatcttttcaagaacttgtctctatagtattttcaatgatagaaaggcacaaaaaaaaaaagaacgaagaaaagaaaaaaactaaaaataagaaagacagaaaactacatagaggcatggtttagttatttttgtgcacctccagcctatgataagggtaacaatagcaagtacggagtagataaaaacagccacggtgttcaaattttttgggttgtgaaaaatttaggacccgttccagtgttttaaaatgtttgtctcaggttggattctggtattatgtcctgccttaaacataatcattgaaatatttatgttagtacaaatagaataatatacataaaccacggtgttcaaaaaacaagaaaacaccaacacacacaaaccacaccacgtttctctaaaggaaagtttgaaattaaatggatccaaacagaacagaagaatgtatcttgactcctaaaagagatttgttgtggagggggatgtattatcggggaatgtatctttactcctaaacagaaaataccacagatatattgtgaagaatatttctcacacaagttacggtacttagtttgcacagtccctaatcatgtgggatctgatatttgataaatataataaaaattaaatccaaaaaggaaatgaccaattatgaatatagaatgatctcccaagggatctagtagaggagattatgtttaagattccattgaaattcataaaaacagtgagattaacttgcaaaagttgaaacgacttatccaaaagtgagagcttttcgaagatgcacatttggtaaatcaacaagaaaagggaagtctatgattagcgtgatgatgcctcataatctttatctaatgagtggtgtcgtcgacgacgttgatccatctatagagcataaaggtcaacttagtttccttaacaatgaagtcgatatatctcatattttccactatgaggatttaattttatgcatcttggaagacgttattacgactattttttggaatccctatttggcgtctagttttacagatgatagatatgtataagcgtttttatcttgtgttaaagaagagaagattgcagctttatttcagcaccatgataaatatgatactgagttttgagatacggattacaactaagattgaggtcaagatggtgtcgtggagcaagttcttgagaatggatacaggatctaagataggttttccatatagtttcttcattgatgaagagaagaaagtcttcatgtgttcttgattaattagtcaacgtacttgcacccgagttgtttcggatgcttttcaaggaaaacaaatttagtcaagagacagggattatagatatgtgacatcttgtaagagaagttgaagagtggattagctctctctacaccgagggaaatcttttttttttttcactgaaaatttgcctttcatttcaattccactgagagattacaaaaagtttaatcagtggactttccacttacaaagctttggcaaactgaaattgaaaaaacattactgaaagtaaagtagaaccaaactgaaacattacatcaaaaggaatttagagagagtatgtcataaccaaaagccatactcaactaagcagacttcttcaaacttgaagctgtgttgcttctaggcctgcaaactttcccaaaaaatgacagaaactgatcgattggttagcgtttttttggaggtttcagaatccctccagcgcgttgaacatgatcaaagtgagatggaggcaacattctttctgtaggtcttcttggttctctgttttcattttgtcttgaggattgaccagtttcaaagcaccttcgatggtctgtgaaatgagtagttcttcttggcagaatattgtttgaaccagatgataagtcttgtctggaggtgcttgagtctcctgtaaacctgtaattcacatttgtagctgttgcaagatgtggataagcagctacaaattcagagtgattcattggaggaggatcaactcttggaggtggagtcatgggtactggaaatgaactttcagtcatttgagactgggaattcattgatgatctttgaacactatcacagaatagggctctttctcttgcgatgctgagtggacgttgacgataaggacagtaagctcgattgtgagtgaacctgaaacagctactgcagagtcttcggagacgttcgtattggaaccttatggttgcagtttcaccagaatcgaagatgattctttgaaaaaacctcagtctgtctgttattccaaaacgaactctaactctaataaaagcaatctgaggagaggtagcctcatgaaagtctagtgaaatgatctctcctagatcttgagctatctccaaaaccgtctcttcagaaacataaggtaagggaatacctctaatctgcacccagagatcaatggtagtgacaaggttgtgagctggagccacctgccatcgagttgctgccacaaaccaattgttgaaaagccacggttcccttctttgcaccatcatcagatcaatttcatttgcaaaaaggaactggacatacgttgcatcaagaactcttccatgcacctgagtcgttagtccccatgatcttggaagtgctaccacgacagagttaagattttgaactcttgggttcagaggtctcgctatcagacttaagttatttgaagcttcaaccatcacataagcttcatggggaatgaaaagggctggatcctcttgtcctaattctagattttgtatctcatcccacaactcatctgccatagtgataagagagaagaaaactaggaactaaagggatgggaaatagactaactaaggagagcaggaaagatatataaagactcagagaaataacagaaccgactaaaataatattaaactaacaaaatattaaaaagaactctcgcctaatttggatactaagagatgataggacttaacataaccgacttctatatataagacaagaaaaaagaaattcccaatccctatcacccccataattgaaccactaacctccttattagctattctaaccaacgaccacgtttatttagccatgatcctgagtcaaacatctgtcactaattatgaactctgaatagctaagtcattagcttttttgatgcgtcatttctgagacagccagacttcctttccaaaagggaacttagaagctaatggatcatgctaaatatttctaatatcttacccttccttactctgaagtaaacgtgtggagatgtagaataagacatttttcaactcaaactaatcaacaaatcaacactctgatgttgactatctgacaagaagtccttcgtatgaactagacttactctttagaccctcagcacaaaattctcctataaaggagacaaacatcgactcctctgatgaattaattcagagtcaaaaagataatgtagccattggggaggtcctttagcaacataactctgtcatctcaatcctgttatcacgctttttgctatctcattagctcccgtgttacactgtcttaattccattgccatataccaatgcggtttatccaaagtgagatctagcaatgcatccaaatgtcctctcaaagctggccactctcctggtttattcattgctttgataatatcatgagaagaagctccaaaagtaactctatcaacatgtagtttatccatactctctaaagcccattcccaccttttcagtttagcttcaaagttagaatgtacctgagaataagatcgcctactgtgtaaaagcacctctcctgtatcatttctaactacccatgaaacaccagctaattgagttttacttgaccacgccacaccaatgttgcatttcaattcattccaaggcggaggaatccatttcatttctttctttgtgtcttcagactgagtctttggatcttgagaagataaccaatgattacaatcctcaaatgctttcagtactatgctattagagatagacacatcaccttcaaaaagacttttatttctatttttccatagagtccatatgatccaaggactagcatatcgcatgagtcttaatatactttgattcttacagttatgaagcacatggttcatattagtaaaaatcgaatttccaaatccagaaggtggtgactgcatcaaggatagagcccatacctgacgggccaaagagcattgaaacaagacatggtttattgtctcattctcctcaggacaaatagaacatccatcattgattcgaattcctcgtgtccttaatctttcttccaccgcgacagcacctttaactgctttccataagaaaattttgatttttggtgctgtgtatagactccaaataccttggaaaataggattgacagaaggttgttcctgtgctttgtgaaacatctccttatgattctggctactgctcaaatcatatcctgatttaactgtgtataaaccatgatttgtacctgaccagcaataagcatcctcttttgaaagcatcggtcgttgattaagaattaattgagcatctttccatggaaataagtctctgagcatgttcaaattccagttctttgaaactggatcaattagttgactgacctttaaagtaatatccaccatcacctgaacactctcaggtcttctcgttttaccctcaaaaacccaattgtctatccaaaccaatgttttttctccatttcctatgacctttttcagaccttttctcaataattctcgaccataaaggatactctgccaagcatatgaaggacgtgtgccttttgttgcagataggaactctgaattcagataatatctgcttttgaagatctgagaaagaaggctgtctttatcactaagcagtctccacgcttgtttagctaacagagcttgattaaaacactgaagatctttaaatccaaagcctcccagaacttttggtagcataccaaccattgagtctagataaaagtttttctttaagaaagccaaacaaaatctgttttgagccactgaaacattctggtagtcctagatatttgccagttcctccttccacatgaattccagatctatgcataatccaatcttttgtttctgcttcaatcttgtttccaaaggtgaccgaagatttttccacattgatcatttgtcctgaaatatgcccatattgagataaacaatgcataatctgagagcattcctcttgacttgctttacagatgatcaaagtatcatccgcaaataatagatgattcactgaaggacctgcatcattaaatcgaattccagtaatttttccacatcgttcagcttggtttaagatatgagtaagagcttcagtacagatgacaaacaaaaaaggtgataacggatctccctgtcttatacctctttgtggtaagaaatgatcgtaaggttgaccattaatcagtactgaataagaaacagaagagacacatcccattatccaacctatccattggttgcagaaccccaaggcccttaaaataccttttaaaaaaggtcattctactctatcataagccttagacatgtctgttttgaacaccataaaatctctggaaatcttatcattggttcttaaattatgaattatctcatgagccaggagaatattatcagaggctaacctctcagctacaaaagcagattgagttggtgaaactatggctggcagatgtttcttcagtctagctgataagattttggagactatcttgtaaagaaccgagcataagctgataggtcttatgtcactcattctttctggatttgagatttttggaattaaacataaatgagtgtgattccaatcttcagggaggatgcctgtttcaaagaaacccataatgtctgcaataatttgattcttaattaaataccaatgagtctggaaaaaaagtcgccgtgaagccatcaggacctggtgaactttcagcattaatggaaaagacagcattatagatttcttgttctgtaattttctgagtgagatcatgattcatatcttgtgtaactttcgtttgaaaaccttccaagactgaatccatatttgcaggataagaagaggtgaacagatcctcaaaaaactgttctgctatttttcctttttccttattgagagtgtgctcaataccattttcatccaccagaaaactcaagcagtttttaattctattagcttttacagaggcctgaaaaaacttagaattcttatccccaccagccatccatttatccctacttttcaatctccagaaagattcctcctctctaaaggcaatacccaactgattttgaataacagaaatcttgttccaacacggaaattggtaactcttttcttcatccaattcaaaccttaatctcttaattcgattctcagcattataatccttcccttttttccaatgactaatagatttcctacagtcaaccagtcgatgcatagaagaagaattatgagaagaaatattacctatccatgctttgtgaataacgtcttggtattgagggtcttcagcaaatcttttatcaaatctaaaagttcctcggaaaagctcctgatcattgacaaatttcaccaaaaccggtctgtgatctgatccaagcttctccaaaaaccattgatgtgaattaggaaacaaagaaaaccactgtgaatttccaaaacagcgatctaatttacattgaatccattctccatttcttttccctccccaagtgaaactattcccagttctgcccagttcatgcatatcacaggttgataacatattcttgaagtcctgaaaggaggattctactctagatgggccacctatcttctccttattagacaagatatcattaaaatcccctatcagactccaagctgccattcgattcacaccaatgttactgattttatccagaagcaagtgtctgagattctgccttggattaccataaacacaagagataaaccatctcttacatccttgagatatttccaaatccagcaaatttttgtcttcataaagaaactctatatgaagatgttgtttccaaaatattgataatccaccactctttccttccggttcaatagtatgaaagtaatcataacccaaccacctaaaaactttcaaaataaacaggtcagaattcatggtctccatgaggaacaagatgtcagggaaatattcctttttcatttctctcaagtgccgaattgtccaagggttcctcagtccttggcaattccaactaaggatgccttattgatactgcggtggttcttgaggaaccaccgtaatgagagactttactgtactatcagatctttccgagtctgcaattttcttattccttttgatagcagaagcaaactcaatattaagactaacctctttctcttttataccagcgaaagaatcttgcctcttgtgaactaaaggagcttttctttttcttggattcttctgcttaatacttaatccagatgaaccagactcattaaacccaaagaggaatcctttagatgtaggatagtccagattaccagaaggatgactagatctttttggatcaccagtctcatggtttggaatatcatttacctccggcaatattgaatattcttggtgagtggagatagacgataactttgtaggaacaatcatctctcctggtttcagtaagcatttctttccaaaaagaaaacctgagtctacactcctatgatcttcctctgaatctctagtgtttcctacagtagcaaaggggcaaacacttttctcatgagtgagacgttgacaaaggaaacatcttttccgaatcctttcaaaatcaaaagacactgatatcatttcacccgatgggagcagaacttccttaaagttacgcaaaggatttcgaacatcaaggagcacctgaaccctaatatagtcttgtgcttgagatttttccaaatctagttccacagtcatcactttcccaacacaacctacgatttctttgatagtatcttctgtgtagtagtttatcgggatatttctgagtcgaatccaaactggaagaaacaagagtgaatcaacagaaggtttttccacccaacgctccatcaagacacatcactcatcctgagtccatactccagtttttaagatttcaattaaatcatcttctgatttgaaaaagaattgaaatctctcttgggataaagcaacacctcttacccttgaatacaatctccaaattctaggcatgtctaatatccaattagacatcctttggtgagacggattcaaaaacctgcccactatactgcagttatttctttcaatggagcaaaactgtgcttgattagacaatatcagagggctatcatcgttaattgacatttcttttatcgcttgatctaaatccatggtcatctccactactagaagaagaaagtactttcctgatacaaaaacttgatgaaacagctatgccgacagaaaacggggatatcttcggttcttggctcctctcaattatcaaaggaatgatgttgagggagaagttcttatgcccaaagcaaacgggacggcttaattaacggcaagggagaagttcttcaatagagctactatgaaagagaagagagaaaacctcttgttttttaccgagggaaatctaaacaagtcaaaatttgaataagactaaagtattaattgcttctgtcccacttaattctcccacatcttcacacgtactaatatattatacatatatatcaactaaataaaaatatcacaaataaagaactaaaacaaataaaaacgaactttaataaaatcccatatcttgtttctctctctctctcaaagttagtatctcagtacctttacgctttgtttgtctctatcttcttcctgatattcagagaatggtttcatcagatgattggacgaagtgtgcgatgagagatggagaagtggtggcagagcttttggtgaagcttaaagaagccaaagtaatcaagaatccgattgtaacagcgctccggtggggaatccaacagccaaggtctcggtgtccaagaaaagaatctgaatctagatgtagtccaagtacaccactatcttggagtggtggttgtggtggttcttcttcttctccatctggttatgtcgatggttacgaagctactagtcgtcaaatcagtgccgttggatctagatccaaggtttgttcgtgtctctcttctctgttttggattcatcataatcttacctagacatgtgtctttactcgttgatctctgacctaattcttgatttgaatcttggaaaacaagattctctcagttttacaatataccatatgattcaagatttgagccaacttttataaatgttcctctgctacaagattccatatgtcctttgttttttttttttgctttcgagaagctcattgaccaaaaccaaaagcatcatccttcgagtaaaaaaaaaaagaggcaccgagtgttttaagttttaactagatagggtcattatggtcattttaaagcggccgtgtccgacgtcgtcgttttagtatttttgttcgtttatgattttgagtggtaccaagtggatggtttgttgaataaagaagagattgatttgagtgattacattatatgtagctggtgttgatttttgtaaggtatgtataagcatttgaaataagcagaggaatatgattagttttgggttatatattgtagtttaaggataagtttgtgtgaagttttgttaggttatcaacctcaaagacgcgttgtttaatgtttttatggttacatgggaccattttctcaacattgaatttgtgtgtgtggggactttcttctacttctgtttcttgtgactcaactttattattcctcatttgattgaatgttcttgttgatatcgacaattcttttcaggattaacttgaattgctaaacttttgattgtgttttttaataagcagaacatttcatcacttagatcaccattcagcgagcgaggcatcgagaataataacttgaagagaatgaaggtgagcacacacatattttctactttactctctttctctaattgttgttgacttggtgattatactaaagaactaaaccctttggttggttcttttatttcagatgaatcatattcagaatttggcaaaggatgagaattgcaagacagatggcaatttcttgctaccagatttgaatatagtgccatgtgacgaaaatagtgaccactatacgtctttaggtgtggaaacaacactatatgggataaggattataaggtgaaagaagctcacttaatccatgagaaagtggttttgagaatgtttaagctgatctgatcatctttgactcggctttttaaaagggttcgcgccacgcatgagctcgaaaagacaaagagtataaattcctcaaggaagtttcctttgtgtggtggttctatatatgaagatcatcagcaaatgtgtaagatagataaaacaaagagaagaatataatttctggttgtttctttgtagcaataacaaaaacagatattttgtattgattgtctatatttgcacaagtggtaaaatgtcccttttcagcaagaaaacaaaacagttgaacacaaaacctaaaatgtctctttcaaccacattatccatttgtaaaaaacttagaaagttaggggattcaatatacacaatatatgagtcccacttgatttagccttgaaattgaaacgaataaaaacccaaatatatgtccaaatcggctcaataagattttttcccacccacaaaagaagcctattggctatgggccttagggctgagacaatctttttttaactttccaaattcttatgttaataccaaaaatggcattggttttagccgaagcataaactcaatcgtgagaaaaggattaggaacgaaaatcaggattaatacatgagcaaatttgaactcttatgtgtcaataagagaacgtaatggtttttagtactttttctttaggtggtttacatgttaccatgcatgtagagatgtatcatcatacttaagtggtgcatttacagatgaaccatctactgcatatgccgacgacccaaattcaagagttgctacctaatcccaacgcaccattattacagcgtaatctagtttgattcatcataatcttgattagttatatgatttcatcgttaaaaattcattctggtgaaatttaaacccacacgtatagttcatttagaaattttcttacagcatctatccaatttagaatcttgaatattgacgatataaaaaatggatcatgaatatttatggtatgatgtacataattttagccgtattaaaatatgcttagtttctctataagcatatgttttatatccatacaaggttatggacttatgggccacattctcataaaagtttagttgagatggtaatatcttattctaggccaagcccgatgagtttgatattttggatcctacatctgcggaataaaacctgtaatgaaaaacgtctttatggatatcaaaactatgcttaattaatattatgctttcaaatcctaaatgagaaaagaagaaccagctggaatcgttcaagaattgattattgcttatcgtcttttcgatattgggtggagaaagatggcctaagatactcaaatgtgtcgaattcataaccaaaagtgagcaagcaatgtgggtgtggtatggccaaacgcagaagaattgagaatgaaagaagaggagagtggaagagtggtccataaaaaagaattgaattgaaaatgatataacttacttctctttgcttttctctattttgggtggtccacttttcatggagaacagtctaatttaggagttttaactttgaggagcatactatatgtcttattcctcttgacttttatatactactttaactcattctttttacattcatcaacattacatgtttctgtgagttctactagttagaaaattttatgatcaaaatacagtttttgttcctctttctgtctttgttatttttactgattacttactatgaaaggtaattaattttaattgaatttaatgttggattattacatgatttatgtgctatatgtctcattaaaagtctattgtagattcggtttaatttgctcggactggaaatcttttaccatagccggccaagaagattagtaggccccaaactggacttttttttggttcacaatatatattttatacaaattaatatatacaatgataaagtagaaccataaatatgttgcatttagctttttggaaacaacctaaacatgaaaaaagtggaataaaaatatcaataatgttgggatttcaaatcaaaattgtctgtcttggttcaatggttcacaaattcacatatttgttgtgtattaactataaccaatgggaaagaaaaatgaaataaaaagactaaatgtaagcaataatcttaaaaaatctttatatggcatggttttttccagtttttaacataactattttatgttgcaatttgatcaaatttggaagaaatttgagcacttcagtcaatttgaatatatggggaccgagtattattgattaaaagtagggtatgtgtatccaatatactttgagttgttggatattaagatttttttgtggaaatgtgatgactttaagtacacaattcgcacatagatgtatcatacattaactacacctagaacataaattaaaattgatattaaaataattatgcgtatcaatatttaattttcaaaatgtaaaaggtaaattaatactatttaacatcttgatcatgtagttaactttgacatcatctttttcatttcagaccaaattttctcatcctcttattctaaaacaacaccacgaataataaaaattacatgaatctgttaatcatcgtatatataatcctaactaacttttggtttttgtttcttaccgctatgactttgatattttctatatggcaagatagaaaaaatcccttctgattataagaatagcttaagaaacactaactgtgctagcaatggccaatgcttgttaatcaaatagttcaattttttaaatgtttaactgttatatgctctttctctctaactatcactaaaatttaggaagcctccgtcccagataaactacaaatacaatggttcacctggataaacagaaaaagaatcaagatttcttatgaactttacatgttcacatgatatatgtgacatatccaaaattggacccaaaatctaatcaattatgatcaataacgtctatcgaattcttcgaggtttgtcatatcacttgccataagttttgtccatacccaatagaaattttgtgaacaaaattttagtgataatagttcaccactttatccggtatacaagtgggaaatgattgccattaactttttatcgaaatattaatatcacaaaagaaaaagacttgatttggataatagtagacaggttaaccaaattgaatattttctattggtcaagataatttgttggggaaaggttgagtcttgctcccaaatttaaacatggtcggagagtaattataattcacgtcttaaatctattactctctctattccttattatttaattttctagaaaagaaaatttatttcaaaaaaaataattttttaggttttctatgcaatattattggttattattgatggatatcaaattttaagataaacaattaaatatcattggtttaggattataaaaaatgtaaattacaaaacataatatatttataatcaatttttaatatgttttttagtgtttttctagaaaatcaagtatcaatgaatagaggaagtattaatttattatcaaacgcatgtttggtttgggatttctttgataacaacaaaaaccaaaatacacacttactaattaacgataaaactatatagaagtgttttatatatttgcatttaattccattgcaaataaactgttctttctggtgttcaatttcataatatattgaggcgtgtaccttgtcggcaatatatatttgtgtaagaatgagatatgtcatgacgtacactatttagctatgaagatagacaaagtaatgagacttgcctttgacaaagtgtatatgactttctgcaagtactctcgtttaaacccatcaaattacattaatgtttctgattagtatagatgatcgacaaggtttaatgaatttttttgtcaattagcaacatttcgtttccatctctaccccacaaatttaactaacccgtttgacaaaatcctttaggtactccattgtcggcaaactaattgaaatctatgaaaacctgttttaccttatacaaacaaaactatgaaaatatagtgaaaaaagattattttcacgtttacttgttttcgacctcatatctaattttcttatcaaaacaataatttgtggcattatattttgagctacacaaaaaaaaattgtgaagacaaattgatgcatttttatcggttttagaatcttttgtttgtgcatttttgtcaaacctaaatgtgattttagtgtcccttataatttttttttcttcaagtaatttcagattctaagagaaatgtgagtctcatttagttataataaaatgggaatgcattttctaaatataattttacacaatttcaaattttttctactcctcaaaaactgtctatcctacaatataaacttaacaaagtgtttatatatagtaacaacaacaacaacaacaacaacaacaacaacaaaaaaaaagaacaaacaaagtttgtgtatatatatgcaacacatcctacttagtattttactgttgcatagtaagtaaaacagtagtgtgtcataaaaagcatagatattatttcccgctttttctttttaaattattctcgtaagtcgtaactaaaatattatactatactatagtataatttaggaaccgaatatatatcttccaaagtttgtttatttttcgttatggcttgacagccttgtgtgaaatttggatggatgtgttgttcaggctttaaagaaaaggacgcaagcgaagatcaaaaggttgtgaaaaggacacacttccattaaaatagtaagcctctctctcgataacgatgacccaaaggcaaacacattttcttgtttagccactgacctataacaacatattcactgttcgataatctcacgttttctataacataattatatcgatgaatgtatattacaatttaggtttgaaccacttagttttgtagttaaccaaaataccgaatagtgaatgatgagatggattaatgggtattggtgagctagaccgaagataagatgaaattgcaacaaactacaaaatgagattaacaagacaaacataatgttacaaaacgtataactatattacatttgttttttaatcaaaaagtttatgtctccttaggtccaaaccaaaacatgaatcattcatccccaatgtattgattggagttccttctaaattcgattttaaaaagtacaaaccaaacgaaacactaaattatttaataatgtgttggaagatcggtaataatataaaggatttttttgctttatgtcagaatacgacagatataaaatttgaaaaatgtttcatgaaaatgtgtttttgtcagaaccaaaattgattttattaccttaaagaaataaaatggttttattcagaattgtgtggagtagtaggcaggggaccatttggtgatagctaaacagttggctatttaacacaccttcttctcaccaacaactggaacccacgcgctatctcgtccccacacccatttttcttctttcaataataattatatgtttttcttaattttcaatgtgaatcgaaatattcaatcagaaaattgaattagtatatcttaatacatagtttgaacaaattaattttctttttattggagaaatcgaatccaaattaaagaaaatatattggataatgaatattaatggatttaaaaatcttattatataaaatatgatattcaaagtttattgtcatgaaataaataggtaacctgtattgtaaaatagaatgagtaaaatttatatcaaatgtataaagtgcaaattgttattataatttaaatattattaaaaactctattatattttttccacctatttattttggcaaaccttattaactctaatataaaataataatttgtttttgtaagttaggaaatatatttgcataaaaggagaatttaaaccaaaatgaaatcatatcaatccttcattctagattatgttttagttttgatacaattatgccagataaatcaattcaatccaaaccaaaatattcaattccaaaaccaaactatatcttaatatagtttaatcgtattcattttcttatatttactaatctgaatatgaactaaaacccaaaaaaagatctaaaactaaaattttagttctaaattaagactatatttaaattaactaaagttcgaatctaaacaaaaattataaacctaaatcgaaaactaaaccgaatctgaaacccggtttgagcatctcaactttatttttcattgttggggttaaatcagtccttctgctttaattaagccggcggctgtcaggctaagtctgaaaaatctaggattggtccccacgttttttttttttttttttttttgctttttcaatcttttgtcgtatctattcatttcctaattttcttataatcggtgttgcatcaatccaaatgtacggttgggattctcttatccgaaacgcatgctattgctttgttgaggggaccatctgtggtccaaagtccaaggtcttgacgcgtgtcctctgtcttttttggcccgcgagtgtagcgacgtgatttatggtcccctcatctctctcttaatttttttccttcattaccggctatttccggttgattggtttatgctaaccggttttatcctctgtcgccgttaaatagagggaagctagttcggtaataattgtgattagcttctcactaatttatactatggttaagcagaatttttaatgcggttgatacataacaaacgaaattaatattgttgatgcatctaggttattaggttcgattcttataacataatttagtttttcatgtaaaattatttttcgtggttaactaaaaccttgagttgtctaccaaaaaagaaagaaaaagttaagcataagtgtataaccttaagttatggacttattatgggtatgtggaggggaacgtagtttctaaaattgttcatcaatattgcatatattgatttgttagttataaacggatagtattttagtgatgatataggagagaaaaacaagtaaagatttttgggaaatcataaagaaaacaaatgggtattagtgtatgacaaaattaaaaaggttagagagggatgtcaaaagtgattaagagataagaaatcttcgaagttgattggttcttttttcgacttcaatcaatacttctcctttttgttgatgttgttcttcacatacacacttcgttgttttttctttcattcttatgtagtttttagtatttgatttgagttatcttcttctttttgtttttgtatttctcatgttaaattattcatctcttataattataaatactagtgaatgattagttgaaaataaaatttacattacaaataaaaatgttattacgacaagcaattgatttaatttaatttatgaatatcttttattttagctgattatgattttctgacgctcctcggagtgacgtggaaatcacgctccaacatttacgggggttgttacgtatcgcgtcgctttagatttgtgggttgcttattgtttagggattgtttattagttttccggttactatccatttgcatccaaataactcaataaacctaagtatgactcacttgtaggaatattcagtagatgatggagaatatttcaataataaaaccatttctgactagaattaatataaatcaatagaaggacgtaaacatcactcaaaaaatgatgatcgatattagaagaaactgtagtgggtaccaagaaaattaaacatacttgtcgtcggcacaaaatattttggattgtgaaactataatgccttgttttagaaagatgtgagagaatataaaaaaacttatgtgttattcaattatagagagatgaaattcaccatataaaacttacatgtgttatcatcagtaattacaattatacacatcaagaaaatttctatatttttctaactaggaaaattgtacttcaactgttgatttcatcattgatctagaatatctaattacttttactatcgtacatattaaaatcggagatatgatgaatcgaaaagattaaaactatataaatttttatttttgtaaactttcctacatggacatacattatactaaaattatataatatgtaatgtatgatcgtgcatgtttaaaattcagcgtttcacacgtgtagtttgggacaacttcggcgtttttttggttgagtaagatgacatgtggctcgacattcataactattgtgaataaaataaattgatttatgtaatgattggacacatttgatgaagtggtttcttgaaaataagactttggatggatgcagtgtggacaaaccggtataatttgtttgcggtttagtttatctggcagacaaaaaaccgttgcagaccaagtttatttgtatgtaaaaatggtctgcagatggtccgttgcggttttcttctattttttttagatcactacgaactataattaataaataataaataaaaaacggtatgatccgttgacggttttatccgccccaaccgccataaccattcaaatcctaaataaaaacggttttgataatataagaaccagcccaaagatgaagttatatatgtgactatgttaacacacatttatagtatgagttaacctagacctatttgcgtctcacttcttattaaatgctaaaaatttaccaaaaggacgctattcatcacaattaagtttaaatctctaaattaattgatcgtttaagtttttaaccaaactcaaataaataaaaaaatatacgataacttttattgtgacgatcgaatatactaccatcaaattttataccaaatttctgtttcgtagcatgtacgaaaattttcactccaaaaaaaatctaaaaattatatttaccaaaaactgtgatttcagaaaattatgtgattttaaagaaccagtgatttctcaaattatattatatgaaatgattattattattttaaaaaggtgaaagggtgaagcaaaaaaatagtgtgcataaacaaataagctaatttgttttctggtacttaggtcttttaaatccatataaataaattcttaaaagattgttttatttcaaatctttaacctaaaattgtaactttaaattcatgattaaattttttgttttcaataatttctcgtaacttcattacataaaacgagaaggatttataataggtaaaggcgtgaagcaaaaaataattgtataaataaataagttaaatttgtttcatagtgccataaaattacactaacatctgaacgtgaaacgcacgcgcttcttcatatcatagatacgttgcgtcttaaaacacaacacgtagcaactctttttaaaaaggaaaaatacatttattattcccaacaataaaaaaaatcaaacacagtcgaagaaggcaacgacctttcgcagccgtcagatcttaataaatacagtcgccactaaaatttaacgacatagatcgaaccatgacgacctactttctttaattaattttctgtcgtgacctaatcttctatttgttgtttcattagtcacttacttttatatttattctttcttaggtctatgtggaccaaagtgattggaaaagaaaaaaaaatacatttttgtcaaccataactaaattatcttattttctcaaatgcactgtttattatgtagcgtactgatttattaaatacttttgctttctatggttaatttatgatgtcggatttttatctttcccccaataataatatcactatagaagaaagtttacaaattcttagttaaatcaaaaaagattttatcagttgatttgattatacgaggtgacatcaatttttgtcttctttaacaaaaaaaatcaatttttgttttctttaacaaaaaaaatcaatttttgtcttactttttaattagcatttagaaaaatatttaacaaataaaagttctcataagcgatttttaaaaaaatgttttgtttttactatctttcagtttttttttttaaattaattttctaaaaaaacacatatattaaaaaacatattaaaactaattataaacatattatcttttgtgatttatatttttttataattctaaaccaatgatattcaattatttatcttaaaattaaaaatttatcaataataactaataaataatgtatagaaaatttaaaaattattttttttaaaacaatttttttcctctaaaaaattaaataataaggaatagagaaggaatatttttttatctaataaattccatataataattcaattatattgataaataggttgcaaaaaataagaaagaataaatatgagaataaatggtcatctctcgatctctcagctctgtgcaactctgaacacacccacacatatatactcagatacatacatacacaccacaaaaaccaattattttccaattttaagaaaagtttctgtgtctttttttttttttttggtgataattgaaacatatgaaacaatcgtcgtcatagaagcagcagagattcaccttctttctttatctttccctctcagaaacaggaaacaaaattcaaaaagaacaaaaaaaaaaaggtcaaaccaaaacgatggcgtttcatcacaatcatctctcacaagacctctccttcaatcatttcaccgaccaacaccaacctccacctccgcaaccgcctcctcctcctccgcaacagcaacaacatttccaagaagcaccgcctcctaattggttaaacacagcgcttcttcgttcctcagataacaacaataacttcctcaacctccacacagccaccgctaacaccacaaccgcaagcagctccgattctccttcctccgccgccgccgccgccgctgctaaccagtggctatctcgctcctcctctttcctccaacgaaacaacaacaacaacgcttccatagtcggagatgggatcgatgatgtcaccggaggagcagacactatgattcagggagagatgaaaaccggcggtggagaaaacaaaaacgacggcggaggagctacggcggcggatggagtagtgagctggcagaatgcgagacacaaggcggagatcctttcgcatcctctttacgagcagcttttgtcggcgcacgttgcttgtttgagaatcgcgactccggttgatcagcttccgagaatcgatgctcagcttgctcagtctcaacacgtcgtcgctaaatactcagctttaggcgccgccgctcaaggtctcgtcggcgacgataaagaacttgaccagttcatggtatataaatttcagatttttttgttctataattttataattaacgatttcataattatacttagcacaaattttaataatacacaccgacttaggtttcttgatttttgaaatcttaaaatattaaaatcaagatttgtgtttttagggataaacaagactaaaatcccaaaaaaagagcttatgatataataatggtcatgatgatgaagaaaatacaaattttgttctttgtgtttattgtgtgtttgattaatgttttttttatggtgtagacacattatgtgttgctactgtgttcatttaaagagcaattgcaacaacatgtgcgtgttcatgcaatggaagctgtgatggcttgttgggagattgagcagtctcttcaaagcttaacaggtgagaaaatgaatcctgtgattagctcatgaatccaatagttagttttatgacattgacaagttttgtgttttattggtgagattaggagtgtctcctggagaagggatgggagcaacaatgtctgacgatgaagatgaacaagtagagagtgatgctaatatgttcgatgggggattagatgtgttgggttttggtcctttgattcctactgagagtgagaggtcgttgatggaaagagttagacaagaacttaaacatgaactcaaacaggtaataatcaacaaacttgttctttgaactagttcatgaactaacaatgtagagggctttgtcttgttgatgaaaagggttacaaggagaagatagtagacataagagaggagatattaaggaagagaagagctgggaagttaccaggagataccacctctgttctcaaagcttggtggcaatctcattccaaatggccttaccctactgtgagttcactcatctaacatctctttataacttcttcaagttcattcattgagccataaccaaatattggtttgtaggaggaagataaggcgaggttggtgcaagagacaggtttgcagctaaaacagataaacaattggttcatcaatcagagaaagaggaactggcatagcaatccatcttcttccactgtattgaagaacaaacgcaaaaggtattattatactttaatatagtcttgtaacataaccgaaaaacttatggatcggactcaaagaagactgaaacttttgtttgtctgatgaaagcaatgcaggtgacaatagcggaagagagcggttcgcgtagaaacaacaaacatatgatgtgaattggggaggtggaagatgggatttgaaagcagggttttagggatttaaagttgagaattttatggaggagtttggattatacagagagaggggacagtattagaaagtaactttttgtgcaattacatagtaacgtagtttggttatgtgattatgcccatatattttattaagtagcacacaaaccaaaaagaaaatatgaaaactgaagatgcaggcttttgtttaatgttttttgtttgtttgtctgcatgagttttttttttatgaaccatcagataatcatcatcatcatccataatatatcttgtgaataaagatagtgagagaggagaacattgggatgcacaagttttcttaatctactagtatatgttacgcattgaccaggtgcatatgttaatttgtatcgcaccacttggttagcttaatctatgtgactattatacagtatatgtttcgcattaaccgtacttaacccatcttatgattcttatccgcttagttcgtagtatttattgcgatgtcacattccaactcgtgatattggcttgataagtaaaagacattatacatggtagatgacgacaaaaaataaaacataccccatcttacataacgtagcttgctgcgtacttttgtaattgtaataatttgaaacgtgttcttttttctagtcaaaattgtttgtttatcctcatcttgttgtttcgtttgtcacgtttgtgatagccacaagttactgtaagttttcggcgagatttttctatcgatcacggagagattctgcacacattaacaaagataattagagtgtccttaagtattttggtcgcctctctattagaggaccatacaaagttcaaagactagtctcatgagaagcccattagtacattagattaaatctaggaaagtagattcatataagtagttttgtaatgaacatcaaagttgttaacttagagaattgtcatttggattgtataaatggtttgataaacgaagtctaacattagtatgtgttagtcttctaaattcaaataataatcggagttttggtctcttggacgatgcttcacagtgatattcaaaagtttaccgttatcacccaccaactagagaagccaaattaggtcttttaccaactgtagggtaaagaactgtcttcatgtaatcattataaccaccaccatcttgttatgctttgtttcttcttcaaattgcagctttcaatatacaacccggtttacgttctggtttacactttagacgtttcaatttacaaaattgggccgattgacagatattggacctggcccatcaatctaaaaatgcgctattttgaatcaaagacctatttaaatcttccgacgacgactccgttcacatagcagaaacagtggcgacaaaccctatcacggagccaacccgcattttcctctagctttcgcaccgcctctcgctctctcgccccaccggttcgtctctgacattttgtgcttgatttggccgttacaaaattctgattgctagttcatgagattcctttttgacaggtgacataaagatggatggtagcttgtatggtgagtgtggtaactatattggacctgagattgaatctgacagagatagtgatgatagtgtagaagatgaagatctccaagagcctgggggttctaatggctggattaccactatcaatgagaaccaaaatattgttcttcctgaggataagaagtactaccctattgctaaggaggtttatggtgaggatgttgagaccttggttatggatgaagatgagcagtctcttgagcaacccattatcaaacccgttagagatattagatttgaggtgggggtcatcaaggatcaaacaacaacgtatgtgtcaacactgtttcttatcggcctcatgtctaatcctgcgcttgtgaggaatgttgctcttgtggggcatctccagcacggcaaaactgtcttcatggatatgttggtagagcagacgcatcgtatgtctacttttaatgctgaaaacgacaagcatatgagatatacggacacaagagtcgatgagcaggagagaaatatatctatcaaggcggttccaatgtctcttgtccttgaggacagtagatccaaatcatacctgtgcaatatcatggatacacctggaaatgtcaatttctctgacgaaatgactgcttctttaagacttgctgatggtgctgttttcattgttgatgctgctcaaggagtcatggtaactagtctttactctctcttttttcaagtatactatttgtagtactaacgctattaatcttttttcaggtaaacacagagagagctatacggcatgcaatccaggatcatctccctattgttgttgtgatcaataaggtacatcatgcctaaagtgtgaaattttatattttcatacatttgcttgacctttgctttttgtctgcccaacaggttgacaggctcataactgagctcaaactacctccaagggatgcttactacaagctgaggtatacaattgaagtcattaataaccatatatctgctgcttcaacaaatgctgcagacttacctcttatagaccctgcagctggaaatgtatgtttcgccagtggtacagccggatggtccttcacattacaatcttttgctagaatgtatgccaagcttcatggtgtggccatggacgtggataagtttgcatctagactttggggagatgtatattatcaccctgatactagggtattcaatacaagtcctccagtaggtggtggagaaagagcatttgttcagtttattctggagcctctatacaagatatacagccaagtgataggtgaacataagaagagtgtagagaccacccttgcagaattaggagtgactctgagtaatagtgcatataagctgaacgtcagacctttacttaggttagcctgtagttcagtgtttggttcggcatcagggttcactgatatgttggtaaagcacattccttcacccagagaggctgcagctaggaaagtggaccattcatacactggaaccaaagattctcccatttatgaatcaatggtagaatgtgatccatctggacctctcatggttaatgtgacaaagttgtaccccaaatcagatactagtgtttttgatgtgtttggaagagtttatagtggtaggcttcaaacagggcaaagcgtacgtgtactaggagaagggtattcacctgaggatgaggaggacatgactataaaagaagtcacgaagctatggatatatcaagctaggtatagaataccagtaagcagtgcccctcccggttcttgggttttaattgaaggtgtcgatgcatccatcatgaaaactgcaactctgtgtaatgcaagttatgatgaagatgtctacatattccgggctctcaaatttaataccctcccagtagtcaagactgcaactgagcctttgaatcctagtgagctgcctaaaatggtggaagggcttaggaaaattagcaaaagctatccccttgcgataaccaaagttgaggagtctggggaacatactattctaggcacaggtgagttgtacttggattccatcatcaaggacctcagggaactctattcagaggtccaagtaaaggtatctctaatttggctctatgactatgatttcgttgtgcaactgattactaagatttgtttgtttcctctcgctttcttaaatttgtaggttgcagatcctgtggtctccttctgtgagacagtggttgaatcttcgtcaatgaagtgctttgctgagacaccaaacaaaaagaacaaactaactatggtaagagatattcctttttccactattatcccttagatattagactgcgatgtttcttattgtgctcattgtgactgattatgtttcatgctaaagattgcagagccattggatagaggacttgcagaggatattgagaatggcgttgtaagcattgactggaacagagtacaacttggtgacttcttcaggacgaaatatgactgggatttacttgctgcacgttccatctgggcttttggccctgacaaacaggtgaaaatgcattgcttatattcttaataaactgcaattgtggttggttttgattatttcactgatggttattgattttcttcctaatcaggggacaaacatattattggatgacacccttccaactgaggtggacaggaacttgatgatgggagtgaaagactccattgttcaagggtgatcatctttcttctgtcacacttttctttgtctcgattttgttggctttagctaagtggcttcgtttatattccttttgcaggttccagtggggtgctcgtgaaggtcccctctgtgatgagcccatcagaaatgtaaagttcaagattgttgatgcacggatagcacctgagccgttgcatagaggatctggtcagatgattccaacggcaagacgtgttgcatattcagcctttcttatggcaactccaaggctaatggaacctgtctactatgtggaggtacatatatctctttccatttttgctcttcacaattttttctttagaatgataaataagagtagttatggtttttgtcttcagatacaaacaccaatagactgtgtaactgccatctacacagttttgtcacgtagacgtgggtatgtcacatctgatgttccacaacccggtactcctgcttatatcgtgaaggttagttttgttttgtttgtgtctttctccttccttactttgttcctgttatttgagtgaatgatgatgattcattgagtggtgttgatgcaggcttttctgcctgtgatagagtcgtttgggtttgagacagatctgaggtaccacactcagggccaagccttttgcctatctgtgtttgatcattgggccatagtccctggagaccctctagacaaagccatccaattgcgcccacttgaacccgcccctattcagcatctagctcgggaattcatggtcaagacccgccgtagaaaggtatttattatttcctttgttttagtgctcatgccaaaactttgatgcggtttctgatacaaaatgaaaccgtaaactgctttattactctagtgtttgttgaaatgaccccagaaaactcccacaaaccaaaatacaaacagcccttactaattacgctttaaccaagtagcaccagctataatttgcctaggctagttatatggtagactcattggttgtttggatcctcagtttcaggctctcaccgtatgtgtgtataatttgttggtattgcagggaatgagcgaagatgtcagcgggaataaattctttgatgaagcgatgatggtagagcttgcccagcaaacaggcgatctccatctgcagatgatttgatcatctctgcactttttcatatcaatcgtgagcctatgattcaagactagtactagttatattctcttctctatacatgtgaaaggagaacaagaaaatgtggatcaattttgtaattcatgtgtcaaatttacgtttaaagttgagagattttaatgaactaaacagtccacatggtcacactcacgcatgactcacaaacagtttacgggaaatgttcataaagttttgtaaattgtaagcgaattcaattatggtaatggaagtgacaactaaccaatcatagattggactattggaaactgaactaggttataatgtattaatgcttagttatgcacatgatacagagattcacaagtatttgaaaacttttttactttttactggtttagatatagactcagtccttatatagcatattagcatctgcgttcgtttcataatctttttggcaacacaaagatgtacttgagtgtcctcttgacacaacttatgcaagttcaagtggatggaagtattactttcggattttggaactccacgaaatgttctgattgagttatagcttatagtaaagaggctttgtatactatgactaatccaaacttttatacgtgggctaaattttttgccattcatatcacaactcatttcaacaacacatgatcactttgcaaacactttagctttgtattttattttatttttactatagctataccatgttcgagttttaaatatctctatcgtccaaattgggcatttcacatttttaaatttacaccaattaactttagtgaaaatctaataagttgtttatatatatctcagttagataagcacacgtatattcgggataggtaccaatatattcaagataaacatataaaccaagtgtatcagtaaaacaacaaataaagcaatgttctagttttatactaataaaacattactctaattagtgggcaatcgaacaagttaaacctaatttaatacgaaattaattgtattcccttatggagtatatactagattttaacccgcggtataccgcgggacgatttatttttttaaagtaatatatattaaaacttgcaaattttattttataaaatattatattttacaatttataattgttattaactaacgctataccacgaatccatgagacaattgttaaaaaactgaagttttaacccctactaaaacagcatattaataatattttaaaattttataaatattaattcaaatacatccgccatataactcaattctaaaataaaacccgttctgtaatttctttacccgtcctgtgattttttttttaagtagtaatttttaaaatttaagaattattttttatatataaaagttttgcaaattgtatcattttctaatacatttatattttatagtttaattttatatatagtaacattatacataccacataacattttttgttttatataattttttctaaattaggatgatttgatatgtttaatattagtggtcttagaaaataataaattaaagatttaacccgtattgaaacggtggattaattatattttatttttttattaatgttgattcaaaaacccgtccctctaaatccgtcttgccaaaaagccatttatttattaatattatttttattaatgatatgactctgaattataatctaaacattttagttaataacataggagtgcaccatatttatttaataggagaatgtaccatatgagccgaacgcacttttatccaaatccaccaaaaaagtcttgcaaaaatactatagagataagaaacgattgtcggttttgataggtataagattagcaaatatatttgttagcttaaattagttaaagaatacaaattgaaaaggtatattacactttattcgaatatagtatcaaaacttatataacacagagatttgttactttttaattgttgaatatttttttttgtgctaatttttatgtgattaagatttaattgatttcgtaaataaaatattaaattgtttacgaacttatttgtttataatttagtaatagatagatatttgaatattcagtatattttgctttagtttaggaaatctttgatgacccgtctttagatccaataagccctataatctagatattaacctgctgtataccgcaagtaggcttatattttagttaaactaaaaacttttattgtaaagatgatttaaaaatatatgatattattttatttgattttaaatgtatagtaaactgtgagttgtatatgttttgttgatattatctatattgtttagtgtttaagattatacacttgtagtttgattgttaatttaagagtttgacatgtagtataccatcttgtattaatatcgatctaaacccgttaattctaggattttccagcttgtattaaaaattgaatcacatctaatatgttattaattattgtagtatataagattataaattttcaatataatatgtatgaaattgaatataaatatttcaaattatgacccgttactcagtagaaagttttcttaaatctatttttcatccgttataatatttttcatgtattgaacagtttatattcgtttttaaaattcaaattatgacatatgcgaaaaaaactctaattatttttttataatgatgatattatttttcggcaaaaatagaatcatataaagatgagaagtgaaatataataattaataaaaaaattaatatgataatttagatatcaaatctaatttgttgattttaattggttacttttttggaacttaataatgcatttcatttttctaattaaattaaattaattaaaatttagatatcaaatcttatatgttgattttgattggttattattttttggaaattaataatgtattccgtttttaaattaaattaaattaattaaattagtatttgactttttaatccttaaagagataaattaatttattctttaaaattttatttctaatggcatacctatgtaattacttacaaaaattaaggttacatttaaaatgtacttcccaaataatatagtaggatgtttgtattaacataaaagaccaataatgataaaaaaaaattatacaaaaaaaaagatttaagtaaaaaataaaaaattaaactttgatgacaaccggagctacaaacctctccggtgaagaatctttgccgtcgccgccgtcatcgaaattaagactatagtttttcagatcataagtgaaatcaacatctctcctcatcttcttcctgccactactaaaacttcttataaagtttttccactttggtcccgcgattttctcagaaatctcttttagccccttaagtttctcacttccccaattccctcttctttcttcctgcaaacaaccactccagccaccgcgactgcgagactcgtcgtctcctctccgccaccgggtgaaactgaaactacgaaagtacccacatccacaaaacgcagccgtttcttcataatcatcggagagcagattctctctatcagtggccatgataataaaaaacaaaacagcgagtttttgattaaaggaagagactcgatactatatataggtgaatgagtttaggacacgtggcgtgtcgaccgttgggtgatagtagtgatggggtatgttgttggactgttatgagaagagtgtgacagtgatgtgagaggagcgggattaggattcgctggctaatgatgaaagacagctgtgaaggcgggagcgaaacggttgctttcttttctcttttgtctttaaggataattatgaaacgatttattgatatgactaaatattaaaactttaaacaaattagaggatatctgaaaaagtgaaaagtgattacaattattattttaagaactggttgttgatgatgatgatgataataactgatagatatttttattttgatactatatatatatatatatatatattggtttcattttcatatatataagagagaaattttgaccaaaaaaatatgattctaaaaacgttgaattaccaaatatttgtactagtttggaatgaaattccatatttttagaattttgatatcaatttgcatcttcttgtttaggtgaattcttgtagtattgatttacatataaaatcccatataaaattccctacataacatttgaatctcgttaggtaatttttagattttcatcaatattgactactattaaataacacattattttcttgacaaaaaaaaaatgaaattactaagacaataacaccctgcatttggccatttactatcaaatatcgaatatttctagattataagttgattgaaattctatagaaatttatcatctaataactaactacatcatattggtttataaggttttattagctgaaaattatagttaaaaacaacgaataaagtagtactttcaatgatgaaaaaaaaaaagtagtactttcaatattgcaataagtaagattaaaaagtgtttaagtaagacaaaaaaagaaaaaggtaaccactaaccagcctggaaactgatgattagccgtggattaaaaagcaaaactggtgtttagagatttgctaaaccaaaccaaaccaactcacaatattataaaaaggctgtcccatgttgcctaaactaatctcattattataacgatgactcactgatcacccaataatcattatgtttttgtcctaatcatcataacaaagattgcattatgaaaagtttttgtttaattaattactcgatccaatctagagtacgcagttctatctctgatgtagcatgagatagattcaaacaagacttgactaagctgatcattagtccaaccatttcaagtgatatcttcagtttttgaggcttttagatgggcctaactagtccaacaatttcagtgatacctgcaatttgggttttgatatctttcacttatagatgtttcataaaaaatccaaatcttttttactaattacaattattatatattcaataaaatcatgcagttctatttcatgaatatttaagcatagagactcatgtatttttcttagaaaatattggcaaaatgagaaaagttaggatttaaatggtatgagaagatttgtaactaaatataaaataaaatattttagtacgtatgacctctagaaagaaaaaaagtcaacaaaattaaattcataaaccgcgtggagagaaaataaaggaagatcataacaaaacaaatcaaaaaatttgctaaatataatatccgacacatctatatatacatttttgcagccactttgtaaaataaatcatggagttgagatttatttacagcggctgccactagcatttaataattgtttttgataattagaaagaaaatcttctaattaaatatttgacatttaacaatcttcccaaaatctctctaccttacctacacgattaattactaaaataaaacttccaaaatatttaatattatttaattacttcaaaattatcatttttgatattgcttttctacatgattataatcatcaatccgtatagatatttgatagcatttaattactacaaaattacaaaatatttagacaataattcataaacatatcataaataagatcaacattaataaaataaatgagttttttttagaggacaggttggcagggtttggcaggacgttacttaataacaattgtaaactataaaataaaaacattttataatatacacaatttacaaacttttatatatattattttaaaaaataaattgttctcgcggtgtaccgcgggttaaaatttagtatgattgtaaattacaaaacttaccaatttaaccacttaaaccaaaaaccaaaaagagaaaaaaaaaatcattaaaaaagagtaatttaaggattccatatttaacttcaaaataaacctaaagtacctcgccgccaataggcgatggcttcaaatatgtagtttcttggaaatgcgttgattttttctgtaagactaagtcttcgtacataacgcacgactatatatatataataagtccttaagaactcaaaacaaagtcttctaaatcatttgggcgaaaagtccaaattaaatcaaaagatgttcaaagttgcaagagcgtcacagtatttggcgatcaccggtgctggtatcgaagacatcaagctttccaagaagtcatgggtgtttccatggcaatcttgcaccgtcttcgacgtttctccggtgaactatactttcaaagtccaagccatgagcgcagagaagcttccttttgttcttcccgctgtttttacgattggtcctcgcgttgatgacgatgacgcgctgattttgtatgctaggttgatttctcctcatgataaagattcaaatcatgtccatgagcttgttgaaggtgttattgaaggagagactcgtgttcttgctgcttccatgactatggaagagatctttaaaggtaaaccccaaatttagggttttagatgttaagtttattggtgaatatgaggatgttaaggtagatttaatttatgtagatatttttcggatttgattggtgacataaagttgtagtaagactagggttttgtataatgatttggctaagtctctttaaataaatgtcagtttgattggttataactaagacatattttgtgaaagttttggttaaaagagtttttgattttatgtatttgaagggacaaaggagtttaagaaggaggtgtttgataaggttcaactagaattaaaccagtttggtcttgtgatatacaatgccaatgtgaagcagctcgttgatgtgcctggacatgaatacttctcttacttgggtcagaagactcaaatggaagcagcaaatcaggctaggatcgatgtctctgaggccaagatgaagggagagatcggtgccaaggaacggactggtcttactctccagaacgcagccaaaattgacgctgagtcaaagatcatatcgatgcagaggcaaggagaaggaacaaaagaagaaatcaaagtgaggactgaggttaaagtgtttgagaatcagaaggaggctgatgtagctaaggccaatgccgagcttgcgatgaaaaaagctgcttggactaaggatgctcaggtggctgaggttgaagcaaccaaggccgtggctttgagagaagctgagcttcagactcaggtcgagaaaatgaacgctttgactcgaacagagaagctcaaggctgagttccttagcaaagctagtgttgagtatgaaaccaaggttcaagaagcaaattgggaactatacaacaagcagaaacaagcagaggcggttctatacgagaaacaaaagcaagccgaggcacagaaagcgcaagcggatgcggctttctactcaaagcagaaagaagcagagggacttgttgccttagctagtgcgcaagggacttatctaagaaccctcttagacgctgttcagaatgactattcttgtcttagagacttcttgatgattaacaatggtatttatcaagagatcgctaagactaatgcgatggcggttagagacttgcagcccaagattagtgtttggaaccatggtggagaacagggtggtggtagtgggaatgctatgaaggatatagctggactttacaagatgttgcctccggttcttgatacggtttatgagcagactgggatgcagccacctgcttggatcggtactctacgtggtgcggaaccgaagcaagtgactcgcagctaagagaatagtggcatggtttggtcgtttacttgtggttgaagatacatccatgcgaatgtaattttttattattttaatcctgttggaggacttggcttattcttgtgtgtgttttgaagtgtgttattgatattcttaattgaatcgtattcgtatatgttgaaaataaattaaaatgaggaataaccaaaaccagagaattatttcatttttatatattggagtcttgaactatttcaaattcaaagaacgatagctcgtcctttcgggaacaaccaaaatcaacgccctccgatatgtgggctaaataggagaaaactggttcggatggtggctagaaaataaaattttgcggttttggcggaaaaacacatcatgagaatggaaggtgttatgcgcatagtctgatgggaggtgatctagccactgactgactgactaagaattgtgttatgcgtgtagtctagcggaaggtgaaaggtaggaatagtcatttggagaattaggacgcgcttgggtcatcgaccaggacaggagcagctagctactagctgactatctgaagtcttcttcatgtgtagtttcttggaagtgggttgaagttttatcttattaggaatttgcaaaaagtctccgatcctattttattctaaaatatcatatgtcatagtcaaacaagtttgaagagattttggcaaactcaacgtcttattatcaaaatgaaaattgtaatgtatataagcttggtcatggtcaacatttaatataagatgtaactatatgctatacgtaaacatccgagattaggatctacatctattggtttaatgaattatgatttattttgtttggtttatatatggtgtacttatatactatagtttaccctaccaaaaagaaaaatatactatagtttaaaagattttgaattttatgtatttgctgtatcgtgtacatacatttttatttttttttgctaaaccgtgttcatacatataaatcttgaattttatcaaagacaatttcatcaaattttaacaaatatgattttttttgcaatacaattcagcttgacaaaatctaaatagaaagtcaagaatgaaacattcttcacaatcatcctttttttttgtgatatatacaagtttgtgaaatttctttaacatttctctaacagtgacagacaaagtcttgtaacatgtcaacgactatatgtaatatataaacacttctcacgaaacaaaaaaacaagtacagctactcattcttcgtctccaaaatcattttggcgaaaagcaatcaaatccttagatcctagacatgttcaaggttgcaagagcatcacagtacttagccatcaccggtggtgggatcgaagatatcaagctctcgaagaaatcatgggtgtttccatggcaaaggtgcaccgttttcgacgtatctcccgtgaactacactttcaaagtccaagccatgagtgcagagaagctccctttcgttctccctgctgtcttcactatcggccctcgtgtcgatgacactgaagcgctgattctgtacgctaggcttatttcgcctcatgacaaacagtcaaatcatgtgaatgagcttgttgaaggtgttatcgagggagagactcgtgttctcgctgcttccatgaccatggaagagatctttaaaggtaacttatatactttttttggtcccaaaacatttggtgttgccacaatgtaacacaaaccattaggccatactaatacaatgaattttctgaacgatttgattaaaaaggtttttttttttgtttatatggatttgaagggacgaaagagtttaagaaggaagtgtttgataaggttcaattagaattagaccagtttggtctcgtaatctacaatgcaaacgtgaaacagctcgttgacgtgcctggacatgagtacttctcttacttgggtcagaaaacccaaatggaagcagcaaatcaggccaggatcgatgtggctgaggccaagatgaagggagagatcggtgccaaggaacggactgggcttacgctacagaacgctgcgaaaattgacgcggagtcaaagatcatatcgatgcagaggcaaggagaagggacgaaggcggagatcaaagtgaagactgaggttaaagtgtttgagaatcagaaggaagctgatgtagctaaggccaactccgagctagctatgaagaaagctgcttggaccaaggatgctaaggttgctgaggttgaagcaaccaaggccgtggctttgagagaagctgagcttcagactcaggtcgagaaaatgaacgctttgactcgaacagagaagctcaaagccgagttccttagcaaagccagtgttgagtatgaaaccaaggttcaagaagcaaattgggaattgtacaacaagcagaagcaagcggaggcagttctatatgagaagcaaaagcaagccgaggcacagaaagctgaagcagacgctacgttctactcaaagcagaaagaagcagagggacttgttgctttagccagtgctcaaggaacttatctcagaaccctcctagacgctgttcagaatgactattcttgtcttagagactttttgatgattaacaatggcacttatcaggagattgctaagactaacgcgcttgcggtcagagacttgcagcccaagattagcgtttggaaccatggtggagaacaggggattggtggtgctagtgggagtggtatgaaggatatagctggactttacaagatgctgcctccggttctcgatacagtttacgagcagactgggatgcagccgccggcttggatcggtactctaagcaagtgaccgcctcgacagctaagaggttgatgccatggtttggtcgttacttgtgattgataatcattgaaagtgtaaagtgttattttattttaatcccgttggaaaacttggtttattcgtaagtgtttgaggttgtattttttactttaattgtattcgtatatatgttgaatgtgaaataaaaatgagagacaaattttcaggaatttgcagagaccataaggttattttgtagtatgtaatgtatgtacatattgagtggtgtttgatgtgtgtatcaagtctaggcttattgtaatttatcctttgagatgctagaggacaacaaaatctagtggagaccagactgaattagagaagtaaaatgccaaagaaatgctttgtttgaatcactatatatgttacaaacctagccacaaccaaaggagaaactaaagagcaggacaaggtattttgaaaagaaaggagcaactcacaggtacatatagattacggtttctctctctctgtctctttatgatccccagtttggtatgttggccgtggcttcatttatcatcttcactagtgttacctgccaatacattaatgaagagaactgagctgtgtttgtaatcattcgcagggaagttgccgcgtaattcggcccaccgactggaacataaaatgggtaatgtgttttagaaaaatgaaggcaggacatgtaaacataccacactttgtgaaacaccaggtggaggcattgtaaggttccttggtggtggtttgctatcatacgatcttttgtcaaatctccattccccgattttcccataagttaatttaccctgaaatcatcacaatcattgttttacaaccctctcttatcaatttcaaatcatatgctaatctcagtaaacaagttctcaagtttgtatttatcattttttgtcctattgtttataaatcataatcagaatttgaaagcttaccttcatatcataatcacatccataagtgtagtgtatgatgtacttgtcaccaacctctatatcccatggtggctgattcattaccacaaacaaaaccaaaccaaaggtccatcatctctttcataaatgcatcgaaaaattcgtatccatgtaacaagcaacaacaaatagactttctgaggttgtcactggccataattatttcactctcctaaaactcatgttagtatcaacaccttggccacactgacgcattctagattaacaatttcttggaatactgcaactaattattcatattgtatcttactagctcatgaaaataggcatggatgatacacttttgcctccattcataaccgccacacgcataaaaacaatatacaaatttcaaagaatgccaaaatgtgtgtataagattacctgaatcatgaagtctttgtgtagaatattgctaacaccatgcaatgcagatgagacagcataagcatacctatacttccacaaaagataacaaacaattgtcatcaattctactcaatcaacaatcaaaactacttctaatcagaagacttttacatttcaagaacccatccaaaagccttgtctgcttcaggatccttcttcatagccaaagaaacattcatccaagttggagcaatcttcttcaaagcatcctaaaaaaacataacatttacaatctttaaagggacctgatcccaaattgttttctaattatatgcaacaagaacaaacctttccaacaatgacaggagagtttcctatcggatcgatattagtaaccggtcctctcacttcaggataatacttcctcaacaccttctcatactttttcggttcaatgtaaaagaaaggaaacgcagctccaagcccatctttagccaaatttggtataggtttaacaatgatatgatcaggctcagacatcaaaatataactgcacacaaccaacacaacatctcagcacaatagtcaccacccctaagctaattaccaaaacaagttcaaaaaacaaaagcttcttaactcttcttttatatctgtttgttgaagccattgtacaaatgcccatggcctattcaacacaacataaccctgaaagattcaaaatttaccaaaaatcaatgttcaattttctcaaaagaagcaaatcaaattacgttatacctgatccatcccagaaggtaaaggctgagcaacaaaagtaggaatctcatccatatactgatccggtttaccggaatgcaagatccgagtaaacccacccatttcagaaccgggtccagcagaagcttgaatctttttgaaccaatagtacataactctacattgccaagtgttatagacggaatcagacgccgtcaccgccgtgtggaaaagtcttatccttttaccatcgttgtttctggatccgccgccacgtggtaattcgatgactgggtcaatggagatatcggaggaagaagatcggcctgggaagccttgtttgagaggagcattagcggagatgatgatgttgtaagtgattagagcaacggagagagttatgagaagtgggtagaacaaagttccaccacaacccatctgagagagagattgagattgaaggaagagtttgttcttcttcaaagtcgtcgtcgttgtcttcttcttcttcttctgcttatgccagttggtgaagaggatgccgaagaaatggctttcctttttataagttctaaattgcttttactctctttaattttgttccctgtttgatgaaattttactatttttactaaaagttaaaacatttcgggtttcttaagtttttcggtttagttcggttctataagagtgccaaccaatattattttggtttggtatataatacaaggttcatgctctaaaattgcaatacgttgagggaattacaagatcttgaaaatacacaaacaaaaagtcatcaaaacaactgagatcttactatttaccaaaggtaataatatccttgtttccgtttcagggtatttgtcgcaaagttgtggtttttgctttcgtaggaatgttgctcggagctctgttagaatgacaaattaacctgcaagttaaaaatgctcaaaaccaatttttttgtccaccgaagagttaacctcgaccacatttattgtaaacattaagcttaagtgttccattggagaaacttgtccttgtggtccttaaacacaaagtctattatttggctaccaaacttcacttttgactctcatgctttagcctcccctatataattcagtactaatctatgtatatgcacttatgtttattattcgagtacaaactctgaaaatgttggcagtggagataaaaaaagaaaaaaatggagatcttttggctaacaccaccaataccatttgaacgaacaatcaaaagctcagaataaattaccacaagtgaaaagaaaaaaaaaaaaagactatcgttcttcaaaaagtgtgcttctccactcttcgcttttgctccaacaatctctcactctctctgcataaacatcatcacatgtttaagtaaacacaaaccaaatgaaacacaaaccaaatgaatcataaaccaaatggatcttcatatttaccctctgacgttttgactctggaggtgatggtggttcaggtctccgagttgaattccctcgctctgtaccttcctcctcctgcacctcgaatttatccgcaaccgacactcattaacacatttgtatattctcaccagttaccatttatcagattttactaacccctaagcaccggatttgataaggtttaccacttttactcctacccatctgtattattctatacacaaccaaagctctacgataataaaatctctttcactatctaattactccaacacgaattcaccacaagtaaatgacaagttagcatgttgcataaggcttctaaggaaataactaaataagtaacatgttaaaaggtgaaaacaatggtacctctgcctctctcgaagaggcttgtctactattgctgcctctgcctgtagcagcttcacctgagcttgaggaggctacgttttgagatataaacggcatgatctgctgaagaacactcgatatgaaattcccttcatctgtcgtagttgctggctctacttgtgcatttgcaactgcttcgtttgtttctgtggacgctgtggcagagggatttgctgcaccctgagactccgtgctcccggcttggttttctcgacgagataagggcctcaaaaactgatggattctgtttctcaattcagacaaaccccgaccgccaggagaagcactgctatcacctacatatttcatagaagcaaagatttatgacatatcctgcgtttaggtaacacatcatctaccaggtctaagaagattgaagccaaaacaaccaagggaaacatcaaatcaaacataatatgagacaacccagtaataaaaggtaacagacgtgaagttttctcttatcgacaattcaacaaataaatcagtacaatagtgtagggaagttatattagaactaaccttctcttcctggagtaccgacgctctgtggctgcctagaagattcagtaacaggctgatgtacaccatccaatccagtagagctacgtccaccaagagatatctgctgatatcgagcaacaacaggtataactaaggccacaggatttcgaagaggttcagatggacctctcgttgagggggcaggatcagtagtgctgctgggtgtagaagggattgtctgcccaggggtttgttgtgtagtactttcctctctctggttggtcccactggcgggcacccaagatcctaatataacacatcaccaagatgaatccagatataagattaaaaaaaggaacttaatatgaagtttttcaatatatagcaggaaagaacagttaatacttcgaaattacggatatgaatagcacctgtacgtattcttacctgtacgtattcttatctcaatatttcttggggcagaggcaagtgattgtcccgcaaaggggttagaatgtgcggttcctgcttgtaagcttccaatactcgtgcccagccgagaggagtgtgactacaaaagttaaaggtaacacaaaggtaaggtgagcaggacaagtggacacactggtaatggtgaaagaaagtaacaaatagatagaccggcaagggatttcgccctgtaggggatatgaacactgcaggtccagcatcaacaacagcatcatcctgacatgtaacataacaagtgtcatatagatgtatgggtgtatcatattctgtgaacaaaatcatatgcaaactaatgcatcaataataaaaattgcaagatttagatccacaatatgtagcaaaagaatacgcacaggtgtttgtcccaaacgaagcatcatggtggcacggccaagctccaggagtgaaatgcctaaactctccaagagggatcctgattgaagcatgtttgactggcacaaccttcgggttggcggatcggtcacatttacatgatccacgagctgcctcgaaagattctgcaaaagagagatacgaaacggttattctttgtttccctggatttgattaactaatgccagctcaagtcagtcagttaaaagatagcaaaaaccctgcatgtcactaatgttgaactagccttactaacttcaatattctaacattgcaacattcacgaagaagatacagttgttcccagggtactaaaagtcggaaacaataagtctacagggctaggaggttctgttaagagtttatctgagtcccataaattgatgtaataatttccgcattggtcaagactgtcaaaataagcaaagacacaaatggctttctcaaaaggaatgtatgagataaaagtaaaagagcatacagataagcaatctgctacttcaccgatcaacaattgccttgttgattgcagcacttctgccaaatgagatggtcttggaatccgactctctccagtagtagaagcagaatcttgcacattgcccactgaattttcagaatcttgcaagttattagcattgctacctgcaaaaattacagtcccacagtcagactctcgagacttgtttttggacacacaaccaaacatttaaaaattagtctaaccattagcagcaaactcttgtctgagatgattcagatattcagataaggttgtcaacgaatctggaatcgcctgcagtagtaaaaagttagcgtatgatgtaccttataaaaattatgtaaaatgagtaatcatggaaacaagggagctcgtactgctggttgtgaagatgccaagggagtagacgtctggtccacagcatttggtgtggcagatcgccctccggaagaatctcttgcagtgccaggaccagaactccgagacagcctctcatgaagaggaccctgacaaataaagggaactctcttacatccaaaaacgatttatacaaatatgcagcaaattatatgacaattaccatatcatcgatcccttcaataccaccttctggattagagatcccaagtgaacccagaacagctgaaactatctaccagacataaaacaaagctcatgaaaaggatcgcacatatttttgattgtcaaaaaaaaggaaaaggatcacatctaatccaacacacaaaaataaaaacagatcaaacagataaaagagggtatacctgtccaagatctgaatagactccatcagcttgttcagcaatgttgaaggatcctactacaactcgtgatcgttgactgccctggctgtcaccagcactcaaagcaggatcagccgctataaaaacaatatttccactcagcatgttgaaatagagtctcacaaaaagcattggtaaatgctaaactatcatgattatagaaattcaaagatgttcagtaacagtatttggggccacaaatttgtacgggaacttgaaactacctgcattactagttgaactctctgatacaggttgtctgactaccaaatgcagagtgtggccatcttcaacatctaagatggaaccattaaggaattttaccggtaaaaggaaaagtctaccatacgacactggaattgtaaacaaggaattcaaaaccaagggctacatcagcaaactagggttcacaaatcacaactgaaaaggaaaactctaagaaagaactggggcaatatgctggaaagaacaaaaaggatacgataggctgataggagttgatcatccttcataacttttccacgacatatcaagcgttgttgttccgtaacgacaccagtaacggaggcaacttgctccttcaatgcgggaacagggacctgagataaaacaagaaaacagaaagcaaatataagaaaggctatttaggacacaaataaacaagtgagtattgaaataaggcattagttccacaattttagtcaaaggattgattttagtaattagaaacttcattatgcaacacatgcatacgaagaaagacagaccttacaggtactagtctcagttcatggaaacagaaaatgaaacatcataagaaatctaaaccactatggctcgtttttcatacacatttatctacacgtaaggtgtacgtttgagaatccaacgtctttatctttatctcaaccatagcaccagcgcattgagatgcctcgaccataatttcatctttgccattgtctcccatcctttcaaatgccttcaaacacctggaaccaataaaagtatcagcttatatttagctatatcagctgcatgcaaaaacaacctttgatcatcaagcactgagacaaaactcaacactttttcgagtctatagaagaaatatttcatacaaaaccctaaagaagcaaactttcatggacggcactaagaaaatttcaccacgccaataaaactcgttcaaatcatgtagaaatcttaagactacgacttcaggagaaacaatgaaaccgcaatatagcttttgcctaagacgaaattcttgactaaatctctgaaaattcgtaaagatggacactttatatcaaaatcaagaggagaatcatgtctttaactactccaactccacaagaaacggaaaagaaaacaggtaaagatgtgatcataatcaataaacacgctacggaatctcaacttcgaaaactcttaataaatagcaaaccatattcatcaaattcaatcaaatcaccagaaaagttctaagctcttccggtgacagaaaaaaaacagaagaatcgatcttaaaccctagaaaaacgaacaaaacggtataaaagacgaaattagtaacggagatgaatcgaaacctagaaaattgatcggagtcgaaatcagctgaggaagagagaaggagatttggggaagaatctttaaccctaagagtcctttcgcggctccgagagacgattccgcggcgaaggagagtgagagaagcctggcaaaaaaaaaaaaaaacgattttttctgaattttgcctttcttcagctttaatattattattatcacgtgagtaataattttaaaagtaatttcaaatttgatgatttttaatttttaggcaaggaattttaattttgctgaattgtaagaaataaaatttggttttttgcataataggagaggtttataaagtaaaaatatctttgactttggcatatttagtaaagaggatattaatttattcagatttggtatattttggtttttcatataaatcaaatttatgtcaatattattttagaaataaaaatgaggtgattttttgaagcgttgtcgtgtttgatgaaagttttgttttctagaagtaaatggagaatgaagacatattttctatgttttaaattctttattaatattgtgtaatgtaatttttatacaataaatgatcagattaaaaataaatatggtaatttgtttcttatcttttaaattaaaatagttgggttgaagttataataataataaatagaggctcataacaaaaattaataactaaatataatatatatttaaaatattcgttatagaattaaaagaaacagagaaatggattggtgggaaatccaagttcaaaattaaaaaaaaaaaaacatgagttgaagatgctcttaaatatgttcaattttctttcaaattagaataactctattttggagttgggtttttctccaacctttaaaatggagaattctaaatgttaatgtaaactaaaaatagagatttctaagtatagaggaaaataaaataagagaaaatctttatttagtagttgaaaatgaagatgagtgaagaaaatcttttgaaagtgaatatgaagatggtcaaagtctcattgatcttaatatgatattgtattattgtttaaagtaacaataggcattcaatttaatcagtttaattggttcaattgttttggtttttcgttttttcgattttttaaaattctgcccaaattaaaccgaataaaattttgatttggttttgtttttggaacttgatttttaggtttggttataagatttaaaatcaattataaaataacagactttttataatttggtttgaataataggctaaagtcaacagtaaatcaataaaataattgggtaattccaatacaatcaaagtccaagttatataacaaactcaaactcgtcaaattttagggttttcgctaaaaatatcataacaccgaataaaaagattcaaaaaaaacaatggtgaataaaaagataagaaaagaacgaagaaggaggatctcaagctgaagacaagagattagaaaataaggaaggtgaaatgatgattagaaatctaggattttttttatatggttttttctaaactgaacaaaaaaattgttcagttttgatgtgctaaaccatataaccgagaacaaaaatcaatttagaatttcactgagtggtttataactttgaaccaaattgaaaccaaaaactaaaattattggttcggtcggtttggtttaaacagtctatgataattgttgaggactactttaaaagcattaaactatatgtagttatgagacgttcaacacgaaattagaacagtgtcctagctctaatgacttacttcataatgacatgaaacacaaaatcaacttacattactattagttaattctgaaaaaacgtgtctaacagtttataatgttttatatttaaaggggttattaggatccttcaccatccattgaagcacaaatcttggtggtttattgtaatgtctggtaaagtaaatcacatcttttttgcaatccatccacatagttggccacatcaacgaaatgtagctactccatatacttgaatatcataataatattctagtttatatttaggtatatatgagaatagacattccattatctcctttggtaattgatgaaattatcgttgaattccatgacaatttcttagttgttgaactcccacatcaccggttgggttcttgcaacgacagtgaacttcaagaattataccaggatgaagctggtttgagtttctatatgattacaagtttcgttcgaccaaaaatacttagtaatgataaccacaaaagtaatttttgttagaataaagatgtttttgtgaaaaacattttcctttttggcgttggtcaaataagaagagttgagtgaccaataggatcaaatagttttatttattcttttgactaaaacacagtaacattagccatccacattaattaaaataaaaataaaaattctaaacccatgtcacgtcaacaaatataaatgggctaaaaattattgatgggctaaattagcaaccgcccaaaagtaaattcttttgccagcagacgttttgcaataaataaaatttatacgtttttacaaagacgatttaaagtttcatgtgtaggaactaggaactaatctttgttgtcctttaacaaaaaaaaaaaagaactaatctttgttgtcacttgtcatgggtggcatgaagcgttaagcacagaacttttgatttcttaaatggatgtgtaaattttgattcaagtgctatctttacatgtcaaccaccttttgaaacaaaaaaaaaactttcattgcctttgtttttttgttaaataaaagaccttcattgtttgtatgaaagtctttcacacttttcatgtacaagcttgacagaaaacaataagcatccgttaatggcattgatatactgtatcaaatatcttttaaaaattctaaactaagtttattaattttaaaaattatcaattgtcaaatatatattcaggcaaaacatagtccggattatcatctagtaaaacaaatttttttggcagaacagttattaagatatcaagccattggtttataaagaaatggtggtaatcctatcctactatattatttgagaagtacattttaaatataaccttaatttttgtaagtaattacatatgtatgccattagaaataaaattttaaagagtaaattaatttatctctttaaggattaaaaagtcaaatactaatttaattaattaaatttaattaaaaaacaaaatacattattaattttcaaaaataataaccaatcaaaatcaacaaataagatttgatatctaaattttaattaattaaatttaattaaaaaaacaaaaaacattattaatttccaaaaaaataacctattaaaatcaacaaattagatttgatatctaaattatcatattaatttttattaattattatagttcacttctcatctttatatgattctatttttgcgaaaaaataatatcatcattatacaaaaataattagagttttttcgcatatgccataatttgaatttttaaaaacgaatataaactgttcaatacatgaaaaaatattataacgggtgaaggatagatttaagaaaactttctactgagtaacgggtcataatttgaaatatttatattcaatttcatacatattatattgaaaatttataatcttatatactataataattaataacatattagatttttttatgtgtatgatgtgattcaatttttaatacaagctgaaaaatcttagaattgacgggtttagatcgatattaatacaagatggtatactacaggtgaaactcttaaattaacaatcaaactacaagtgtataatcttaaacactaaacaacatagataatatcaacaaaacatatacaactcacagtttactatacatttaaaatcaaataaaataatatcatatatttttaaatcatctttacaataaaagtttttagtttaactaaaatataagcctacatgcggtatactgcaggttaatatctagattatagggcttattggatctaaagacgggtcatcaaagatttcttaaactgaagcaaaatatactgaatactcaaatatctatctgttaacaaattataaacaaataagttcgtaaaacaatttaatattttatatacaaaatcaattaaatcttaatcacataaaaattagcacaaaaaaaaagtattcaacaattaaaaatttatcaaatctctgtgttatatatgttttgatactatattcgaataaagtgtaatataccttttcaatttgtattctttaactaatttaagctaactaatatatttgctaatcttatacctatcaaaaccgactatcgtttcttatctctatagtatttttgcaagacttttttggtggatttgggtaaaagtgcattcgggtcatatggtacattcccctattaaataaatatggtgtactcctatttattagctaaaatgtttagattataattcagagtcatatcattaataaaattaatattaataaaataaatggctttttggcaagacggatttggagtgacgggtttttgaatcaacattaataaaaaagtaaaatagaattaatccaccgtttcaatacgggttaaatctttaatttattattttttaagaccactaatattaaacatatcaaatcatcttaatttagaaaaaattatataaaaccgaaaatattatgtggtatgtataatgttactatatataaaattaaactataaaatataaatgtattagagaataatacaatttgcaaaacttttatatataaaaataattcttaaattttaaaaattactctttaaaaaaaaatcacgggacgggtaaagaaattatagaacaggttttattttggaattggattatatgatagatgtatttgaatcaatatttataaaattttaaaatattattaatatgctgttttaattggggttacaacttcagttttttaaaaattgtcttatggattcttggtatagcgttacttaataataattacaaaatgtaaaatataaatattttataaaaataaaatttacaaattttaatatatattatttttaaaaaataaatcgtcccgcgatataccgtgagttaaaatctagtattcattttaaaagaagaaacaaaagtatagatttaggatacacgaaatcaaactcactatttaagaaaaagttaagattagttttaagattaaaaataagagtaacgttgatattattggaggataatacgaatttcgatgaatagttaatggagaaaatgataagactcccgagagcggaggctttgggtttcactaatcaaataattaggcgtacctaattggctttatcgcttagctggagtctactgtccactctctaccatattattaattattgggactcttatttaatcatcaatcatagtataatcaaaactattttattcgaataatgctagattttataatacaattttctgaattgaacataccgttttcttaaccataatttggaatggttgatcatgtggcgtacaaacacttcacaagcaggaatttttgaattgtaaatgatgataataatgaggatggatatataatcacatgacgcatgttatatctctactccattgtcggagttagattgataactcccttaataaaaaaaaattgctgcatagaagaaatatagagtacttttgattgttattacttccgaaattatattaaattttttatatataccataatttatctctcacggttatattttttgtaactattttactattgttttattaaacaaatttgccattttatgtcactatttagatatgtgatgcaagtggatacatgtgtcttaatggatttcatacgtgtcaaattatttaatagttaggccgttgcttaaaagatttgcttgtctcttaactttacccaacatgacacaacattgtgctgtgcttttttactactaatcattattaattagcctaatttagtatagtttaatttaagttttgtagattcgtcggaattaaccgttacaatgggtgcaatgaaccacatatttaataaatgcgtccattatagtttgattttctaacacttttcttaacgccatgaaattagtgtggacaaattattggtcttttcgttgtagaaggctacgagcctaagcaacgtgaacgttatggttttgatatgtggcaatttgggatagcagcaaaatcttatagaaattattatcaatcgtaaagaaaatattatcttaattctttactattaaaaagatatttcttttgtttgtcacactattaaaaagatatttcttagagtgtttacctttaacaaagaaaaaaaaagtatcttttttttgtaaccctactagaaagatattttgttgtgatgctttttctgcgatcgccctaatctagtcaataccaaaattaattacgcgaagacaaatcttataataatcttataatgaaaaagtcgtaaaagcacatgacttgactcagaggccgtagacttgcttcaagactagtccgttgggaactatatagctcaacctcttccttcttctggccaaacaagagaactatttacaagtctgcgtgattaatgcatctattaaaaattcaaatattggtaggtaattatgtacttaccactaattattgaagctccatgattcatacattttaaaagacgattgaattctcactggactaggaacatgttttacatatttacatattgttaggggtgtcaaaatgggtcaaaattcatgagtcaactcaactcaactcaacccatgaaccctaatgagttgaaaattttgactcaaatgagttgatgggtcaaatgagttgatgagtcaattggtttgatgagtaaaatgagttgggttgtattggttaatggtttcaatggtttacccaattaacccatcaaattttgtaaaattaaataaaaccaactaaaatctctaaaccaatgccaatttaagtttaaccaacacatctaaaccaatttaataaaattaatatttttccaaatttcttaaatatacaagcgatgaaattgagaaaaagtaaactcgtaattttttcaccaaaaaacataaatccgtgattttcccgctaaaaacgtaaatccatgattttctcgcaaaaaacaaaaacccgagattttcccgtcaaaaacgtaaacccgagattttcccgccaaaaacgaaaacccgtaactttaccgccaaaatggtaaatcccgtaattttcccgccaaaaatgtaaactcgtaattttcccgccaaaaaacgaaaacccgtaattttaccgccaaaatggtaaatcccgtaattttcccgccaaaaatgtaaactcgtaatttttccgccaaaaaacgaaaacccgtgattttcccgccaaaaacgtaaacccgtgattttcccgccaaaaacgtaaatccgtgattttccccccaaaaacgtaaatccgtgattttcccgccaaaaatgtaaacccgagattttcccgcaaaaaacttaaacccgtaattttccgccataaacgtaaatctgtaattttcccgccaaaatcgtaaacccgtgattttccccccaaaaacgtaaacccgttattttcccgccagaaatgtaaattcgtaatttttctgccaaaaacgtaaacccatgattttatcgtcaaaaacgtaaatccgtaaaaagtagaatccgtaaatatcataagtttgatgataataaattaataatgataattatttattatttttataataataattaattaaattattacttcaataggttaacccatttaacaactcaattcatcaaattaaatgagttatgggttgacccaactcattttgttaaatgggttgggtcaacccataactcatttaaccctaaactcatttgattatgagttgagttgagttgggttagccattttgacacccctacatattgtatacaagtctaacttacaataataattgtagagtctattttctacagcgagtttgctaacacaatactattatcaaataccttcgattatgaaaaaaaaacattacttataataatattaaaacgtaaagttttaaaattaaactattcttgatatttttgcaatatagtttttcttctttggatttattatatgttacgtaatcgttgaagctttttttttttgaatggtgacaaaaatatcaattttcaatcaaccaaaaatgaaaatatcaatttccattataactttcaaaaagttttgagttccacagtacctatttatatacattcttcgtaaatgtcaaaacaaatcattgtagtcacacttcaacgtctttcactgaattataatcgatttgtggctatgtaaaacaatattaaaacagctgactaaaccgaaaataaaaccttacctattttgtgtatacttttttaaacaaaaaaaataatttgaaaactatgactaagggtccgaatagtgactgcgttttgtggtgtgggagaagtgtggtgcggttcaaatagtaacgaaaatacatatatatatatatatatatatatatatagaaattttgatactgttacaatactgttgcagtgcggttttgtgtacggtctatatcaccatttatagcctaatttaagtgataaaaaaccagaaaagatggcggctaaaaagctagaaaaagagtgactgtaaaaaaatttattttcacatatagattttagcaagaagactgcgacccaaatctaaacaggctgacacataattgtgttgaagtcacgctccctcacagctgggaacattatcattcatcaccaccatgtgcatttatgtgctcatcatcaatttttacattttatatcgtcaagtaaacattattaataagaaaataatgaattatctagttaattatacaaaaatacagtaagttgttttgttcaaagtcagcaaagtcgaacccatatttggctgcggaaacttcatgcgtttttgtcgcaattgccacataacgttggaagattatttcatagtcaatggacgaagttggaagttaatttgtaaaattttaccaagagcaacgaaaactataatatgtcggtaaaggcaatgatttgtaatgacaacttccacatatattgcatagtcatatattaggttacatcaaattttgtaatgactatggaactatggcgtgactaatccgttgttggacacgtacaaatgaacaaaatttggaggatagtcatatatgatataaaaaaaaaagattgttgccaatatgatacatttcactggatttatagattgtgacatccttttaccgacttatgaactacatatttttgtattttgttgtatcagtatgttaggggtcctacgttgacaacaaaatattttcatacgtctaacaaagcaaaaaatgtatttataatatgtaaacacgtcgatggttcgccgacctttcaaaccgaaagaagttgatagcactattatgaagaccgattaattaagtttgaatcggaatttgaattctaaaaagccggtttatttaaatgattaaaatgcaacctacgtcgtacttagttgattatagtttaatatgtttatggtagtcacaaaaattgtctaattagtcgcatttttatgaattcttttttctttccttgttggacaagggatgcttaactattattattcgtagggttttatgttcagagacaatgtttccaaacgattcatctacatttgacagtagaaaatcaaaatatcacaacaaaacgtgtgctttttgctttgtagctagactgtgaattagcattttcttaagttttattaattttaaaactgtgaaaggaagctaaaagtctaaaaccatatgccaccaaaatgatcctattataacttactgaatttaaacatgcattataaaccataattttgtaattgatctaaaaataaaataataattattcctctttgaagttgttacgttttggttttggtttctttatgttaaatttgatttgcttctcgaagtttgaagacaacttttacctctaaaatgactcttaaattctatgttttttgttgaaaaatatagtttgattccaattaaagtttagatatattgcgatgtattttaaatctagttatgattgatattaattttttgaatctagttatggttgatattattttactaagtacattattatcatttctttttacaaactgtattccgacacttaattttcacggtatgttttataagagaaaatatccgcaaaacatattacagagtagaataaatcctttctcctttatatttatattatttaatacttaactctatcaaaatatcctcaacatttataaatatgaaaaacaaaatcagtagtcagtgaacataaaaaaaattatcgaaaattttacgatgagtaaagatcctctctttatttctcaagtaaagcaataatcagaaaaagctaaattgagttatcaaaagcagtttatctaacaaatgttaattaactttttctggtttaatattattgttcactaaccatgcataatcgtataacaacaaaaataatctcattggtaccattacatcaaataataaatagcgggaagataaacatagaaaaagtgataaaacaatctgcttcaagaaaaagataccccagtggacgactagggtcaatgaaaatgaaaacagagacaaatggcaattcgtaattattcacatttatttcagggtactttcgtaaatccccaacctgaccgtttctcgaatctgattacgtggcagtcatcacaaatgcccacaaaagcacttcgctgaaactcaatctcagtcgttagatcagaatccaattcttttcaatacggcaagttgagatccccaaacccatcatgtgtaaccatggttaagtcaattaacccaacacatagaaatctcctaaaatcaccaaaaaggtcacgaactttctcgttaattacataaaatgccattcttcgctttagctataaattcgtcttctgagactcgctaggtttgccgaaccaatcaccctaaggggacacttaaagagagaaacaaatccttcttctaaaatattcttcaatcttcttctcgaagcttctccaaaaatggcgattacttcttctagaaccaccagatcaaacggatctgcttcgctccgatccaaatcaccgtccggtcgattctgtggcgtttactcaaaccgtatgccgtcatcatctccgtcgtcgtcaggtttcgcttcttccacaagctcaagtttctcctcaccgtctacagcgtttttcagcagccacaatcagaacaaccaccaccaacacagatctgcttctccgacgcgtgtgaatctattcacatcagctccgatgacgcaatcgtttcgttactcaatcgataacagatctatatcaccgaatcgatccatcgctgtttcttccaacaaacctagcaatcatcacaagattccggattcgaggagaagatgtatgtgctctccgacaacgcatcctggttcattccggtgtagtctacacaagaacgtcgcgaatccacatggtcaaggtacagcttcgtatacaacgaatggattgaatatgcgtcgatctgcgatgacgaattc

SEQ ID NO: 743 - DNA, 110469 bp, Arabidopsis thaliana
gaattccctcgctctgtaccttcctcctcctgcacctcgaatttatccgcaaccgacactcattaacacatttgtatattctcaccagttaccatttatcagattttactaacccctaagcaccggatttgataaggtttaccacttttactcctacccatctgtattattctatacacaaccaaagctctacgataataaaatctctttcactatctaattactccaacacgaattcaccacaagtaaatgacaagttagcatgttgcataaggcttctaaggaaataactaaataagtaacatgttaaaaggtgaaaacaatggtacctctgcctctctcgaagaggcttgtctactattgctgcctctgcctgtagcagcttcacctgagcttgaggaggctacgttttgagatataaacggcatgatctgctgaagaacactcgatatgaaattcccttcatctgtcgtagttgctggctctacttgtgcatttgcaactgcttcgtttgtttctgtggacgctgtggcagagggatttgctgcaccctgagactccgtgctcccggcttggttttctcgacgagataagggcctcaaaaactgatggattctgtttctcaattcagacaaaccccgaccgccaggagaagcactgctatcacctacatatttcatagaagcaaagatttatgacatatcctgcgtttaggtaacacatcatctaccaggtctaagaagattgaagccaaaacaaccaagggaaacatcaaatcaaacataatatgagacaacccagtaataaaaggtaacagacgtgaagttttctcttatcgacaattcaacaaataaatcagtacaatagtgtagggaagttatattagaactaaccttctcttcctggagtaccgacgctctgtggctgcctagaagattcagtaacaggctgatgtacaccatccaatccagtagagctacgtccaccaagagatatctgctgatatcgagcaacaacaggtataactaaggccacaggatttcgaagaggttcagatggacctctcgttgagggggcaggatcagtagtgctgctgggtgtagaagggattgtctgcccaggggtttgttgtgtagtactttcctctctctggttggtcccactggcgggcacccaagatcctaatataacacatcaccaagatgaatccagatataagattaaaaaaaggaacttaatatgaagtttttcaatatatagcaggaaagaacagttaatacttcgaaattacggatatgaatagcacctgtacgtattcttacctgtacgtattcttatctcaatatttcttggggcagaggcaagtgattgtcccgcaaaggggttagaatgtgcggttcctgcttgtaagcttccaatactcgtgcccagccgagaggagtgtgactacaaaagttaaaggtaacacaaaggtaaggtgagcaggacaagtggacacactggtaatggtgaaagaaagtaacaaatagatagaccggcaagggatttcgccctgtaggggatatgaacactgcaggtccagcatcaacaacagcatcatcctgacatgtaacataacaagtgtcatatagatgtatgggtgtatcatattctgtgaacaaaatcatatgcaaactaatgcatcaataataaaaattgcaagatttagatccacaatatgtagcaaaagaatacgcacaggtgtttgtcccaaacgaagcatcatggtggcacggccaagctccaggagtgaaatgcctaaactctccaagagggatcctgattgaagcatgtttgactggcacaaccttcgggttggcggatcggtcacatttacatgatccacgagctgcctcgaaagattctgcaaaagagagatacgaaacggttattctttgtttccctggatttgattaactaatgccagctcaagtcagtcagttaaaagatagcaaaaaccctgcatgtcactaatgttgaactagccttactaacttcaatattctaacattgcaacattcacgaagaagatacagttgttcccagggtactaaaagtcggaaacaataagtctacagggctaggaggttctgttaagagtttatctgagtcccataaattgatgtaataatttccgcattggtcaagactgtcaaaataagcaaagacacaaatggctttctcaaaaggaatgtatgagataaaagtaaaagagcatacagataagcaatctgctacttcaccgatcaacaattgccttgttgattgcagcacttctgccaaatgagatggtcttggaatccgactctctccagtagtagaagcagaatcttgcacattgcccactgaattttcagaatcttgcaagttattagcattgctacctgcaaaaattacagtcccacagtcagactctcgagacttgtttttggacacacaaccaaacatttaaaaattagtctaaccattagcagcaaactcttgtctgagatgattcagatattcagataaggttgtcaacgaatctggaatcgcctgcagtagtaaaaagttagcgtatgatgtaccttataaaaattatgtaaaatgagtaatcatggaaacaagggagctcgtactgctggttgtgaagatgccaagggagtagacgtctggtccacagcatttggtgtggcagatcgccctccggaagaatctcttgcagtgccaggaccagaactccgagacagcctctcatgaagaggaccctgacaaataaagggaactctcttacatccaaaaacgatttatacaaatatgcagcaaattatatgacaattaccatatcatcgatcccttcaataccaccttctggattagagatcccaagtgaacccagaacagctgaaactatctaccagacataaaacaaagctcatgaaaaggatcgcacatatttttgattgtcaaaaaaaaggaaaaggatcacatctaatccaacacacaaaaataaaaacagatcaaacagataaaagagggtatacctgtccaagatctgaatagactccatcagcttgttcagcaatgttgaaggatcctactacaactcgtgatcgttgactgccctggctgtcaccagcactcaaagcaggatcagccgctataaaaacaatatttccactcagcatgttgaaatagagtctcacaaaaagcattggtaaatgctaaactatcatgattatagaaattcaaagatgttcagtaacagtatttggggccacaaatttgtacgggaacttgaaactacctgcattactagttgaactctctgatacaggttgtctgactaccaaatgcagagtgtggccatcttcaacatctaagatggaaccattaaggaattttaccggtaaaaggaaaagtctaccatacgacactggaattgtaaacaaggaattcaaaaccaagggctacatcagcaaactagggttcacaaatcacaactgaaaaggaaaactctaagaaagaactggggcaatatgctggaaagaacaaaaaggatacgataggctgataggagttgatcatccttcataacttttccacgacatatcaagcgttgttgttccgtaacgacaccagtaacggaggcaacttgctccttcaatgcgggaacagggacctgagataaaacaagaaaacagaaagcaaatataagaaaggctatttaggacacaaataaacaagtgagtattgaaataaggcattagttccacaattttagtcaaaggattgattttagtaattagaaacttcattatgcaacacatgcatacgaagaaagacagaccttacaggtactagtctcagttcatggaaacagaaaatgaaacatcataagaaatctaaaccactatggctcgtttttcatacacatttatctacacgtaaggtgtacgtttgagaatccaacgtctttatctttatctcaaccatagcaccagcgcattgagatgcctcgaccataatttcatctttgccattgtctcccatcctttcaaatgccttcaaacacctggaaccaataaaagtatcagcttatatttagctatatcagctgcatgcaaaaacaacctttgatcatcaagcactgagacaaaactcaacactttttcgagtctatagaagaaatatttcatacaaaaccctaaagaagcaaactttcatggacggcactaagaaaatttcaccacgccaataaaactcgttcaaatcatgtagaaatcttaagactacgacttcaggagaaacaatgaaaccgcaatatagcttttgcctaagacgaaattcttgactaaatctctgaaaattcgtaaagatggacactttatatcaaaatcaagaggagaatcatgtctttaactactccaactccacaagaaacggaaaagaaaacaggtaaagatgtgatcataatcaataaacacgctacggaatctcaacttcgaaaactcttaataaatagcaaaccatattcatcaaattcaatcaaatcaccagaaaagttctaagctcttccggtgacagaaaaaaaacagaagaatcgatcttaaaccctagaaaaacgaacaaaacggtataaaagacgaaattagtaacggagatgaatcgaaacctagaaaattgatcggagtcgaaatcagctgaggaagagagaaggagatttggggaagaatctttaaccctaagagtcctttcgcggctccgagagacgattccgcggcgaaggagagtgagagaagcctggcaaaaaaaaaaaaaaacgattttttctgaattttgcctttcttcagctttaatattattattatcacgtgagtaataattttaaaagtaatttcaaatttgatgatttttaatttttaggcaaggaattttaattttgctgaattgtaagaaataaaatttggttttttgcataataggagaggtttataaagtaaaaatatctttgactttggcatatttagtaaagaggatattaatttattcagatttggtatattttggtttttcatataaatcaaatttatgtcaatattattttagaaataaaaatgaggtgattttttgaagcgttgtcgtgtttgatgaaagttttgttttctagaagtaaatggagaatgaagacatattttctatgttttaaattctttattaatattgtgtaatgtaatttttatacaataaatgatcagattaaaaataaatatggtaatttgtttcttatcttttaaattaaaatagttgggttgaagttataataataataaatagaggctcataacaaaaattaataactaaatataatatatatttaaaatattcgttatagaattaaaagaaacagagaaatggattggtgggaaatccaagttcaaaattaaaaaaaaaaaaacatgagttgaagatgctcttaaatatgttcaattttctttcaaattagaataactctattttggagttgggtttttctccaacctttaaaatggagaattctaaatgttaatgtaaactaaaaatagagatttctaagtatagaggaaaataaaataagagaaaatctttatttagtagttgaaaatgaagatgagtgaagaaaatcttttgaaagtgaatatgaagatggtcaaagtctcattgatcttaatatgatattgtattattgtttaaagtaacaataggcattcaatttaatcagtttaattggttcaattgttttggtttttcgttttttcgattttttaaaattctgcccaaattaaaccgaataaaattttgatttggttttgtttttggaacttgatttttaggtttggttataagatttaaaatcaattataaaataacagactttttataatttggtttgaataataggctaaagtcaacagtaaatcaataaaataattgggtaattccaatacaatcaaagtccaagttatataacaaactcaaactcgtcaaattttagggttttcgctaaaaatatcataacaccgaataaaaagattcaaaaaaaacaatggtgaataaaaagataagaaaagaacgaagaaggaggatctcaagctgaagacaagagattagaaaataaggaaggtgaaatgatgattagaaatctaggattttttttatatggttttttctaaactgaacaaaaaaattgttcagttttgatgtgctaaaccatataaccgagaacaaaaatcaatttagaatttcactgagtggtttataactttgaaccaaattgaaaccaaaaactaaaattattggttcggtcggtttggtttaaacagtctatgataattgttgaggactactttaaaagcattaaactatatgtagttatgagacgttcaacacgaaattagaacagtgtcctagctctaatgacttacttcataatgacatgaaacacaaaatcaacttacattactattagttaattctgaaaaaacgtgtctaacagtttataatgttttatatttaaaggggttattaggatccttcaccatccattgaagcacaaatcttggtggtttattgtaatgtctggtaaagtaaatcacatcttttttgcaatccatccacatagttggccacatcaacgaaatgtagctactccatatacttgaatatcataataatattctagtttatatttaggtatatatgagaatagacattccattatctcctttggtaattgatgaaattatcgttgaattccatgacaatttcttagttgttgaactcccacatcaccggttgggttcttgcaacgacagtgaacttcaagaattataccaggatgaagctggtttgagtttctatatgattacaagtttcgttcgaccaaaaatacttagtaatgataaccacaaaagtaatttttgttagaataaagatgtttttgtgaaaaacattttcctttttggcgttggtcaaataagaagagttgagtgaccaataggatcaaatagttttatttattcttttgactaaaacacagtaacattagccatccacattaattaaaataaaaataaaaattctaaacccatgtcacgtcaacaaatataaatgggctaaaaattattgatgggctaaattagcaaccgcccaaaagtaaattcttttgccagcagacgttttgcaataaataaaatttatacgtttttacaaagacgatttaaagtttcatgtgtaggaactaggaactaatctttgttgtcctttaacaaaaaaaaaaaagaactaatctttgttgtcacttgtcatgggtggcatgaagcgttaagcacagaacttttgatttcttaaatggatgtgtaaattttgattcaagtgctatctttacatgtcaaccaccttttgaaacaaaaaaaaaactttcattgcctttgtttttttgttaaataaaagaccttcattgtttgtatgaaagtctttcacacttttcatgtacaagcttgacagaaaacaataagcatccgttaatggcattgatatactgtatcaaatatcttttaaaaattctaaactaagtttattaattttaaaaattatcaattgtcaaatatatattcaggcaaaacatagtccggattatcatctagtaaaacaaatttttttggcagaacagttattaagatatcaagccattggtttataaagaaatggtggtaatcctatcctactatattatttgagaagtacattttaaatataaccttaatttttgtaagtaattacatatgtatgccattagaaataaaattttaaagagtaaattaatttatctctttaaggattaaaaagtcaaatactaatttaattaattaaatttaattaaaaaacaaaatacattattaattttcaaaaataataaccaatcaaaatcaacaaataagatttgatatctaaattttaattaattaaatttaattaaaaaaacaaaaaacattattaatttccaaaaaaataacctattaaaatcaacaaattagatttgatatctaaattatcatattaatttttattaattattatagttcacttctcatctttatatgattctatttttgcgaaaaaataatatcatcattatacaaaaataattagagttttttcgcatatgccataatttgaatttttaaaaacgaatataaactgttcaatacatgaaaaaatattataacgggtgaaggatagatttaagaaaactttctactgagtaacgggtcataatttgaaatatttatattcaatttcatacatattatattgaaaatttataatcttatatactataataattaataacatattagatttttttatgtgtatgatgtgattcaatttttaatacaagctgaaaaatcttagaattgacgggtttagatcgatattaatacaagatggtatactacaggtgaaactcttaaattaacaatcaaactacaagtgtataatcttaaacactaaacaacatagataatatcaacaaaacatatacaactcacagtttactatacatttaaaatcaaataaaataatatcatatatttttaaatcatctttacaataaaagtttttagtttaactaaaatataagcctacatgcggtatactgcaggttaatatctagattatagggcttattggatctaaagacgggtcatcaaagatttcttaaactgaagcaaaatatactgaatactcaaatatctatctgttaacaaattataaacaaataagttcgtaaaacaatttaatattttatatacaaaatcaattaaatcttaatcacataaaaattagcacaaaaaaaaagtattcaacaattaaaaatttatcaaatctctgtgttatatatgttttgatactatattcgaataaagtgtaatataccttttcaatttgtattctttaactaatttaagctaactaatatatttgctaatcttatacctatcaaaaccgactatcgtttcttatctctatagtatttttgcaagacttttttggtggatttgggtaaaagtgcattcgggtcatatggtacattcccctattaaataaatatggtgtactcctatttattagctaaaatgtttagattataattcagagtcatatcattaataaaattaatattaataaaataaatggctttttggcaagacggatttggagtgacgggtttttgaatcaacattaataaaaaagtaaaatagaattaatccaccgtttcaatacgggttaaatctttaatttattattttttaagaccactaatattaaacatatcaaatcatcttaatttagaaaaaattatataaaaccgaaaatattatgtggtatgtataatgttactatatataaaattaaactataaaatataaatgtattagagaataatacaatttgcaaaacttttatatataaaaataattcttaaattttaaaaattactctttaaaaaaaaatcacgggacgggtaaagaaattatagaacaggttttattttggaattggattatatgatagatgtatttgaatcaatatttataaaattttaaaatattattaatatgctgttttaattggggttacaacttcagttttttaaaaattgtcttatggattcttggtatagcgttacttaataataattacaaaatgtaaaatataaatattttataaaaataaaatttacaaattttaatatatattatttttaaaaaataaatcgtcccgcgatataccgtgagttaaaatctagtattcattttaaaagaagaaacaaaagtatagatttaggatacacgaaatcaaactcactatttaagaaaaagttaagattagttttaagattaaaaataagagtaacgttgatattattggaggataatacgaatttcgatgaatagttaatggagaaaatgataagactcccgagagcggaggctttgggtttcactaatcaaataattaggcgtacctaattggctttatcgcttagctggagtctactgtccactctctaccatattattaattattgggactcttatttaatcatcaatcatagtataatcaaaactattttattcgaataatgctagattttataatacaattttctgaattgaacataccgttttcttaaccataatttggaatggttgatcatgtggcgtacaaacacttcacaagcaggaatttttgaattgtaaatgatgataataatgaggatggatatataatcacatgacgcatgttatatctctactccattgtcggagttagattgataactcccttaataaaaaaaaattgctgcatagaagaaatatagagtacttttgattgttattacttccgaaattatattaaattttttatatataccataatttatctctcacggttatattttttgtaactattttactattgttttattaaacaaatttgccattttatgtcactatttagatatgtgatgcaagtggatacatgtgtcttaatggatttcatacgtgtcaaattatttaatagttaggccgttgcttaaaagatttgcttgtctcttaactttacccaacatgacacaacattgtgctgtgcttttttactactaatcattattaattagcctaatttagtatagtttaatttaagttttgtagattcgtcggaattaaccgttacaatgggtgcaatgaaccacatatttaataaatgcgtccattatagtttgattttctaacacttttcttaacgccatgaaattagtgtggacaaattattggtcttttcgttgtagaaggctacgagcctaagcaacgtgaacgttatggttttgatatgtggcaatttgggatagcagcaaaatcttatagaaattattatcaatcgtaaagaaaatattatcttaattctttactattaaaaagatatttcttttgtttgtcacactattaaaaagatatttcttagagtgtttacctttaacaaagaaaaaaaaagtatcttttttttgtaaccctactagaaagatattttgttgtgatgctttttctgcgatcgccctaatctagtcaataccaaaattaattacgcgaagacaaatcttataataatcttataatgaaaaagtcgtaaaagcacatgacttgactcagaggccgtagacttgcttcaagactagtccgttgggaactatatagctcaacctcttccttcttctggccaaacaagagaactatttacaagtctgcgtgattaatgcatctattaaaaattcaaatattggtaggtaattatgtacttaccactaattattgaagctccatgattcatacattttaaaagacgattgaattctcactggactaggaacatgttttacatatttacatattgttaggggtgtcaaaatgggtcaaaattcatgagtcaactcaactcaactcaacccatgaaccctaatgagttgaaaattttgactcaaatgagttgatgggtcaaatgagttgatgagtcaattggtttgatgagtaaaatgagttgggttgtattggttaatggtttcaatggtttacccaattaacccatcaaattttgtaaaattaaataaaaccaactaaaatctctaaaccaatgccaatttaagtttaaccaacacatctaaaccaatttaataaaattaatatttttccaaatttcttaaatatacaagcgatgaaattgagaaaaagtaaactcgtaattttttcaccaaaaaacataaatccgtgattttcccgctaaaaacgtaaatccatgattttctcgcaaaaaacaaaaacccgagattttcccgtcaaaaacgtaaacccgagattttcccgccaaaaacgaaaacccgtaactttaccgccaaaatggtaaatcccgtaattttcccgccaaaaatgtaaactcgtaattttcccgccaaaaaacgaaaacccgtaattttaccgccaaaatggtaaatcccgtaattttcccgccaaaaatgtaaactcgtaatttttccgccaaaaaacgaaaacccgtgattttcccgccaaaaacgtaaacccgtgattttcccgccaaaaacgtaaatccgtgattttccccccaaaaacgtaaatccgtgattttcccgccaaaaatgtaaacccgagattttcccgcaaaaaacttaaacccgtaattttccgccataaacgtaaatctgtaattttcccgccaaaatcgtaaacccgtgattttccccccaaaaacgtaaacccgttattttcccgccagaaatgtaaattcgtaatttttctgccaaaaacgtaaacccatgattttatcgtcaaaaacgtaaatccgtaaaaagtagaatccgtaaatatcataagtttgatgataataaattaataatgataattatttattatttttataataataattaattaaattattacttcaataggttaacccatttaacaactcaattcatcaaattaaatgagttatgggttgacccaactcattttgttaaatgggttgggtcaacccataactcatttaaccctaaactcatttgattatgagttgagttgagttgggttagccattttgacacccctacatattgtatacaagtctaacttacaataataattgtagagtctattttctacagcgagtttgctaacacaatactattatcaaataccttcgattatgaaaaaaaaacattacttataataatattaaaacgtaaagttttaaaattaaactattcttgatatttttgcaatatagtttttcttctttggatttattatatgttacgtaatcgttgaagctttttttttttgaatggtgacaaaaatatcaattttcaatcaaccaaaaatgaaaatatcaatttccattataactttcaaaaagttttgagttccacagtacctatttatatacattcttcgtaaatgtcaaaacaaatcattgtagtcacacttcaacgtctttcactgaattataatcgatttgtggctatgtaaaacaatattaaaacagctgactaaaccgaaaataaaaccttacctattttgtgtatacttttttaaacaaaaaaaataatttgaaaactatgactaagggtccgaatagtgactgcgttttgtggtgtgggagaagtgtggtgcggttcaaatagtaacgaaaatacatatatatatatatatatatatatatatagaaattttgatactgttacaatactgttgcagtgcggttttgtgtacggtctatatcaccatttatagcctaatttaagtgataaaaaaccagaaaagatggcggctaaaaagctagaaaaagagtgactgtaaaaaaatttattttcacatatagattttagcaagaagactgcgacccaaatctaaacaggctgacacataattgtgttgaagtcacgctccctcacagctgggaacattatcattcatcaccaccatgtgcatttatgtgctcatcatcaatttttacattttatatcgtcaagtaaacattattaataagaaaataatgaattatctagttaattatacaaaaatacagtaagttgttttgttcaaagtcagcaaagtcgaacccatatttggctgcggaaacttcatgcgtttttgtcgcaattgccacataacgttggaagattatttcatagtcaatggacgaagttggaagttaatttgtaaaattttaccaagagcaacgaaaactataatatgtcggtaaaggcaatgatttgtaatgacaacttccacatatattgcatagtcatatattaggttacatcaaattttgtaatgactatggaactatggcgtgactaatccgttgttggacacgtacaaatgaacaaaatttggaggatagtcatatatgatataaaaaaaaaagattgttgccaatatgatacatttcactggatttatagattgtgacatccttttaccgacttatgaactacatatttttgtattttgttgtatcagtatgttaggggtcctacgttgacaacaaaatattttcatacgtctaacaaagcaaaaaatgtatttataatatgtaaacacgtcgatggttcgccgacctttcaaaccgaaagaagttgatagcactattatgaagaccgattaattaagtttgaatcggaatttgaattctaaaaagccggtttatttaaatgattaaaatgcaacctacgtcgtacttagttgattatagtttaatatgtttatggtagtcacaaaaattgtctaattagtcgcatttttatgaattcttttttctttccttgttggacaagggatgcttaactattattattcgtagggttttatgttcagagacaatgtttccaaacgattcatctacatttgacagtagaaaatcaaaatatcacaacaaaacgtgtgctttttgctttgtagctagactgtgaattagcattttcttaagttttattaattttaaaactgtgaaaggaagctaaaagtctaaaaccatatgccaccaaaatgatcctattataacttactgaatttaaacatgcattataaaccataattttgtaattgatctaaaaataaaataataattattcctctttgaagttgttacgttttggttttggtttctttatgttaaatttgatttgcttctcgaagtttgaagacaacttttacctctaaaatgactcttaaattctatgttttttgttgaaaaatatagtttgattccaattaaagtttagatatattgcgatgtattttaaatctagttatgattgatattaattttttgaatctagttatggttgatattattttactaagtacattattatcatttctttttacaaactgtattccgacacttaattttcacggtatgttttataagagaaaatatccgcaaaacatattacagagtagaataaatcctttctcctttatatttatattatttaatacttaactctatcaaaatatcctcaacatttataaatatgaaaaacaaaatcagtagtcagtgaacataaaaaaaattatcgaaaattttacgatgagtaaagatcctctctttatttctcaagtaaagcaataatcagaaaaagctaaattgagttatcaaaagcagtttatctaacaaatgttaattaactttttctggtttaatattattgttcactaaccatgcataatcgtataacaacaaaaataatctcattggtaccattacatcaaataataaatagcgggaagataaacatagaaaaagtgataaaacaatctgcttcaagaaaaagataccccagtggacgactagggtcaatgaaaatgaaaacagagacaaatggcaattcgtaattattcacatttatttcagggtactttcgtaaatccccaacctgaccgtttctcgaatctgattacgtggcagtcatcacaaatgcccacaaaagcacttcgctgaaactcaatctcagtcgttagatcagaatccaattcttttcaatacggcaagttgagatccccaaacccatcatgtgtaaccatggttaagtcaattaacccaacacatagaaatctcctaaaatcaccaaaaaggtcacgaactttctcgttaattacataaaatgccattcttcgctttagctataaattcgtcttctgagactcgctaggtttgccgaaccaatcaccctaaggggacacttaaagagagaaacaaatccttcttctaaaatattcttcaatcttcttctcgaagcttctccaaaaatggcgattacttcttctagaaccaccagatcaaacggatctgcttcgctccgatccaaatcaccgtccggtcgattctgtggcgtttactcaaaccgtatgccgtcatcatctccgtcgtcgtcaggtttcgcttcttccacaagctcaagtttctcctcaccgtctacagcgtttttcagcagccacaatcagaacaaccaccaccaacacagatctgcttctccgacgcgtgtgaatctattcacatcagctccgatgacgcaatcgtttcgttactcaatcgataacagatctatatcaccgaatcgatccatcgctgtttcttccaacaaacctagcaatcatcacaagattccggattcgaggagaagatgtatgtgctctccgacaacgcatcctggttcattccggtgtagtctacacaagaacgtcgcgaatccacatggtcaaggtacagcttcgtatacaacgaatggattgaatatgcgtcgatctgcgatgacgaattctcttgtgagaattggtggtgttgaaggtgaatgggtgcgaagagctttgactactttgattagaccatcttcacatcaactaaagagaagatctgcttatgagcctcgtcgtagtagactcgcatctatgtcgaaagcagaagatctttgaatctctcttcaggtttgttcttgtttttgatatactcagatctgccatgaacgagttgaatcaaggagcagaatcggagctgagtcataccggaccgagtcaaattcggagctgagttataccggaccgagttatgtaaaacggtgactaagacgacaccgtttttgttttgttgggtgggagatgagatgatgatgatgcattgtacatacacatattgcttattgaagcagaacaaaaaaatttcgcaagtcgaaagtatctagaaatctaaaaatggaaaatagtagtgacgaattgggtaattaaaatctggaaaaggacttagtagtaaatattgtttggattcaactttgcaaatctctccatctccattgttcgttgccttcaccgttagtttgttccgtcaagtcaacgttctctattctccgtcgttgacccgttctgtttgccgttaaccgtcgtcgtgtgttatgtgtgttccgttattatttctccaggtatgtgttgttcgtcgtgtcaggtatgtattttccgtttcttatttatttggttaatttcgttttactttttttgtgcacgtttgatctgtttttttttttttggtttgtctttttcaggtttcgtacaatgaggagaagatgattacttaaccgttacgttcaactttggaatattttgggtttgtggactttggaagaaaaatgaatttggactatgagaaaaatcaaatatatgacctaaaacacggagaatttgataaaggacgatcgaatatgagtgattttgattcgtggaacgattaaggttttggttttggagctggagaatgtgaaagattcgaaggaatcagatttttctctggaatttgtgaatcacagatttagattcctgaaacggttgaggttaaagtgaaaagattcaatgaaatcatatttttaccataaatatctcaagaaggatatggtaaatgatgaaattcgtgagggtaagtttggaaagtaaaagattcttgaacggtatatatgagaaaaggacagctggccgatgaattgagaacagcccaacacgattacgttggggattccaacgtcttccttatctcgagggattaaagttggattatactattgtatgcataggtcgattttatagatcccttgattaattggttaattaaatataaactatactccttaggtttgctttagttgactgattatatcgtaatctctaagtactaggttctgtgtaaccttttcttcacggtagatgatggatgcactttttgttaatttggttttgattgtgttggattattctgtactttctttactcgtttagtttacttgactatttttatatatctgtaactctttctatatgttttctcattgtttttggaagttgaatatgatttactctattttcttctaaacatcataaaatgatacgaaatttataatgttttaggcaaaaaacgatcacgattttcttagagttcctctaggaccaccagaggtataggccaattatgctggctattatttatttggttgatgtcaacactacgaattttgggtgcttggttattttcagatctagttttatctgatttaaaactgatcattttgtttatattaacaaggtcaatacttttggaaattaaaaaatcgcatcgattttggtttcgggttctacaaaattggggcttggttgagtattttttttcttagatatggttgacatatatttttgtcattagtgcagaaatatgcggtcacattttagttgccaaaaaatatagatttggtagctcaattacccagttcacaaatttcaattcattatttgtttgatcattcttcgcaaatattagttgggccagctctcattatacgcaatctcaatatacatataaacaaagccatcaacattattttaatcaattcaggattataattgatgtaatcatttttgttttcacgtatgatgtaatcattatcgacattagagttgtttgcaagataagatatttgtaatggtccagccgacctcctaacaaagcaaaccgcaagaggcaaaatatgagcttctaggctggaccatacaatatgaactatgtaaaatataattatgtacttattttcttcccaaatgattcgtcaattgtgggtcattctttggctttagattttctatcttaagttgtaattttgctaaaatcgtcacctccaagtttaatgttttagcgaaaaaaacaaaaacaaatccaactgaccctaaaagaaagaaaaacaaaacaaattatttatattctaatacatatgatcattgaagacttttcggttaagagttactacaacatacgtacaattactattctgtagtggtggttcctcgacttgtgaaccgcgcgagtattggtataatacttttttacctcttcgtggaagcaaactcgcaaatcttctttcaacttcatcaaacacgaactctaaagacgtctttgagaacatcagatcctattttcaatcttttagttcttattttcttttgaaacaaaactgccaatactctttcaaatgacttcccttattaaaatggaatttcagataaaaaccaaaaatcaatacatgatgtacacttgaggctatcaatttctcatccactcgataacagctcatcacgaactaagcaactactagatgtctcctttaatttattaaaaatgatttttaaaaacaaaaagtatccaaaatgcttagtattttttagcctacttatctatgtcgatgttgctatcaatttcgtcaacatgttattatccgaatgtgtatctatattttaggaaataaagataaagataaaatgaaatgatcggataatgtctttggattatgatgtcaggctatgattatttacatatacattcatgcactttatgattcatccaaacaaaaagcaaagcaaaaaacaaatttattaggtctttgtgacaaagaaataggtgttgggatgtgaaaggactcttgacccacaagccacaacaattttatgacaccacatgtgatgtctggatgagaccacaaggagataaggttttctgtttttgtgttgttttggttttggccattttcatcaccaaatgtcaaatccttttgaaatttacgatttccattttttggagtcattcattactcttaagcttttatcgttagaacttagaaggcttgtttttttccttcaaattttatcgtcaactctttctcatgtatgactccacatacataagtatgtgataaggttttcatttgtatatatcacctattaattaagttgttcaaattaatattcgatttttcaatcttcggtcacgtaacccgatcatcatctatatcgatgacgatatgctctttcattggtagtcctaatttatagtgaggtttaacttatggattagcaaagttttgtggaaaaaaaaggtatagaagtcacgttcataaaaagtgaaaactacataaattaagtgaaattaaattcatattatttttgtttccgaaaacaacgctcttcaatttattcatttttcaacaatacatcaacaactaacgaataaagatcataactaaacacgaaaaataatattatttctatcacgagagtttgcgtgcgaggagatccgtcttggtaatcttgaccacttgaaccaacttggttgagaagaaggcccaattcaatcatacttttgtctcaaaccaatgaagtttgaaaattaaaaaattcaaaaccatttcacagcgaaaataagaacctgagtttgcaaaaccagttcatacatgccattgggcttcttgtaaacgagaggcccaaaatacttgagcattgaaaacccttcgtttcttgttaaagaaacttgacctaaccattaacaaaagattctcctactcttttctcatttaacctagatctccatttcacaacaatttcacaaacttccattaccgaaactcttaaaagtctttactcaacaagaagttagacgcgatggatactttgattatagtaggaagcatggtgactctctggtcggagattcctatggacatcttgagatcagtgttcgaacgtttgagttttgtcgatctccaccgcgctaagatcgtgtgttcgcattggtattcatgttcgaaacaatcgtttctccgaaaaaccagatctcccttggtgattctgttttcagatgatggtgattgtactttgtataaccctgaggaagctagggtttacaaaagtaagagagacttatcaaggtatcgattcctagcaaactcaggtaactggttcttagttcttgatcctagatccaatctctatatcatagatttgtttagcgagaagaagatcaatcttccacctctagattcattcaaaggttacaaatataatcttaagaaagttggagctagaaaattcaaggagctagtatccgaatatcccacttctttccaccatcatgcgaaggatctgagaggtcttttgtgggtagacgagaagaaagaagagtacgttgttgtatggtacttccgtaacaagtatacgatggattctttagccttttgcaagaacggggaagatcattaccgtgagatgccaacacactatgggttacatgacatatctgatatggtactacaacgtggtgaccatatttacctctcaacgagttgtaaataccttcaaaaacttgatttgtctagacaagaaggtataaggaccaagaatgatgatataatatcacgctatcaattgccatgtcgtccgacgaattataaattggtatatgatgcaaagtgttggtgtagctataacattgctgttacatcatcaggagaagttttgtttgtcttgagcatcttttcgcagtcaacaaggcgtaggatcttctttctatacaaggaggatcctaatccatccccgagtgaggttatttacaagaatcttgttgaggtagattcgttaggagacgaggcgcttcttctggatttgggtatcaccgtgcctgctgatagtgaccttggtatagaaccaaactctatctatttcactcgccatgatcgagtagctaaccagaaacgttcatctcctgacatctgtgtgttcaatattgtaacaaagaccctcaaacgtttcccaggtctctccagcttaaaggatgctcgatggtttctcccgtcttgatttgtttctttttgcatcctttgtggtgattcttaagagacttgtacactttctccctagtcatcattttttttctttttcttttgaaaacagttttgggacctgaaggctcctagttatcaatcttgacatggtgaatgaaacatttataaatcaaaacattataaacatagacactgaactattagttgccgggaaaaaattaatatttgatattgaatttaaaaacaatcagttagtttctatagactctttccatgttcaacatggaacacaagggaagcagaaaagataaattttaccaagttgtttacgcaaaaactgattgtttggtgtaaccaaattcatcaatgacaccaaaatttacattatcttggttgtttgcttacttttgttacacctttcactgtccatttctcaattctatttcttacttttgatcaatgttatatttcttgaagcaaataaaagcatggatactactaattctagccgctggtcagagcttcctatagacatcttgagatctctcctcgaacgtttgagatttgtcgattttcaccgcgctaagatcgtgtgttcgtattggtattcgtgttcaaaacaatcattgctacgaaaaacctgatctccatggctaattctctttccagaaaaaggtggttgtgctatatacaacccggacgaagctaaagattacaaaacaaaaagagactcctcagggattcgattcttggcaaactcagttaactggttcttggtgctagattctcgttccaatctctatatcatagatgtgtttagcgagaaaaagatcgatcttccacccctagaatcaatcaagaatggcctttatagtcttgagcaagtaggaggtaaagcatttaaggcgagattcaataatggtagttcatatatattccatacataatgcggaagatctatgaggtcttttatgggtagacgagaagaaaaaagaatacattgtagtgtggtttttcgacaaaggtaccgaatatatagccttttgcaagaacggggaagatcattaccgcgacattccgatacgaaaaaatgtttgtaaagagttacaagacttatatgatatgttactccatggtggtaacaatctttatatctcaaagactcgtcaatctattcggaagcttagattttttgaagaagaaggtttcattgatgtcgacaatagtgagatattaccatttcgtaaaatctccttttacattgatggagcaagatttagtaataacattgccgttacaacatcaagagaggttttgttggttcagaacttcttttacgagacaacaagatataggagcttccgtttgtacaagaaagatcctaatccggacttgaatgctactatcaacaacccctacccgatggttgagttatgttctctaggtgatgtctctgcttctggatttgggtatcaccgtacatgcggacggtacacttggtatcgaaccaaactccatctacttcactcgtcatgaccgtgtctgtagtgaccggaaacgttcttgtctggacatgtgtatgttcaatcttgtgacaaagaaacttaaacgattcccggatctttccaacttaaagctcacggatgctcgatggtttctcccgtcttgatttgtttctttctgtattttggggttcttgagaatctccatatgtttctcctactgattatacattttctttttatttctatatctagtcggctccaaagtttacaactaccctatagcaccaaactagaagacaagtcaaattgggttaacgtgttagcaagtttacaactaccctatagcaccaaaaacattactcgaacatacgtaaagcattatactaaccatctctttcaaaactttattgtttcttcttccggtatcaccattttgttatggtgtgttatatattgttggaaataagaccatgaacattagttatgttctagaacttttgtatcaaatcgttccactttatcgtgtacaaaaatattggtccgttggaccacatttagtctaacggttttagaaaagcgtaaatgggctggcccgtttgtttttagttgaggccgtttttaggttcactttagtactacgacaagcagtggcaacaattggaaattttcgattattgtttccgaggttagttcttctcccagcacgtgtttcgattgaaggaattggggttctaggttttctacgtctcactaaaaaattcgtgttttttgatattttagggtttgtttcgatcggaattatatacgagtcccttgctagaacatgttagtagcttacacataggcacatagcgatttgtgtcacattatttgataaaactcaactatataggcacattgcgtttctttaatctattagaagaaatcatacatgtagttgtgattgatggagacagcttctagttttcatcttctgctgaaatgattacataagcttaaccatattcaacagtgttagtataacttacattctcttgcttgttttgatcaatgtatcgttctagttttgtgatttcttctacccattaactatataatttgttttgtttaggtcattgattctaaatttttggaacttcgatttgcagatcttgattctgaatctcaacaacaaacaaaactgaagttctcaatgctcaagagtgaatttgtagatatgaataaggaagattctcaaattgagatcaatgagaaagagacaaaaatcaaccaagaacatgatcaaagtgatgaaactcaagctaaacgtaggagaagtctaacttcttctgtttggcaagatcttgtatcagtagggggagaagcaaatgttaaagaaatagatagaagcatggagactcctaattctagtcccccctggtcggagctccctggtgacatattaagatctgtgttcgaacgtttgagttttgttgatttccagcgcgctaaggtcgtgtgtttgagatggtattcatcttctcccatctttctttgttgtttctctccgcattctcgtgataagtgttagagttttggtgaccaatataggggtccttggtttcaataaagtctcaacttccaaagattaacctaattctttaagagagacgtgggttacaagaaagttttgctttaatctttttctactttcaaactttagcaaacatgtccgattaaaagatctaagtctaactgtctaaggctttggctcataacatttggtggtcttgagagacttccacacttatcttctgtttgtttcatatcatggacctgaaagcttttttactgagcagtcttgaacatggtgaatgaaaacattagaaatcaagtcatctcttcataaacacagccacagtcttgatttttttgttgtaaagtagatatataatcttctctatatataatcaacaaaattgtttgaaaacaataaacctaattatttggttgaatgacatagaaactagacactttgccaaataaacagaagcaattgttcattattgagaaataataatagcgcgtatttgcttcgagtttgcttcaatgtctcgcttggtaacgatgtaccccagaaattcatcgtacgttacgccgaaagaacactttttgcggggtttagtttcatattgtacttatttaaggtttcaaagcaggttatgagatggtcaatatggttggtagcttttgtttatttgacgaacatgtcgtcaatatatacttccattgctttccccatctgtagagcaaacatttgattgacgagcttctgatatcgagcgccgacatttttcaggccgaaatgcatgactttatagcaatatgtccttctatctgttataaatgcggtaatctcctgatcatccttgtttattgggatttggttatatcctgagaaagcgtccataaataataataattcgttgtgggccgtgatccaagttatatgaattctttgatttataaagccttgtaaggaaaaaaatatgattctatttcttacatgacaacttattgtattttgaattcgtacaataatttacttcagcttaattaaatattaagtttaaaaacgatttctccaaaccgtatataaataatttaattattaaaaacagggaataatctgttatgatttttttacagtttgtctttgctctgaaattgaacgtctgtttttgttcctattaaaggtaaagattctcaagttcaatggataatgaaaatgcaatcaacgatacaatatcaaattccaaaaacaagactcatgaatcgtgttaattgttttcttattcatttactgtatttttcaaattttaattgttttttcttaataaaatgttgatatcataaatcgaatttggtgtaaaattgcagaaataatcatgtgtgaagatgtatcaaatcttttttttttttgtgtaacgagatgtatttcaatctaagaatatatattgccgattttttttaaaattatctccatttcttgattaaaattcaacctttgataaatttatttcttaaaaaggctacatgtattggattttattctctaaaagctcagtaggtttacgaaagaaaactaaattagtaatttaatatggatattttacaaacaaattacataaaagtgacaaaaaaaatcattgatttttatttttcttaaagaaaaaattgttgagtaagaattattttccttctaaatatatataatttcaacatgtagataattagaaaggtgaaatggtaaaaaatcggttaaaaaggtataattactcattatccattgtatgtaaaaaaaaaaaaatacagtactaatcacatgaatcatgaagacgtaacaaattaagtttcattaaaaaaaaacaagctccattaaaacaaacttcgcttaacgtttcttctctccgcgccttttcatttcgtcactctcctctctaactatttttttctttctctctcaaatattttcccgggaaaccatattttctcgagaaaattaaatggataagtttcaatccaaattcacgagattcggattcatctcgatttgtttcggatcgatcgcacttgtattattgatctctcattgttcaacttctttctttgattactcttttcagaaattcaaattctcgttcccagaagaaactgagcttcgaagaaacgtttacactagtagttccggtgaagaaaacagagtcgtcgttgattctcgtcatgtttctcaacagatcctcactgtccgatctactaactccactgtaagctttgtttctcttcgtccttctccagattttgttttgagtcaattttctcagttcttcgaaattcgaatttcaaaaaaactctctgtaaccgtaatttgaaatttatcgcttcctctgtgtaaaattatctctaatcatcgttgatcttcaaaatttgaaactgagaatttctcatcagcatcatcaccatcattaccaccatcatcatcatcatcatcatcatcatcatcattagcatcgtccaaaatctgatgatcctgcattttttggctaatcatcatcggaaattgtttgttgaatcagttacagagtaaaccggaaaaactaaaccggagaaatttggtggaacaaggattagcgaaagcaagagcatcgattttagaagcttcttcgaatgttaacactacattgttcaaatctgatcttccaaactcagaaatttatcgtaatccatcagctttatatcggtaagctctaagtttcatgcaattacttttttgaaatacttagctttaaagtcactgcgcacggctaaattagcgtggattttagtagattcttctaattgacgctaacgaatccatgaaattgaaccaattaaactcaatttgatacttttttcatgtacacaccactggttttgtatcatagtctctgcaaaaagcttacttatgatgatgaactctgctttattgtattcatatgatgacttctatatagaaactcttttcataataattataggattgtgtttaatgtgtagttaaagccaagttagtctatatgaaaatatatactaggttatgcaattaaggtaaagtctgctactataatttaaggtctgtttatgtgtcattttcactaattatgtcttttcttaaattacggctcaagctatatagccaacagttacactattactttttgtcataatctgcttatttaattctatggtccataatagtgtcagagagatcaataaacaatgatttagttactgtttatctgaagttgtgtaagattgttactattgcaggagttacttagaaatggagaagaggtttaaggtgtatgtatacgaagaaggcgagccaccgctagttcacgatggaccgtgtaagagtgtttacgcggttgaagggagattcataactgagatggagaaaagaaggactaagtttcgtacttatgatcctaaccaagcttatgtttacttcttgccatttagtgttacttggctggttcgatacttatacgaaggcaattctgatgctaagcctttgaaaacatttgtttccgattatatcagattagtatctactaatcatcctttttggaatcgaactaatggtgctgatcacttcatgcttacttgtcacgattgggtaaattattaattaacatttcagtatctgtttttgtttttgtttttgtttgcgcaagatagaatttggtataaatttttgtttttgtaatgcagggacctctgacttcacaagctaatagagatttgttcaacacttcgattcgagttatgtgtaatgctaattcatcagaagggtttaatcctactaaagatgtgactcttcctgagatcaaactctatggtggtgaagttgatcacaaactcaggttatctaaaaccttatccgcttctccgcggccttacctcgggttcttcgcaggcggtgtccacggtccggttagaccgattcttttaaaacactggaaacagcgtgacctggatatgcctgtttatgaataccttcctaaacacttaaactactatgatttcatgagaagttcaaagttctgtttttgtcccagtgggtatgaggtagctagtcctcgagtcatcgaagccatctactctgagtgtatccccgtcattctctcggttaacttcgtgttaccattcactgatgttcttcgttgggagactttctctgtactggtcgacgtttcagagattccgaggttgaaggagattctcatgtcgatctccaatgagaaatatgaatggcttaaaagtaacttgaggtatgtgaggagacatttcgagcttaacgatcctcctcagagatttgatgcatttcacttgactcttcattccatttggttacgtagacttaacttgaagcttacgtaaggtaaagttctgttagattttgtaactcatatctcagaaatgtagtaaaccttaaaagtctagatagatttgttgttattagttaatgaataaagaattgttgcaactttctaagaaatatagatgatctaaatctttataccatactcgtaattactaactttcaatcatttggttgggacgaagttgagagaaaggcgttccatctgtgatcgaaggatgtcaccaagcgagaaacggtgcggttgtggttgccgttgcggtgtggctgaggctgaggctgtcggttcatccgatccaactgtgtctatttttgtgtcttcattcttgacctcaaggtggattggtctcatctctttcttcactgactccacaaactccatatcgattttgttgccggaaatatctctgacgtaaaaagcattgagagacttttggccttgagtctccacgtctgcacggacaacggttaaaccattctcacgtagtacacgagtgatgtcagagagtaagcctactctgttctctgcgcataactccaacttcacgccctgcattaagccatagaccacacacccaaattgtttaccattcttaaatagaacccaaacagtttggtgaatgttcctctaatattcttctgtctgagacatctcaaagttagtcattgtggattgatctcttctggttaacactagagaaatgttaacatacctcgcaaacgcggcgttctattgcagcctccaagcatttaatcacccgttctttctcgccttccgtgttcaatgcccttccatctatgtgtcttatgaagtattcctacaattttcataccaagatattaacatcaaaccctaagggtctaatggtttcaaggaagctatatatattcttgccctacttgaaaagcatcagctccatcagaccggagagcggcgtgaaagataacgtattgcatatcaaccaaagtacaaattgtatcaaacatgagccttcttcgatccttagatttcactgtgacaatagagtatcctctttcttcgcaattcccaatcgaaactatagttgtcttcctctccttatgatcgcagtactctaacttggacgacaataatgacaacgaagaaggctcacaaaacggttcgtcaaagtctctcacagataacattagctgatgcaaccgtctctccatgttgctattcatacaccctttgccttgtcctgcaagaaacccatcagtctcgttttccttgtgacccacgtgtgtagagttggaggcgggatccgctgtggcacggatcacagtacttaggtggtcctcaatggaagccaagcggctcgggtcatcaatgggagtgtgagtattgtcgtcagagacataggcaatgcaagccaaacgagcgttgtggctccaagcatgagcttccatgacgttgcaatgtaagtccgcgaaagcagcaaatatctctgagaagaggcccggtcggtctgtcccggtcatctctatcgctgtgtgttcgccgtgatcagccaattgaggttccaaggaattgttattcgcttcactagcctttataaaatcggattctcgcctactcgtaccaatggcctacattatgaatattcatctagtggtaagtacattcaaatcaaacatatatatggtttattcaatggatctaagtttggtacaaacatgtttaatgtggttgatgacgcttttatcagtgagtttatttccatgctcatctttaacatggaaaactgcatacaagtaattaagttcccaaagctcttaattaatctgaattctatagaatgcaagtgaataagaaatggtgatatgtatgtaccatccatgaaccatccaccatcggaagagatgtaactcttggtgataataagattcatgtccgtcaagatttgcaccacttctagaagaagcccttgtttgttctcactattcaccttcattattaaacgtttgacatttttggacacgctaaatcacaaaaacacaagacctattcgcgcatagaataccattggaaccaatttttgtgtaccttcacaacggtgcaatcttgaatgctgtcattgtcaatatagaccctgcatctgtaaattacacacaccaaaaaagaagatgatcgtgatgaaaaatgtatatggattcacattgttgttcaacgaatttatcacataggaagagagaagagcttacggtggaccgtatatgcgttcaccaagattgtcgaaatcaggatcaaagtaaggccagcaaactttctgcatcgtctctacggaaaaatctgtaattagaattagggcaagagatatacaagaagaaaagagtaaacgattctccacaaatttgagttttttttttgtgtgtatataagaaaacgttttggcaaaaagtgtgaagggaagagaaagattagattggtgttttagacagaggagggcgacgaatgaagaagagatttccacctataatacagaggatttaacaaggtaggcatttactaagtttagcttggggaataagtgtgtcataacgtgtggaagaagttagttttagagaagataaaagttatataaaagaaaaaatctaatcgaaattctattatagatatattttagagtaatgaaaaatccattctagagaggattcaaatatagtgtagagtggtagtattggtcaagaacttgtcaaagtcaaatactaagaaatggtaaagagacttagtgaaaataaggtgtcccttgttttcttgcttgtttttttcttcttattttgttaacctccacatgttttcctaagttgttggagaaattaaagttgtgaaatctctgtttgtaaagtttagtaggattaagatcattaactccatgtgaataatttagaaaccacatacagaaaaaacgtgtgatatctttgaaacggtcaccaaacttcaccaaaaaatgataatttgacccatgagatctcgtaaaatactaaataccacaaaatttcattaccattttactatggtgagaaaacgtgtaatccgtatttgaacaatattaatctccaaaatgtcgcggtggttgagcatacttacttgctttaattatgtatggataaacgaagtttcctcgtcattacggatttcatagagatgtattttcattgataaaaccctagaatccatcagcatgaaatctaaaaactgcttccttgctttacaaaaagttttagttttggataaatcgttccaaattttgcaagtggatcgcactgatgcgctcaatgatgtcaatctaagaaacttaaacttcaagcaaggaatcagtttctagatttcatgctgaaagattggtcatgctcgtcattcttcttagtttagcttttttttttatttctctttctctttcaatgataaatagtgaaaattagtgcttaaatagtgagagttagggtttatgtgtcattgaggtcgcacttgttccggtaatgaagtgttatgaaaatccacaaatcaatttcttgttgatcattcgatgtttcttgggcttagaaacaatttaaacctcacatggtcggcccattggtggtccaatgatcccatcaaaatcgagtatactttgatcttatacgaatccaaagaggctttagtggtctagcttagtcgtagtgtaggtacgttgtctaccgatgcagattcttccaagcaaaaaaaaaaaaaaatcaaacaaagttaaaactttcaccacaaatagatctcgaactacagtagggtttcagagttgcatgcatattaacaaaaatcgaactatatttatggtttcaacttacaatattacaattttcttatagactgtttaaatctgacaaacttgaatttgaagacacacaacaaatcatatacttaactttagattctctcttttgtaataccttatctttttcgatctttgatggttatacacgtttgtgattgtaggttcgaatgattcatattcgaagaaaaaacaatcaaatttataaaaggatggagaagataaaatgtgaataaagcatcgtaaggagtatcaagtatgtaacaagaaccaaggatcacgttttggtaaccaaatgggccataaaaagaccacaaaacaaataatgcttcttatcatacaaacaatgtgaaacccataccatctacgtttccctttttcttgtcagaaaccgaaaatgttatcaaaataaaatagcttataaatcctaactcttaatattcatagctaaactagatgatacattgtgagatggtaaaaaaaagtcatttaacgtaaaaatgttggccttatatttcattctactcgtctgcgtgcccttaggtgtcatcatgaccgtgacgagtcctcgactagccatcactgtggccgtcactcagccggcggtcttaataatacaaaatcccaataataacctcacatctcctcaagtaattacatctcagccactggatcacgatgagttactccttcgtcaagcttctaaagccaacccaaacccttcacctaaatttcccaaaaaactagctttcatgttcttaacaacgaactctcttccacttgcaccactttgggagctttttttcaaccaaagctctcatcacaagtctctttacaatgtctacgtccatgtagacccgactcaaaaacacaaaccgggttctcacggcacatttcaaaaccggatcataccatcctcaaaaccggcttacaggcacaccccaaccctcatctcagccgcacgtcgtttactagcccatgcgcttctcgaggacccgtctaattacatgtttatccttctctccccttcttgcattcctttgcactcctttaacttcacttacaagacactagtctcctccacaaagagcttcatcgaaattctcaaagacgaaccagggtggtacgaaaggtgggcagcgcgtggaccctacgcgatgttccccgaggtaccacccgaggagttccgaataggatcacagttctggacgttgacacgagcccatgcgctgatggtggtgagtgacgtggagatatggtccaagtttaacaagtcatgcgtaagagaagacatatgttaccccgaagaacattacttccctactctccttaacatgcgagacccacaagggtgtgtatccgctacggtcacgcacgttgattggagcgtcaacgaccatggtcatcctcggacatataaaccgttggaggttagggctgagcttatacaaaagctgagaagtgcacggcctaggtatggggacggcaaccgaacgaggaaagatccatttcttttcgcccggaaattttctccggccgggatcaatcagttgatgaacataactcgaagtgtcatctttaacgattcggctcttgtgtaaattatagtatttggtatttcagttgagactttaggggacttgatttggtttcatttgagatttttcgtatgtttaaacatgtatgcgtggatgtatattaatgttatatgaaagtttccaataatgttatagcaagattttagggttttgctataaatctaaaagctattttattaaggagaaaagtttttgtacgaagactaaatattacaagattattccgatataattagtaaatggaaatggtaaaattagtaagaaaatgattgaaagagagaagaagaaatcacaagaaacgcggccgaccctaacttcctcaacaaggaatctaggcatttacaacaaaactaaggaagcgtaaaaacctctatcatcaccaagttccgtcgtctgattcgaacccccatacgaatcagacaagacactccttccaatataccatacttcatcctttgattcaaataccaaaaaaatttaaaccctaaaattcatttgagtctcttcctagtcatcaatctcttgaaaccctgattccatggtttctagattttccattgatcttgtttttaaataatgggaagctttcatcgccggactttttcttatgataaacttccgaacgaacccattaggctctccgttctcaaactagatggctcttcctttggtaaatgcttcatcatagtatcttttttttttcgttttggtcactacttattaatcatcctttttttaactttaatttaaaattttatctactatgtgaagatgtttacgtattgacctcggccaccgttggggatctcaaggttgctatagaaactgccttcagccatgtccccaagaagggaccctccaagatctcatggtacatttttcaacttttattacatttttacctcttattatgtttactgaaaatttgacccaagagtttttaatggtgtgttaggtcacacgtatgggggcatttttgtttgtgtttcggaggtcagaagttaattaccgatacggattgcatcggaaattatgggatgaaggacggtgatgaggttttatagccaaacttttaatctcatttcatgaatgatatacaatattgggtaaataaacaagactttgttacatacatgtttcaggttaggttcaaaaaccatgtatccggcaatgcggtattgagcaagggatattctaggaaatccaaacaaaagaatttgtaagtctcattctttcctttaatggaaacacattgatgtatcattccaaataaacgatttttaaacgagtgcagagagagggtattgccaaaggatggagatgaagtattgaataggattgaagagattgatgactcttgggatgatcttgagagaggaggtttagtgatgtacaaagatgatgacatggaaacttcttcaaatgaaagcaacaggtcttgtctatccactgtacatggttgctgctttgctttcggtttaaaagagcttcttgggtttggtaatgacagagcttattactctttgagagatacttggagagacgattgactttggtccaatttttgttattcgtaagattttgtaatcacacaacaaaatgatccaattatgtaaggatcaagttctattacaaagggtagtaattatgttcagtgaaagctttataatagagagtacaaagttacaatgattcataagtacaagatagtgccttaaacaaaaaagtgggaaaaaacagagcttttggcagatacataacacacaaaaaaacaactccgaagagttgtaatggcggattaagaagttacaccgccattgccaaaagctctacagtggaagaagataaaaggcactatcacgaacctaaaccaaagaacaaatgacttctacaagaactttactgaacatagagagacaacaactccaaaaagacggtcaagactaaaccctaaactagattaccagaactcagtgacaggcttcacaaaaacactaacagttgtagaaacaggctcctttgtttagaaggaacctgccaaaaattttaaaaaacaactgcagtgtcctgagaaagaaactaagttctaggtggaatctatgggttttagcgaccaaaacctaggaaaaagacttggactgatgatgatgatactaaggttttgtagaaaaagtgggaatttagtagagtatatcgcacctccatagattttcgagaagagtatccacagtgctgctgctgattctgccacaacgttggatgtttaatcccaaaagcgtgcggccgagtttttgtatgcatgccttgcttttgtctgtaattgaggagcagccgccaatggaaagaacctgaagattcagatggttaggagaagatgccaaggccttgattccgtgatctgagaccaaagtatttgagatgtcaaggtcattgactgagtagcagttcttggctactgcgacaaggcttgcgtttgtgatgttcttgcagccgtcaaggttaagagactccaatgtgcgtccgtggcaaacagaaattgcagagactgtgttgtctgaaacattgatacattcgctcaggttcaccttcactagaccaacattgttgctctgtagcaactcgcgcacacctgcatctgtcactccgtttagtccacagagttcaacatcctgaagctgatgacagaactttcccaagaaagcgagacttgcatccccaaacccagggcagcatcggattgacagagaacgtaaagagctgcaactgggtgatggcagagaggattctgagttgaagtcactgatgcccagacagtttgccaaagagaaagctttcaactttgagccacagttcatgagaaaacccataagaccaaactggttgatcctgtggcattcttcaagtttcaaactttcaagtgacaatgcagatttggccaaagcgacaagtcctttaccagaaacaagcaagcatttgttcagagagacatgcttcagatcagggcaaccatttccaacagcttcgagcccaacatcggtcatacctctgcacgacattactgagagggacttcagtttcttcaacccttttgcatttcccataacccagaagcctttctcattcacaccttgaagtccatgaagcacaagatcagtaacagctgctccgtagtgaccaataacagcaagagacaaaccagatacgttcagcatctggagtttcactttcgtcaagtaagaaccagcttgagccaagaggaaggcaacaccttgatcaccaatacgtgggcagctcctgatagagatagatctcagattgacacaacgtcttgcaatagcccttaaaccctcattcccaacaccagagcaagaatcaatcgtcagatcactcagattcacacagttctcagcaatagcaaccaatccactgtcagttattccaggacaccgtgaaaggtcaagtttttcaatcatcgggcatgaccgtgcgatctcagacaaacccaaatcactaacagcaggcaagttccataaagaaacaatcctaagagatggacaaccatgagcaacagcaccaagaccaacatcagtcaccttactctcaaacccactcccacgaatctgaagcttccccaacccaccacgactcgacgtcccaaccgcaatcgccgccaacctcaaatccgtcgccttcttcccctccaaactcctagacaaaaacccttcaccctcctccacatcttgaactgatgactcattcacttcactcctactgatactactcaaaagattaagccaatgcttggaaacacaagcgcaagcactcctctcttgtccagaaggtaaacgtcttagaatctcaaataaacactcttcaggcaatacatcgattgaagtttgcttctcctcaaaaccgctgtaaaacgacgtcgcagcaacacgtaacctcttacgcgctgggtaatatacaccgggacagctccctggtgatagatacatcgatcccccaagtaaacaatcttcatcacctatatataatcaaacaagtcacaacataagaacactcaaagaacaaaccctaatgtaacataacatagcaacatcaacgaaatgagactaaatcagatcaaaccctagaaacctaaccacaagttccttatcaaatcacaacaacaaatctaaaattgagaagcataccactaaatctgaagattccagacataattcgaagaagatttgaagaagaaagacgaagatttgaagagatcgaagactaagattcatgaaaagaagaagaaccctagaagattagggcaaaaagagaagatttttacagaagaaatgtttgtgatattgagaagaacaaggaagaaaatgagaaacgtctttaatggtgagagaggtgtacggtggaagttgatgtagaggataaaaactcttaagttcaatgtatacacgcgaaaaagtcggatttcttctccaccttctttgttcccacaccgaacccaattgtcatcatatttttaatttataatgaaacatatcaaaaacattattataaaaataaattcgtaaagttttgaaatgtggtttgacgaaaaagactgaatacattgaaggaagagaatacatgcattgttgacaaaaacatttgagagatgtcgatttttaaaaaggatgatccactagtagcaacatgggcaatagtttatttgaggattaagagcaagtgttgcgtatatagtaacatgtatttttaatgatgtaggggatgatggataacatagtccaaatccaatgttaattgtatattttagatgtcttttcaaaagatcttagcttttgatttgtgtttcgtttgacatatttaatagtgtggtggatatgataattttttggattttcttcttaaaacactatttaatattaattatgaaaaaacaccattaaatatttgtgtttttttctcaacattcattatgtttttttttttcactccaagcttctaattacgtttccataaagtgatagaaaactaaattttctaacgtaatttaagaaatgaaaaaaaaaagtaaaaacttttgttttatatctactaaaaatttgaaatagtgtatattgtaagatatattcagagttatatgtacatgtgattttatatatatacttttgaatatggtttattatatataaaaacatcatttatatttaaattattattaatattgataattaaagaattcaactttccatgagagtatgagactctttctagataaaattcataagatttatcttattttcaagttcattttaatattaatgtgtcaataacggtgatatatgtacacgtcgtaacacatggtaactcatgttaccaatcacacccaaaacgtccaacacaaaactaacggaatatttagttttccaaacaaaaacctctaagcaatagttttgtgtcatgcacttgaaattctatgttatggtcttggttacttgatattttgatacatatgtatattatgatgatcacttgttgcgtcataattttacaagttgtcagaaaaataaatgcaaatgctggtgacagtggtgaggtttcaaaaggaaagcaaagaatatatataattgtctgaatgcaatgaaagtgagagttaaaagttgacaaaagtggctgaatacattgaaggaagcaaaaaggttcgagtacatgcattgttgacacaccattcttttttttgtttgataaaaattgttgacgaaaccgtgggaggttaagttcgttgaatttttatttattttaagattgaaagaagaattattcgtataacatgattgcgacagacataaattatttgtttgtttgagatactaaaacgaatgtcgagggttttattgaaaataagaagtagcactctaaaaatgaacgtctcattgttttactaaattagtttgattaattgattataaatcataataagttttggacttctaactcaaaaccgccatttgagtgaattaaccaatctttaacgtgtattattctagttgtaatgaatcataacacgcccattcgatatgatggctgttatgtattattcatgtctattctaacagattctagcaaatcaccaagtgttaacacaccaaattgatttgtttaagaggtgtaaggaagaaaaatcatagtactagctagtagagcaatgatataacaacataatctataacatataatgtcgaaaaatggtatatatctacaataaacggagattcgttacaacttatagcacataagtcgaaatatcgcacactttttcgaaattttgaatttttccaaaggagaatatctttgatcctattgattatttcgttgcagtttttatagcttacgttttcgaaaacacacattgcgcttaataagttacattacgaaaaaaatacattacatgcaattgtacatatatttctcattcatcgtgtttgatttgttgttgccaatcaatcaataatatcaataaagcttacgtatttatgtttaagttattcttcaatccagcgacgacaacaaaggatgaagctgaaaatgacgttgtagacatgaaaataaaagtcatcttgataatatagtcagaagtcttcaattcgaaaaagaattcactttctcgcggataattgaatttggtcgaattttgtagcacaccattaaccatcttataggtacaatgtaccgtacataacatccaaaaagtcataatcagatcttaactttatcataccatcggtttatataatccaaattctaactaaatacatatcaccgaccaacttagaaaatagccgaaccacttggtccctataatacaattctgagtgtaacaaaaatcgacgtaacaaagtgattattacacaaaaaacaaaaaaaaaacgatttttttttttttgttccttgtgttttactttcaagaaaccaaagtctaacattctaagttccgatttttttttcttcttttgattacacacataaacgaaaagatgaaacaattgatttggaattttttcttgagaaatcacttagaaaatagctgaaccactttgtcataataatacaattccgtgtgtaaaaaaatgattattacacaaagaccaaaaaaaaaggtctaaatcgtttttttactttcaggaagccaagtctaaaaatccaagttcttcttttgattacacacataaaagaaaagatgaaactaaattaagtttaaagagttgcaaatcaatcatacaagccttcttgctcccacacatccaccaaaaaatccaccatttcctgccacagtttattattaaatcatcaaatccttaatcatgtttatagaatgtgtaaacttgctgagaaaaaaatgcttacagggagtggtattggacgagaaaaccgcttgttcatacccaacaagctctcatatgttgcattccagctgcagtaaacaaaattttaaactcagcaagttcgaataggcgagaactttgatggctaagaatcggaagaatcatctatgaactttctgacttgtaaactgtaataaccttatcttacataacctaaaccgcctaaaggactaaatagaagaatcacaagacatcatgtaacagctttttgaatatgcagcttgtcaatgtttggatgacttgctgatgcatatttattgaatcctactactattcttggattaagaagttttaactacaatgtttggtggatgagaaagtcaagttgtgcctttgctttattaccaaaaagatttcataataaagataatactagaaggtgagaaaactattgatggaagcactaatagagctaacaactgaagtcatgatataagtggaagcttctatatgcataaaatgtatacactataaatgcttgaaaagggacattgaatagcatatgatatctcaaacttgtaagtttgtttatctgtgaatgcacattaataaatatcgcaatcaaattgttttcaacacttatccttgtccatgatagaattaagtgaagaactatattcataaagaattaatgcagatgttgaagagaaaatgaaaccttattgtaggttctcgaactttggcctttttttgagaagttccatttgcaagccactgttgcctagtttggttccagaggttcaatcctggacaggacgaaataatagacacaaactttctttagagaaaatgactgcactgaaggaccaaaatacgaataaacagagcgaagaatcataaagtaatgacgttagcaccccgaaagtcaaagaactaatatctgaagatgcaagccaaaacataccattacccaagaaagtggaggaaacataattaaactttgcggcatagagaaaaccatttaggtgtgaaagcttcctatgcacaggtcaggtttaattcaagggaggtttgatagggaatatccatcaatagccaacatctacgtgtcatgagacgaaatattttcatgttgaacaaacaaaatacatagtagattctacagaaatgtgcccccaaatgtattttatccatagtcagtcatgaattagagatcttccagtgattgagaagaaataaatataaacaataatgtaagccaacacccgtctacatatattaaaagcgggttgaccatccaaatgagtaagctaacatcataagtagatactttcagagttgaataaataaaaccacattagcttggaatgatctttcacttcttagaaaacaagtcaagtaactaaaatgcaagaaaggatcaacaacaatcaacaatgtgtggaaattacaactcaccgtggtttacaaattctgtggggttgcttgtacttgcagaagtagaagtattgttagtgaagctaatagaagacatgcttctctgtgactgaagtgtactattatccatctcgcaggtgcttgtgctccagaagtcctctgatacgcttggcttcttcactaaacgaccttgaatccttaaccctttagacggctcatccactgcaactataagcggtggtttattgcagcatccaaaacaacctctgtactgttgcaaaaccacaaaacaacaagaaaataccagtgagaaaaaatgcaagaactcagacgacaaaatttcaaagggacacaagaactctgacgacaaagggacacaagaaagttcttttagcctctaaagattatgaagtgaagtttcttcgatgatctcaaccaaaaggtactgatattacgagcaatttagcggtccaacgcttacaatattgagtgagataaaagatgtagagcaaaactaaaacatgagagatgctttgattccattatttgcttaaaatgcaagcaacaaccatatatatatatccacaagcaataggtacgaaaacataatctacaatttaagtaacaaaacttatcaaaactaaagtcaaagtttttacactccagtttcttcttcatttctctcaatcatacacaggtaacacacaacacagtcacagacaaggaatttcaaataaagattgaaactttgaatttcaaaaacaatgaatttgaagagaaagatcctcacttaccccatgcaaccaaataactggtagatccaagagggaatgatttcacggagatgcatctacaacaaccaaattagagatcttctaatcaaaaccctgattccaggtaagagaagtctcacaatcctgcaattttcaaaaaaacccaaatccattgaatcactgaaatcgaaaaaacacacttttttttatttctgatgatgagaaaaaataacctcaaaaatggcatattcggggaaaattaggattagggttttgttccgccacctcccctgcagctaaatctaaagcctttatctttgtttcttcgtcttcgtcttcttcgttgttcgttttttttttttttttcttcttcttcgtttagttatgcgtgtgtggtggttctgcaactccccaaaaagaaggaatagaaatattccgggtttttttttttcttttacaaagaaaattgtttgttacttttattttattgttttccaataaattgtattttaatgataaataaatataagttaggaccattttaggaatttttaaaaaaattaataatctgatttcttttttataatattttgttttcaaccaaaaataattaaaaatcagtaaagctaattttgaaagatttttacatatgtaacatgatgcagttcagtacgaacttttcgtaccaatttatccgttttaatatttgcagtacaaaaaattaaaaattaatagaaatttgtaaattctttcttgttgttatgaaactctttcaaatatacacaataaatatcgatcattcggtaaataataatattgaaaaaataaatatccaaatattaaatttcgttattgaaaatattttttaagattaaagcattgtgactttaattgattccaaaagtttcttctttttactatttctttaataatacagaaaagaaagatattcgctcatgtggcagccattgtgattaggcacacacacttttgtttctgtcaacgcacatttttgtttccttttgttactctcacgatttttaaagctaagtaatcctctcgagtgggagagaggacgtttattttgtattgttccctttttggttggttggtggattggatagtaaaacaaattgagagttatagatatctaaaattccttagacgttaatcagattaagatttagcatctacccaactaattagatattttgtattctagtaaacttgtttctataacaattaatgaaatgacaaaacattattaagaaaattaatcagctgtttagactagagaaatcattgatttccctcgatcaatttgactagagccaaggtggacttattatggtatggccaaattttagaatcctttacaatgaacaataaacattaatgagtgaatatggtctatggatattttgtgtcggcaatgtaaatagatatgttgaaatgtgtcgccatctcaattattgataatatgaaaagtgtggagagtttttcgttaggtgttgttatccttatgttttgatcaataaaagttagtgaaaagtctagaggtaaattactatagccaactagatttaaaccaaagccaatttggatataatcactactatatagatgctttaagttgctataaagtggattgaatgtttcttaacacgtacagctggaaaggtcctgaaagatcaacttcacgtaaatgaaattcgtctactcagtttccatatttaagttttgaaaatgaaaactttgaataagtaacacatagaaattaggaagtgatttggttgttttagtagggtttttaacactactaagtttcttatttttttgttaatttgaattttttattattctgttaaaataggttaacaaagaagattaattaagaactccttactaattatgagtatgaatagcataactatacaccgaaattacacatttcaagattatgatatgagagtgttacatcacctaagaagtaaggattggaggaagataattagatttttcgcctacaacctttgcgttagtatcaggaaagaattcagtcccagcaagatttgttacttccccattgctaccaatgctaatcggataactaagcaaatgccccggtaaatcgtcatttcgaggatactcttgtgctgagtatagtccccatagctcgtctgccgttgcattaaccattcttatacactcttcgctttcggggcactgaaatgcattggttgttactcgtaggtgttcaagccatagtgatatcctgaagctaaatatttggccaaccggcctcatattattagtagataggagatggctaggttgatatgctcccatggcgatctctgtgtctcgacctccatccattgacctttggtttatattggctgatcctattattatgtactcatcatcaactgcatagatatatgaaccatgttaagagctttttgattgttcttaatacgtttgtagcaattggccaaacaaaatttaaaaattttggtttaaatcagtaagttaaatttttataaactttttacgtttaaatttttttatcaaacaaacgatgcacttattgtaaaaccgctactttttttatcttttattataatttaacactatattcggaaaaaatgggcctaacgagattaactagactcattcggtcttcagcccgacatgacccaccactaatcctagttgttgtctcttataaacgccacattccttaaagccaaataaaaatgatgagttatgaaaggtaaatttggacttaccaatcatcattttagagtggacatagatcatgaaccgacgagattcttgagctcttgcgtaatcagaattagcctccggtttttccggaggcaagtattcacccaccttgcccttttcccggttcccgaggcagaaaaacgttaggtagtctctagggtttgcatctaaaccttttttacgtagtgcaatgattatatcagtatacatcatctccattgttctcctttgccagtctagtattgcttgaaccgatgcggaaccaggtttaccttcaggccataacggaatcactatatacaccgaaaaccgctcgcctgcctcgattttactcacgatttttagagaaatctctttaggaatgagttgtagtgcattgatctcatttaaatttatgtctctagagttccatccaaaggagcttcctagaaaatattggttctcaatgtagatgaagtttttggctctccttatggcattaacgtaagcgtcttgaatgcttctttcgatcacgttatcttttccgcttataagtcctatgcttgcagcttcacgtggatcctctgggaacccttcaactgcaccatcatctatcgaccggaagacttgaactgtccaaccttcttcattgtctggttgtacaatcggaagtggcgggaccgtgatctctgcgagctgtgccatcgatataaggtaccttctaccactacctaaaaacataaaataaatttctaacgaattaatgattgaattctgtgagtttctagaatgacatttcacttttgtttagggctaccgttgtttgacacacaaatttatgtgtgttttaataatgttaatgcaaaagcccgtaattcaaacaaaaaaaattcttaatccctttagacccgaaaacacaaattacaatattagtttcgtcccaagcgtcactcgaactggtgatttctaagtctcgcttagggtcggtctttaccaatagagctaacgacacttggttcgttaacattttcacgattaaaaaaaatttgtattcgaaaaaatcaccaattattgtaacatgtaaacgcaaaaagaaaacgttgaagcattgtgaatttgtttcaataccttgtttcatccacctctgctcaaaattgtataaaacatcccacgccgcaggaccatccagcttgcagtgaatatcgtgccacggttcacgtggaccgccctttttaatcgatgcaccatcaaagttcggctggtgaaagtcattagcatgaacactattcaaagtaccaaacaaaggatgctctacagtgtcgtatctcccatcacaaagatcaatacctccaagaaaactcactatccttctcttggttaatgacccgtccacttcactgtccaccacaatcgttttttgatgatgagtaaacatagtagcgacctcgaacccttgcacaatgctatcaccattatccggattccgcggacagagaacgcaacgcactttcgtgttcttgaagtaatcgtaagtttcttgatcatgagtcatcatcaaaccgtctctcttaaaaacttcgtgagacgttctatcgtcccacacaagcatcagcacggtcacgttttcttctgctttcttcttcagcaattcccctaacttgaggtcccctcccggtctcgtccgtttaggatctctaactaatgtcacgtcggtgtttacggaccaaccagcgatgtatatcaaatgttttgcttcccatatcgcatcgaaaatctcttcccaacaccgatgatgcttgtatataacttgtcctcccgtgagggtaacatcagggtattcgttaagaacgtgagcgtcttggtatagtgtaactttgcaaccttctctttggttgaaataagcgttaggaactccattgaaggaaggtaatattattcctttgttccaattcacgtcctgtgtcacatgagtgaacttcacacgtacatggagtttggaacctccttggattggtctcctgttctcgtctaagatatcgagccatcggtctataggttgtccggtgatgacttctgttacaggtaaataagctcgccctatcaaactagcactgaccggttcatcttctttaactgtgaatatgattttagagattgaatgtgcggtgtagacgtggaaggattgtaaccatttaggatgacgtctcatcatggttctagccactcttgacctgtctaggtcaatagttgcgtatagatgtcctccaaacaaacttgtgcatgagtccgttagtcttttgatttgagattgagtctttttacctgttggctccttgttcccctatgaatcatttttgagtcttattttacaagtaaccttcgtctaatatctcttattagtagatagtgttgaaattaaatattaccttgccgcataaattgaatcttgaacgttgatgcaacttatcgatcctataaatcttcacttcaagagttccatgaagcagcaattgctccgtcattatttcacctgcaaattttataaataaatatttttgtatttcgtggaaagtggatgtctatttttagtggatgactaataattataaggaaaaaaataaccaatgtgtattgataattaactaatagcaaaccacaatggatcgaggaaatgtctcttttgaggatctttttggaatggctcaaaacggctttagcaattagagttatgtaaacgtaaagttagaatttaaggagacaaacgaatttgaatacgaaacgtttggattaggccattagggttgttgattacttgaggagactacatagggatttcaagaaagaaagagatgaattctttcatgggttttgtgacactatgtcttaagtaaaccttttcttgtaggccaaacctaagaccagggaaatcgagaacggaatattctttggaaaactaatcttattagtaacgtctacacttttcttgatgcatgtactaaagatacactttttccatttcatttcattattatttttaaatagttagatgagtatattttacatggatttttatttttcttttttttccttctaaaagttcgcttgaccaattttatgtaaaccttaactgttatcaaatttaatttcattgggttttgtatatcttgtgtttttttacgacatttcaatggatagaataacttgttttttaattttgaattattgttatctttgaaaaaagtatttgaagtatgagaaattgttagaaatctccttctaatgctacttctttttttacaaaatcgataaaataataaaataataatattttttgaaatttctataaaaaaaagtatagttccaataatattataaatcataaaaaaaattgctaagaaacctttcaaaactatcttttttaattatatttctttctgttggcatttttatttatatagtgaatgatggatgtgactcggaaacttttgtgatatttgataaagattctgaagaaatcaaaggaacaactatagaaagcgtaagcactaagtatcacatatattactattgttgaattaataatatactctcacttgaattaaaattgattattattctatcattcacacagataaaaaataatcgtagcggacaaagattgtagggcattcctacatgtgtgcaaccaatggtaaaaaatacttctttattcgagattaaaattaaagttaaagagtttgattttaattcatcgtataagagcttcataatttcacggattatcgaacaaataaagtttatatcatataaattatatctcatgtttggtgtcttcaatatattatgcaacttggaatattaacggtttgtgtttagacaactttggacgatattaattgtggaagcaaaggcgatgaaagtcaaaattgaatcgatgatcagcgcctgaaaccaagaattgaggactgaatccccttattattaaaaggaaagtataaattgaaattttgtctaatttggcttcaattttgatttcaattttggatttaattctttcctattcaaaaacattaagggtaatttggtcttaacaatctcataaactttatatgatccgattcaatctaaaccgttcaataaaattaattatcttcaatctaaaccgttcaacaaaaataagtgaaataatttattttttatcttcactttaaagacatataattataaataacataattcatatggtctttattttgcaaaaaaagtgtataacctgtcaaatagttaaaaaaaacacatataatcataaaaagtattacaccaattttgtgaatcttacatttttgtaaatactttactttcactaaaattacatacacataactaataatacatatttttaaacacaatttaacacattcctcttatcactaaataacaacccaaaaaaatcccaattattatttagttatgtttgattaaaaacattatatttataagtttaggatatcaaattcattcaaatatttagtataagaatcaaataaaccgattgcccgcagtaaaccgcgggttaaatcttagttttatatttattttcctaatacactaaattgaaattaattttctagatagaagtaataatagtttcaacttcattgtttggttattgattattttataacatgtttttatattaactaggactcaactaacccttagaaggaaaatgcgcaaacggataaaaatggagttatactcaagagacattatcgtagatatcaaatatactaatagttgcaatagttcgccaaataaagtaaatgatacaactgttcataaaacaaataaaaaattgcaatggtttgtcaaataaatcaaatgttgcaatggtttaactaaatagttggaatgattattcaaataaattaagggttacaatatataaaataaacaaaatattacaatggttcgtaagtaaaccaaatgttgcaatggtttaattaagcagttataaaaatttattaaatattttaataatgaaaaataaaatacaatatactttgaagagttacgatcaaaatcgcgaccgttgaagtgattataaagacatgtgttcttattgttattattattagatttattaaattatttcaaattttttattataattttactaaaagaaatatgtgtactattcaaacacgaattcataaacaatgcatcaatctcatacccgcccatcgtgatccttatctattataatataattcattactttttatatagctaaacactaaaattgttctttccattgtccctctagtttcttaattattaacctacaaaatttttaatttgttttttgtagatgactatagatgggctgcatgttgaagattgaataagtcccgggcttttttacctcaaattgttgggcttctctgttctactgaggttgagtgggtgcacctttagaggaagtaagaaaaatccatcttcacgattgctctagagattgaattggcgtatgacatgggattttatatggatatgaaaggagattgttaatattatgaaagcttcgatgtccatgtgataatgacttaatattgagttattttgagttgcacttaattacctaatgggctgatatttttatgttgtattatatataagagtttctatgtaccttcccaatgtaaactgcgagatgtgtttctgcttcttcgccaactttctgtatggttacgttggcatacataggagacgcgtaggtacaacttctcaatctcgcaagtttagaaagcaagagaatgctcgatccatcaggctctgtaatatttggaggagatatatcaaggtgtccaaaagtaatagcttacaagaatatgaaagtttatctgtgacgcgtggtatatctctcgcgtagaccaaaaaaggaaagacgctgattcgtgtagagcttatggaggatcaaaacggacagtctcagatcactagtttagaaaaacggagactcaacatatcaaaaagagaacaaaactaatacatagtatatatgtaaatgttatgttctttagctaatattggtaacctaagtgtcaatggatcaagtatatatttgccttgaaaaaacatgcaacagctagattggatggcaatagctctgaggaatgatgatctaggagagatatccatgttatgttctttatattaaacactacttgggcgttccgatttgcaaacaatatatttgtgctctagtggtacaaataaattattttattattgttcactattctcaacatcatatatagaatctacaaacaactgattgaataaataatttgaggtcttattagataataaatatcttttagtatacaaatatttttatattatatagacaagtttgaaattaactaataaccatcttatttagaaaatttgtgtagaacaccatttttatgttttgttttcaaatagcgtagatgaaattgtagagctaaaatcatagatgatctctcttaatctatgaggtagttgaaagttgagtttttggtgaatcttcaagcttaattttgattttgttaaccttgaatgatctactcgaatcttcaagcttaaacatgaacaaagagaagagaagagaattatcaatctctcttaatcttgaatgaatctgtggtaatatcagactaaattgctactaatgaaataactctgagttgttcttctttcatggagtattatctaaatctcaaatgatttatgcatgtgttcacgcgcaataggcatagtgatggtaggtgtttttggttttagtgcattttggtaatcttaattttgccaatttttttatttttgtttatagtttgctcatttttgtcataagaaaattctgctaatattttttcattttgaataattttgtgctttcttaacttctcataaactgtgacttagtatctgtattttcattgttcaagtgagattggggaacaatgtcatggagaaggtctttgatttgggactatgatcacattatgagaaagaatgcttataggcattggagccagaactcctatcctcctttgaaattgtagtcaagtttgggaaccaacttttcaattttatgccatttgttgtagtatgtgttattggtcgatggatttttaaagagttttaaaattttcatattcaacagttattggttaatgaattattacattcttcgtaaaatctagtattattgatttgatgacttttaaattctatcaacaatctctttttattcaaaaaatttagttatcattgattttacaattctattatatccatgggatttttaatttttatcttaaaaaataaaactcaacaattgtcactacaacgaaaaggctgttttgaatcgcttattttgtatatttgcatcagttataattgatgcaaataagttttacatcacttctataaatgacttaggaattggtgatacaaattatttgcatcgtttcaaataattatttgcagcgattacaataatcgatgttaatatgcaccagttgcaaaatgatgttaattttgcatcaattaatataaatgatattagtgtttgcatcaatttgttacaatgacgttaataattgttacaataataagtgatgttaagtgtttatatcaattacaaataactgatgttaaaatttgtaaaatcatattaaatatatattttagtaaacaaatttattaattttattaattaatataaaagcaaacgattatatttgtttcgtataaacagttgcttattaatgtttacactttgttgacaatacaaaaaccaaggtcaatatatataagaaaattatgaagccttttttcatgggagcgatgtgggactttgacaaattaagtaaccaattaaatccctttttacaactgatgctttatctttaattaccatcatttgttattggtgcaaattttgtatcattttctaaatgatgcaaattcttagggttggatcattttttgtgaaagtgatgcaaatgttttggatttgtattagttttaatgaaatgatgccatatatatcaataacaacatctattattgtaactgatgttaaataatattttttatatcgattaaaaataaagatttaaattagtatcaattaaaaataagtgatttaaattagtatcatttaattttctgaaacaaattatgtgatgtaaatgagtttctttttttgtagtgaggattcttgttaatcaagagtaccattgctctagaagcatctctcttctctttttcaaccttgacctcatatatctcaaagacataaagctttttgaggagtccaagcaaggaagtgactagcaggattcgcatatgagcaatatcaactccgtttgcttgttgatgaataaagtctttcttgacaaactctctctcaaaattgataaactcatgtatctcttcatttgttaacataaaaaacagtaatattttacattaataaattttacattaacgattatgaaaactgataataatacaaaaaatatgtcaacgatttatattatatgagatttataaatttatttagtgtaataaaccaaacaatggtaaaataaaacaaataaagaaaacaaaaacatggaaaaatattatctagtaacactttgtttagccataaacaaaaaatccatgaaaatcattgctagagtttatacaactcactgagaagaatctgtaaaacttttaaaatctctaaacttttgaaatctttaaattcttcaacaatcaacttaccaatagaaatagcgtgaaaacaaattttaaaattttaatttagttaaaaattaaaaataatgtaatgataatgataatgtattatacgtatagtatcaattgaaacattttgattgataatctacctgttaatttaaatttttaagaaatttcttacatgatagttttttgatattaaaaaaaaaagagactttagtatgaagagtaaaattatattgcctacatgaagaggaaatatgtctgccaaatttaaagctagactccaaatttagaaagaatagtaaatttttattttgtaattaatagtttttaacaatgaagcaaacaccaatttcttttctttggtgactatgttcctctttaatattagatttttttttttttttacaaaacatagattgggtttttgttagagtcagtgaatagtttgtgataatagtccaatgggcttttaggttatgaaacggtttaatcaatggggcactcaaatagtaaagtaaggaacagatgccatagaatagagcgcgtaacggctgattagatctccaaattaaaaaaaaaaagagaatttaccacaactacaagaccagacgtcaaagtgtcagaaaccactctgtcacttacttcccaataaaaatccaaaaattatcatttgtccaaatcccaaagtcactttctcttttcttttgtttttcaactttaaaaattttaatatctgaatttcgaaacgagaccacaaaatcccgctcacgcagtcacgctcctcctatttcaacacacactctcttcgctgttgtagatcattctcattctctatattcgattttctgtgacaaaggtatcacatcattttacacgtctctcgtttggatcgatgtttatttatttttgttgttcgtaatttgagtttttttgtttgtagatctgtttttttctctgttcttatttttctaagtgtttgtggtttttttttctctctgttttgtttgtatgtttatgtttcagacaatgatttgatcacggaaacatataccgaattcagacaatgatttgatcatgtttgtgtttatgtttttattttcttgttattgtcacggaaacatttaagaaaaatgatcaataataagaaatatgatcgtggaggtgattttttgtatagaatttttttttgggtcaaagatgaaatttaatgttgggaacttgattttacttgtttaaagttcttccactcaatttctttcaagtttatgaagttgagatttgatctcactaattgagcatgcgatttttcttgaatctgaatttgctaacattttttaactctgattgattcaggtttggcttgttgaatcagtggagtgtttttttataatttgaaatcatgcatagagcttcttctaagcacactaatgcgaagaaagaagcaatctctacttcgaaaattcgagataataatgtgagagtcactagatcaagagctaaggccttaggagtgtcgaattctccatcaaaacccgcttttaaacatgaaacgaagcgtgttgctagaccgagtaataaacgaatggcatcggataatatcacagtttgtaatcagaaaagacgagcggtgctcaaggatgtgactaacactttggcagaaagtataatttctacagaaggcaatgttaaggtagcaaatttttatgctttctttgcattttcttgattcgtatatgttttggtttagaatttgttgttaatgatacaatgtggcaggcttgcaagcgaggtggtaaagaaactaagcaaatagaagaagatggtttggtagatgtggatggcgaaaaatctaaactagcagaagatttgtcaaagattagaatggttgaatctttagatgcatctgcttcaaagcaaagtaagaaacttcactactaaagaatgtgtttgtaccagagtgtttgtttctcaaatttactcaagaattagtggattgtgcagaagaagacagatctgatgtcacagattgtgttcagattgtagatatagattcaggtgtccaagatcctcagttttgtagcttatatgctgcaagtatatatgacagcattaatgttgcagaggtttgcattacataatctcaatgcttggtcttattctatcttcccaaaagatgatttacattttgagattttgagttacttatattaaccaatactttttgtacagcttgaacaaagaccttcaactagctatatggtgcaagtgcagcgagatatcgatccaacgatgcgcggaattctgattgattggctcgtggaggtaggaatacaatatttgctatgcatagttttacacttttacttgaacttgtgtaaaagttgaaagtgtgttattttcaaagtatttgctaaactaagaatctcttttctttcaggtctctgaagagtacaagttggtttcagatacactttaccttaccgtgaatctaattgatcggttcatgtctcataattacattgaaaagcagaagctccagctacttggtatcacttgcatgttaatagcctcgtgagttaccacttttactgtttcctcattcacaatgcaatgaaagtaaaactgaacaatcagtggacacagaggaacacatgtttgctctcattgcatacttagagcaagttttactctggaatatatacttaaattaataattacagattagtacttctcaagtaactaaggtattcctccttgttgaagcaaatacgaagagattagtgcaccgcggttggaggagttttgcttcattacagacaatacatacacaagactagaagtaattaacatgcagactccatctctatcagttctcagctaagatgattcattcttaataaaagattaacaaaaaatacaatacactattttttcaggtactaagtatggagattaaagttttaaactctcttcattttcggttatcagttcccaccaccaaaacgtttctcaggtaatcattaaacacatcaaaatgcaccattacttaacatagtctctttaacgttttcaaaacattctaaagtcattttcttcttctctgtttcaggcggttcattcgcgccgctcaagcgtctgataaggtgagatttacattgatacatttcactaatcattctcagcatttgaaataacttggaatcagtaaactgattttgttggtttacaggttcctctcattgaaatggagtacttagccaactatttcgcggaactaactctcacagaatatactttcctaaggttccttccatccctaattgccgcttcagcggttttcttagcaagatggacactcgaccaatctaaccatccttgggtgagtgagctcatatttctcattatgaatgtttttacctcattgaaacaatttttggtgatgtgaatgttattgcttacagaaccaaactctacaacactatacaagatatgaaacatccgctctaaaaaacacggtacttgcaatggaggagttgcagctcaacaccagtggaagcactcttatcgctatacacaccaaatacaaccaacaaaaggtataataataaattcaatctaagaaagtggacactgaatctgaatttggtctctctcactctatatgaatatttgacagtttaaaagagtggcaacattaacatctcctgaacgtgtgaacacactcttctcaagatgaaaccgcagattttctgattctcctgatatgaccaagtcagcacaactctctggcttcagcagtttgtatcaggtgatcatcaatcctagtttcagacatcagttttggtctctacagttatggaatagttttccttgtaagttgtctgtctatcttttacctgtaactgttgttagtgtcaggtgcttccaaagaagtgccatctcatggaaaattgtatcaaccaaaacacaattttgactcattgagatttgtccttcacagtaaaaaaatgttatagatttttgtagactcattaataaaagcaagtgttcatgcgccattgtatatttatttagttttggttaccaagtgatgttccagtggtaattacattccattgggcccaaataaacttcacaataaacaaatatgaaaaaccttttgtttcttgttcaagaaactcgacctaagcaataccagattctctaaaacaatacaaactgggttttctctcttatgccaaccttttcctgtcttgagtgaaaagcctagttgatacccatttaaacaaagatctataaagacaaaatttgttgaaaacttggctttccattaacaagtaattatttctttcacaatatcatactaaagatgaattatacgtatatttgtcgtaaataaacggagcgatatatcatagagaaatatcctaaaatagcactcaaacaagtttaatggacaattaaaataacattgtccacaaatttgtaaaattagctttagtgaatttactcagtaactattttataattatataaattaacaaaattaattacaatttgaaatcacgattaatttacaaacaatcgtgtgaaacgtcaatcgaatgttaataactttatattagttttttactatgaatttgtgtttttttagagttttagagattgtgtgttaaatttagtaacaaacttactttcatgctatttatgagaattgcatatttctagaccaattttttattattataattcatataattattcttgaattatttatgtgctatttgtgagaattaccaatttctagaccaatattttattattattcatataattaaacgtttattgaattattttagctctaaaaaatataatgaaatttagaattgttatagaaactttaaatgactcaaaactgatctttgtttttttgtcaaccacacattaattaaaaactgatctttgttaaacatctaaatattgaaaaacaaaaggattaccaccgcacctatcctgcatcgtcttgtaccatttgcattcatcagagccattatatattcatgtggctgtcacatccttatatacatttcaacttataaatttaattttgtacgtttagcagatgttggtgaattcatttattcaagcttaaggtttaactcgttcttgtctcctttaggttcataacatttaatggacaacaactactccaaatatccgtggactttaccacgcgacgcaccgacaattctctagccttttcattaattgatcagtaaaaacacttctataattttaattattctcagaaattttaaccggtagtaacataaacgtagatgatcgaaaaagatgaaatcgaggtctctgttttgtgtcgaattaatagatctataagaaatcaaacaatgaaaattaaatagatgaatgaaatatgttttgacgacgttttcacgtcactgtttaagttatctgttagtaaaatttgatagcatttaatttgaattgctatgtaactcggaataaattcgacggcaagaggtgtgggatgtgatcagtcttctaattaagtgtaatctttacaaaaaatcagtatgagttaatacaggtttataaatagaaagacatctacagtaaaacctctataaattaataatgttgggactgcaaaattttattaatttagaaagattttaatttatcgataaattaatatttattaatttatagagagattttcgtaatttagtaacttttcaaaaatttctataaaatttttttcattatagaaaatatctttcaaaaatcaattacaagtaaataataatatcatgtttagaaaacaacaccaaaagtttttgataaagtaaaatactataactaaatttaaataagaataaatacaaattttaagcaaaaaaatattagaattatatttcaaaataatttcttacatataatgtatatatagttgatatatttataaaattattaatttatgatattgatgggaccatatatttacataagattttttaaaaagttattatcttattaatttatcgatttgtgtcactttttacactgatcccaactcgggactggaagaatttattaatttatagaggttattaatttatcgagtattaatttatagaggtttaactgtatatgaataattgaatacacatgggacatcattatagttaccttagtacgattttatgcatttggttaccaaaatccactaggcttcgtaattggttgtgggtcagtgtccattcgatagtttgcattagcgataaacacttaaaacagtaaaacgtgatctatttttaaacaataacatttcttcttatcaaatattcacataattaatgaagaaaagagacgaattgataggcaataagaaatatgatcacttggtaccattgtatgcatggtatgaactgacatcaagtatttgtacgttgtagggtaattattaacattgtagaatgacaagtatgatcaaatggaaaaggattagttatatgtagcaaaactagtatttgtacttggactatcttgtcatgtagttttcctaacgctatatataatccaataaccccatgacacggaagagataggggacatacaataaatatcagtagagaggacgtgggaaaagcagagagttaagtgagtagttggagatagaaagatcagagacgaggaatctctctcccactctcactttctctcctattcttagttcgtgtcagaaacacacagagaaattaagaaccctaatttaaaacagaagaatggtacattcgaagaagttccgaggtgtccgccagcgtcagtggggttcttgggtttctgagattcgtcatcctctcttgtcagttctctctccctctctatctattaatagagacaacagtataaatctgtttatgcaagtccatgctatgagttaagtttacatttttggtgtacgtgtagggcagttttctgatcattgattatattttcgaagattcatgcaaagctcttataatatcatgcatttttgtttaagtcgttttccttatttttttccaattaaaaaacccacgtttattaacatatacatatgttgagtatttgtactttttgtgttgtattttgaaattttgagtgtacataaatttaaatgctttgtcatataattgatactgatgtattttctatgtcttagttggattatagaaaatcatatagcaaagaattgggaaggaacgaacactactcactataaactttcctcaaaaagaaaacgacccaatttattatcagtaacaatttataacaaatttgttgtgtgtttgttttagtactttgaagtttgaataaaatgtgtgttttttgcttacgtaacttatgtgagctatcaggaagagaagagtgtggctaggaacattcgacacggcggaaacagcggctagagcctacgaccaagccgcggttctaatgaacggccagagcgcgaagactaacttccccgtcatcaaatcgaacggttcaaattccttggagattaactctgcgttaaggtctcccaaatcattatcggaactattgaacgctaagctaaggaagaactgtaaagaccagacaccgtatctgacgtgtctccgcctcgacaacgacagctcacacatcggcgtctggcagaaacgcgccgggtcaaaaacgagtccaaactgggtcaagcttgttgaactaggtgacaaagttaacgcacgtcccggtggtgatattgagactaataagatgaaggtacgaaacgaagacgttcaggaagatgatcaaatggcgatgcagatgatcgaggagttgcttaactggacctgtcctggatctggatccattgcacaggtctaaaggagaatcattgaattatatgatcaagataataatatagttgagggttaataataatcgagggtaagtaatttacgtgtagctaataattaatataattttcgaacatatatatgaatatatgatagctctagaaatgagtacgtatatatacgtaaacatttttcctcaaatatagtatatgtgttgtgattctaagacttgtaaactgatatggcctactgtttaaagagtagttgatattttctattgaatttgtggacatgatataattacaggagattagtatagtagtcattatgatacttatgaaggtacaagtggtaggatgataattaattagtttaataaagaataatgaacattaaatgtgaaagagatttgccacttttgttaaacacatctgcgaatcagattcttgtgattcgaatgttagtcctacctagattaagaaaggttttactattttaacatgtttacctggtttgggtaaagttcatgtcctgtcctattccgtcttgtcccgatcatgataaactttatgagcaattcttatagaattttattttaaaatactgatttttgatattcaattttatttgattattttttacttaggcatgtgataaaggcgattttgacttagtttcacatacaagtttaagtaaattatcttacataacaaaagagattcaagtaaataaatctaagcgggctaaaattaatcaactagctcaagttgaaacattttatcaagtgaacctcttccaagtctagatagcatctcaagtttatatatgatatcatatcatggacacactttggattttggatattttgtgtcgatgtttaaacatcttgtttagatataaggagagcatctattttgacataaatatttaataggttaagttgacgaattttgatattttggatattttgatgcggtagggttattttattatttttattctattttgactgagacgattatatatagattaccggcaatatttttgttttttggatacttaaaatataaatactgttatatatgtcttctagatattttatatgagaggtctaataagttttaaaaatacataaatatgtaactaattaaatattcatgttatatcgaataaaaatattagtattcaaccgcactatatcatttatgtaaacattgtttctcaaaaatgatttaaaatcttaaaacggacacaaacaccaggtataaagttttaactagttatattggctggtttagagttaaattacattttgttagttcagaatttgactggtttggtcgttttaaaatttaattaatttcgctattattctttttattttattttatttataaccgaaaacaattataaattggtgaatcacttccgttacgtgtgagtctctctcttttagtaaactctgaaaacgttttttcaggatctcaccaaaattcacaaacttcggagaatacaccaccgtctccgccgcagaaccaccgtcgtaagagaggcaaaaacatcacgaatatgggtaaaggtggatcactaagcgaaggcgtgattaagaacataatcatctcctacacatacgtagcaatatggatcttcctaagcttcaccgtcatcgtctacaacaaatatatcctcgacaagaagatgtacgattggccattcccgatctcactcacaatgatccacatgtccttttgctcaaccctagcttttcttctcatcaaggtcttcaaatttgtcgaaccggtctcaatgtcacgtgacacttatctcagatccgtcgtcccgatcggagccttgtattcactctctctttggctctctaactcagcctacatttacctctcggtctccttcattcagatgctcaaagcgttaatgccagtcgccgtttattcaattggcgtgctcttcaagaaagagggtttcaaatctgagacgatgatgaacatgctttcgatctcatttggtgtagccattgctgcttatggcgaagctagattcgatgtttggggtgtgattctccagcttggtgctgttgctttcgaggcgactcgtttggtaatgattcagatcttgcttacttctaaaggaatcactttgaatcctatcacttctctttattacgttgctccttgctgcttagctttcttgtttatcccttggattgtcgtggagtttccgatcttgagagatacctctagcttccatttcgattacctcattttcgggacgaattcgttctgtgcatttgctctgaatcttgctgtgtttcttttggttgggaaaacctctgctttgaccatgaatgttgctggtgtggttaaggactggctcttgatcgccttttcgtggtcggtcattaaggacacagtgactcctattaatctttttggttatgggattgctttcttgggagttgcgtattataatcacgcgaagctacaagcattgaaggctaaagaagctcagaagactgctcagcaagttgatgaagagactggtcggcttttggaagagagggaaggaaatgaaggtgggaggaagaatgagccagaggattaaaaggtgaagaattggattttggtaaaacttcaaatttttttgtttaacatacatttgctggaataagagcttgaaggttatagtagatgccagaaatttttggttttgataatgagagacataagggaatggcatttggtctaagtggtcttgtttagttcttcctatgttactatttgccttagcggtgaatcctgtgttaggttctgatctatcgatacccatatgagagtatcctagatagtgaaaattgtctttatcttctgttcttttttttttcttttcaagttccttctttttagttttggctgccaatggactatatatattgcgtgaatcataaatagtgcagattgaaaaaaaacaaaaacgatagtgcataatttttgctatgaagttgattactatttgcctcgcaataatacttttagtaaattttgcagttggaacattttggatattcattgaaaattttaaaaagtatacaggttgatctttatcgatttttccattatttgtctttgaagtttttagtttaaggaaataatttgacagttaactaactaattccccttcactattattagtacgaaataataatatgtttgtggcccaaactcgtcagcctataaacataacaaagataaactacacaattacgtatagcgtgaaggtttgtgttagtgttgttaatgtatggttcatttttcaagaacaccaaattaaaaaaaaaaaaaatcaagacacacaaaaaaaaaagatttctctttttgaaacatatctaggttgataaaaacataatcccaaaataaaaacataatcttaaagaagttcacacaagatgttacgaatttaaagaaacagaaaatatgtcatcataaaatcaaacatgagggataatcaaacgaatcagaagattgcaatcttcaggccagctcgagctccggtgaaaccttgatgatttgcttttgctgcttcctcttcactcaccagaagaggcagccaccatccactagtagggcaaagatgcccaacaagatcaggtagaactgtcttggtgggatcagatccgtcatatttggtccgctctccatctaaaatttttatctagatcttattcttaatctttgttctaagaagcgtttgattcaataaacataccttggttgcgtcacatatgtctttcagaggagtcaagaagcagagcacaaacttcgattggaaattgtttcgttgagtttttttttatgaagtagtggtttgttttgttttgaactttgaagggtaactaacagtctaataagtcttagtactctaacactaaattaattatactttagaacacaagtaaagtataactaaccgtctaataagtcttagtgctctaacaataaattttcacaatccatctcttgatctcttcacgtcattcaccggccagctcgagctccggtgaaatcatgatgatttgtttttgctgctagcttcctcttcacgtaccaaaagagcatgaagaggaagcaaccaaccacaagtagggcaaagatgcctagcaagatcaggtagaactgtcctggtgagatatgatccgtaacatttggtccgtccatctacaaagacatatacaaaaaaattaatattaggctaatggattacccctttgatatttaggtgggggtattggacgcatgaatttgatatactttaatagaatcttaaattctagtgttattcaattagacatttcacaaattcttttaaattcttgtgttatttaacttgctcatttcttaattctattaattgcaattgttattaactttttcggtagttttgtgtgacaacgttacttcacaagaatttaatagaaaaatttgtctcaaatggtttatgcatgggttcacacacaagaggtatagcgatggtaggtgtttttgtttcaagttcatttcggtaatcttttaattttgcctttttttttaatttacttatgttttgctcatatttgtcataatgttttttttactttaatttccttaattataaaaaactaacaaaaaataatcaaaaattacatatcttaattttacatgagttattggtcaattagattttgacatgtatgaaaatatttattttaaaatattttttagcatggatattaaccaattacaattaatattgaaattcaaaatagcaatataaatgacttaccattgattgaattagataaaaattgtatttatcgtaataataaaatatttctattcgtaaaatcaaaatacaaaaacctacctaataaatgtaaaattttaattatatttgaatcactaataaccctagtggaagatattttaaattaagagaaaatcctaaaaatagcattaaagcaagttttactgacaataatagcacatattccataaacttccaaaaatagcactacttgacttactataaagtttttgttctaaaattataatcactaattttgtttttcaataatatcacaaatttttatataaaatctgtttaaccaaaataattagaaataaatttaaaatattatatttgggttctttatttccaattgtgggtatatatttgaaccatttaaaaaaacaattttattcattttaatattagtttatggtattatatttgggttccctatttccaatttagggtatatttttgattcaatttaatattacattagtggttgctctcatttttatttttttatcttatattttagttaagtttaattgaactttatagtactatttgtgaaatttaaaaatattgtgctaattttggaagaaaaactttttttggtgctatttttgtcaattgccctttaattaatggcatgttgacatcgagttttgcttatgaagttttacctaggtcttttggtttcgcctcgtattcattattgtgcattatcagacaccaaagatggagctagtcatttattaattactttgaaagtatctaaataaaaataaatacgagaaatacacatatttttcccgcatttttttttgacgagaaatagatttacaagggatttttaaagggttttataagatttacaagagattttaaaagggttttaaaatatttacgagagattttaaaaaggttttaaaagatttacaagggattttaaaatggttttaaaagatttacaaggaattttaaaggactttaaaagatttacaaaggttttttaaagatttttaaagtgtttaaaattgttttaaaagggtattaaaatatttataaggaattttaaaggactttaaaagatttacaaagttttttaaaaagatttttaaagtgttttaaaagatttacaagtgattttataaggttttaaaggatttacaagagatttttaaagggtttaaaaatgttttaaaagatatacaagggtttttagaagatttttaaagaatttacaagaagaccctttaaaaactcttttaaaatcccttgtaaatcttttaaaacccctttaaaatctcttataaatattttaaaagcattttaaaatcccttgtaaatcttttaaaatacttttaaaccctttaaaaatctttaaaaaacctttgtaaatcttttaaaaccctttaaaatctcttgtaaatattttaaaacctttttaaatcccttgtaaatcttttaaaacccttttaaaatccaatgtaaatcttttaaaatcccttgtaaatctatttcccgccaaaataaatttacaaggatttttaaaagcatttttttgactgagaaaatttttgtgacaaaaaaaagatttggtgaattttttttttttggttggaattttgttttttggcaggaaaaataaatttggcggaaaaatttcagtttccaattacatgttcctattaaatgagggtaatttggtcattctgtttaagggaaagagtatttttaaaaatggacaacacaaaagggtattgttgcaaaaaggtagtaaaaaagggtagttttgcaaatctccaatgacactatagttttaaaccacaatagactaattgctttattcaatataatttagacatgagttctaactaaaattcaatttaataagatacatatagtttccatataagttatcttctatacttttatgatcgtctttactattatgaaaataaatttccatataatatttttctgagtaaataaataaaaatatttgtttgacacaggtcaaaatctgagatcgataaatttgacatgtgtcacgatactaattttgaaaaccgtactttataataaaagtgtaacatagtaattgagcggaaccttaattacagacgagaatacaagatctctacgagtactcgaattaacgaacggatcttgcttagaatgtcgaaacttgacgaagaagcagtaaaggataaggtcgagatgggttccaagggatcgatatcgacaaggttttgcaagtcctccttgcagagcttgaacacaaactcttagggttaagagtcctcctatctaggctttacgctaagctctcttaaaactctttattcaatgatcaaaaactaatcaattctacaacgctaagattctttaaataagaatagagaaaccaaaatcctaatctaaaaacatatatgtatatactagttaaaagcccatataaaactaaaatcccatataacataggtgacgctgcatcacatagtatatacactttaaatgttcaaagcaaattgacccccctaacaaagcattgcctctgccctgttctcaggcttatcgtcactcatttggggaacaaagtaatcaaagatgagatgctttcagattcaaaagagaagaaaaaagtattaatcctaaggataatactgtcaccacaagactcaaagcatccattcactctaaaaaggcgtcagtttgtggtgcgaatgtgctatgctatgacagtaaataaaagtcagggaaaaactttgaatagagtggcattgtatatgccaaatccagtgttctgccacaatcaactctacgttggtttgtcaattgtcacttcgccaaacagtttgagagtcctagacacatctaaacagaagcaagatatatatgtgacgaacatagtttacagagaaggttttaatggtctaccagcaaccgcaagtaagagaatcacagaaacaatagacaaaacaataacgagtttgatgttcaatatacttttcgaaacttgagacaaagaaactaactattctctatatactcttatgcaggtgaaagaagtgacatagaaaacaaactaacaaagtaacaaacactttgagaaactgattaaacaaccaatgagatatattgaagaaagtgagaaagtggaaagtggaaacaaattaacgaagtaacttctttttttggacatataaactatgaagtatggaaagtggaaactatcgcctatactcgcaacaatatcttgccatctccccatttatgaaaattaactttttcaatcaaaatttacaaaaataaattcaaatgtaaattctaaaatactcaaaaagctatcagattcaattttatactcacgtaaaactcatcaattgttttttctaccacctgaatcattatagaaataaaataggtaataactgatataagtacacattacgatatcgtgaaggattcaagtttctacaaccaaaaataaaagaaatggcccaagaagaggtatagctgtacatgtataagttcatcaaatcgttaataacacctctcatcctctattctttttcttattctgcctcttattctcatcccaaattgctgcttaaatcaccatcgtgaacatatgaatttctcagacaagcaaaagcaccaaagaaacccaatgaaaaatacataaatacactttggaaagctgatttataaacatacactaatgtaggtacacaaccatttaatttgttattcaaatcaacaatatggtttattcaacacaaataattgaacatgcaaactaataacggtttccaacattcaaatatcattagctaggtgaatagcaagatttccaacaaaagaagtgtaaaacgccagacaaagcagcaccaaagctaactatttttcaaatgctttaatattttctccactatgtatgatatattcgttacaagtttttcagcagctatttctgaatatatcatccatgaaaaatatgcaggtagtaacaacataatccacccatctcccttctattcctgagtttttatcaacaatttataaccaaaacaaaaaaaacatgaatcactaaattttgttatatacttacgactttcctgtagctgctactagatcaaattccacactcacagacatattaaacaaaacatgtcagaagctgcacttcatgataaagatagattgatctctctcttccccaaatatcatcaattgttaacaacatccaccaaataaaatgactttacttaaattatattttaataatggtattttatgtaatatttaatatattaaaattatttacttacataaattatatatttttattattttatatattttcaattaatagtgaagatatatatataatctatatagtgaaaaatcaaaatattaatatctataagagttaatatataatatttataaaatgaacaattaaatttgatatagatatatatatatatatataatattaatcaatattttcagaaaatagttaatttcatcttttagaatttgttttgtaatcttcaagatctatattaaaagattttatgaaaatataataaaataattactacttcaattgattattttgaaatacaattatatttattcctattttgatttcttttagttactagtaagggtattatgtataataaactacaagtaaaagatatttcctaaatatacttttctaatgataaaaagatgccttttttcatcaaagttctaccctttcccacctcatttaatgttcttgttcttcttgtaaattttgtttataataggaggctccataatttccttatataacgtttccataataagttcagtcaaacatttatatttactttatctaataccttacccataaaaaaaatatgctattcctattattgattttctcttcttgacatcataatatatatgtatataacaagttaagtcaaacatttatattactttatctaataccttacccaaaaaaaaatatgctattcctattattgattttctcttcttgacatcataatctatatgtatataaataacatagtgttttcagtcttgaggaaacaaaactaataaaatcataaaatgtctacaagagttaggattgctcttgttatgaatgtcttccttttttggttctcaccagccctaattcgttcggatccaaatatggtgcctctaagaaccttcaaggtcagttttgaaacaaaagaaattagttcaagtgttcaacatcatcgtatatagtcggatatgtcatgaacggagttcaacatctgtttgtttgttttttatttaaaatagtgatcgtttttttttttgtcattggcagatacgtgaaaatgtaacatatgactgcattaacatttataagcaaccaggacttgatcatcccttgctcaaaaaccataaaattcaggttcatgaacgtttcataaatttctctcctatggacattttactcttataaaaattgaattgaatttgactatacaatttattttttgaaaagatgaaaccatcagtttcaagacatgaattaaggaatcaaacagacaacactaaaacatataagaataaaatgggatgtccagatggaaccgttcctatattaagaaattcaaaagaatatattaccaatgcacaacttttcgccgagaagtattttcatccgctatcaagcgaaagtcctggatcacatgtaagcattcaattttttcttaattccttagttataataatttttatatgtatatttcaagtattatttatgtatatatttgtcactataaccggtttttggtaggttgctggagtaaggtcacaaaatggtccatatcatggtgtagatgcttcatttagtatacataaattaaacatcgaaagagatcaggcctcatatgctcaattatatgtaggcagtggtttgaaccatcagatcaattttatccaagcaggttggatggtaagctttacatttttgtattgttttttttgtttgctttatcaactcattaattctctaggtagagtcttaaagtatatcgaattttttttttagataaatccaagtatatttggcgatggaggtgtttggtcatatggattttggaaggtgtgcatgtgaaagaaattatttatggtttatatataagcaaaaatcgttaaatccaatatcatgtaaattttaaatataatttttctagggtgaaaatggaaatggatgttataatacggcatgtccagggtttgttcaagtatcacaggaggttcccatagcccagcccttggaccagccaaaggaagatttgttgcattactccatccatcaggtaatttttcaagatttaaatattttatgtttttcatttttaaatattttatgctatttcattcttcaatttttaatttttttattatgattattttcttatacacaaaaaggataaacaaacaggaaactggtggattacaaaactgatagcaaatgcacctaacatagatgtcggatattggccaaaagaattatttaacctaataggtaatggtgcaaatatggtgggagttggaggtgcagttcaagcttctcatcaaggtccaagtcctccgatgggtaatggtaaatttccgattggagacccaaaggaatcagcaatgtttacaaatattgaagtcttgaattccaactatgaacaacgtcgaatcgattcttttcctatggagaagttgctagatagccccaaatgttatggaataaataccgataaaataaaactactcggttttgcttttaattatggtggtgcgggaggagaattttgtggagtttgacatttgccaatgtaatctttttaaatcgccatttaataaacttattctaaattaataaatatgaaattgttatatatacagttctcttagcgtagggtgaatgtgagaccagataagtgttataatgagaaacataaatgtttgagctgaagtgaagtcctaatctactgagaagtataaataggtctttaggtcattgagagagagtgcgagacattgagagtgtgagaggtgttaagagagaaagctattcatagtataaacttgtattagttgttctgtgagtgataacagagtagtgcagagcaatcctaagtactagtgaaggatattaggtgtattgcttgtagactcttgttgtaaaaacaccatctgtttttagtggattccgaggagagtttcggcccagacgtagctaccctcaagggagtgaactgggtaaacaaagtctcgtgtgttctctgttttgtttctctgtttcttcaaagtcttgttcttcttacaaacactgttgctcgagttttcttaagtacatcgttcttctctgtcttagctctgttcttggttgttttgagtcacattctagaggaaagtccacgcctttagcttggtgaaatctcaacatatgtataattagaaatcgaactaacttgcttgattaaaagttttaaacacatctaaaattcttattcattttggtcgatcgatcgtaattctttccccgtttgatctttggttaagagtctttcgttttatttatgatgccaggagaagagtcatttgaagtctacaccggggcgccaattgacatgcatgaaccagagaccagcaaaccttacttgatatttagctccgacaatcttgaagctatgatttcctcggtgttgtcgaacggggataacaataaggtatggtcaacatagatgttatacgaactcaaagttaagcgtaataaatattttatcaactgtagaatgacaaaactaccaaggcatagcccgaatgagtttggaaaaaaaaaattccatcagctataaaatataagaaaatatgattacataaaaagagttatatgtataatattagatcatgataaagtatatatgtatatgaaattcttcgtgtgaccaaatgggaaaggactcaaatacatgcaagtgtgcaaactatgcaagacctccctttacttgaaactggcttgcttttaaaacaaagtgataaaaaaatctcgtattaaagagatcgaagggatggatgcttacatgtgttctatggctgtcagctgataaatgattgaaatgcatcgcctcgaaacattatttttttatattttataggaacagttccatttgtacatcttatctggttcatatatgttttgttgttgtcaatttgattctctaattcatgtcttgaaactgatggtttcatcatttcaaagaacaaactgtattgtcaattattatttaattacacatcacattcaactcaacgaagaaggaaaggtattaacgtattctgaatggagttaaatttacaaatatagtaaaaaccagagataaattgactacacacattaacataaactaaccaaaagacaataataaaaacagtgtcatcttgattcttgactactgggtcagtagtcaacacattcactataatttgtttttgtttagttgatgataagttattcttgatatactttttttctttctggtcaaagtactattattcctcatcaagtatttattcacgttatgaagtcaaaatatacgaataagccgtaaagatcttacacttcttgctaatcagtaatcacattcataatatgagagcaccaaaaattttgtacattatagttgcagtcaaatatttgtatttcctttgctagaatgtattatttacctttagaaaaaccaaaggtacgtagtgctaataataagtatatgtaagtaacagaatgtttcattcttgaagaaacataactgagaaaatgtctacgacaattaagatagctctggttttgaatctcttttatcttttgttctcaggatccctagttcgttctgatcaaacgttgcctctcagatccttcaaggtaagtgttaatacatatgtctccctcattattttgatctacttaattgaatcaacatcatttttttctttcttatatcaaggattaagttcaagatcgtctcgtgtctttttgtttttggtcattgacagttaagtgaaaatgctacatacgattgtctagatatttttaagcaaccaggacttaatcatccctcgcttcaaaaccacacaatccaggtgcatagacctttccaaaattcatctcctaaagaacttttaatttttagtttactttcataaaatgtgattttgtttattcttcgaaaagatgaaccatcaatttcaagagatgaattaagcaatcacattggcaacaacaaatcatattcgaagaaaacaggttgtccagatggaaccgttcctatattgagaaactcaaatgaatacaacaccaaggcacaactttttgctgagaaatatttccatccgctatcaacccataaatctggagcacatgtaaacattcaattttctccttatacattagatctaattatttttgcgtatttcaagtattaatgtcaatataactggttcttggtagattgctggagtaaggtcacgtgctggtccatatcatggtgtagaagcttggtttaatggatataagctaaacgttggacgataccagatttcatatacccaaatatttataggcagtcgactgaataaccaagacaattttatccaagcgggttatattgtaggtttttattttactagttcttttaaaagaaaatttcattaattaatatttcattgtattaaagaattacaaatcattttgacagattaatccaggtttctttggcaccggacaactttggacgtatggattttggaaggtgtgcatgtgaacattttttttttgttggttttttttattcttactacaataataaaaaaaaacatgtaaatgttcaacatgattttaatagggtaaagatggaaaaggatgttacaatacagcatgtgatgggtttattcaggtttcgagaaaaattcccatagtccaacccatagaccttaagccaggagtccctgactggtcgcgttggtccatccatcaggtatttcctcattttatttatttatttctcattataaatcatattagtgatcgatgtattttgattatataataacacaattagcttttaaagtaatgtattagcactttttttttttatgtatgaaaaaggataaaggaactggaaattggtggcttacacaaatcttacaaaatgcacctaacgaagatattggatattggccaaaagagttatttaatcttattaataatggtgctactacggttggagttggaggtgcagtacaagcttctggttcaggttcaagtcccccgatgggtaatggtaattttccagttggaggccgcgcagattcagcaatatttacaaatattgaagttttggattccaactataaccaacgtaaaatgaattcttttcctactgaaattatggtagatagtccaaaatgctatgggttaagaattggtaaggtgaaactatttcatcgaactcgactcggtttctttttcaattatggtggtccgggcggaaactcttgttgagtgtaacgttttacattgtaatctttagacttggtatttaataaacaataaacttattctgaattaagcatatgaaactattatataattaagttctctttttttctcgagtgtataaatttcaaaacctaatatactcgcttagacaaactcatcaatggttgtttcagtttgagattaagatcattgtgtttcaagtgactgtgacaatgttttaatggttatgattattaatgtgttaaaatgtttaagtgtatgtttatttctacagattcttaataacacaaaagctaacaatatgtgtggtagtgattctaatcccgagtctttgacacaaatgtttgatcttcctgtttttagtttttttatgtggataattttttcagaaaaatgtgttaatttatggggtaaactcaccaattttggtggaaatctggctttctgtctagtaatgccaaagctcgtttgtcaaatccagccatgaaatttgagcttcttgattttgcttcttagacggattttacttgatataatatttatttatatggttaaagaaattgatataatatgttcatatttttcagtaataaagaggaacctataaaaatcttaaatatggcaactatttccactttatactttcaaggttttgcactcttacaataaatcataaaaatgacgattttgttactttaaccttcaaagtagctttcatattcgtggtcccataaatattaatgggtaaactgaatcagtccaaaacaattcatttttttagttataaatattgtggttttaatattgaagcagttttttaatatatattatatttggaaaaatccaaaattacaacttaagcttcatgcaacactaaaatttctagttagtgttaaacaacgtttggaacattgtttagtaaataattaatcgaacaaactaataaaaagcttataaaaattttataaatatgcaaccagataaattaaatgtatttaaatacaacagcactcttaacttctacgtagatataaagaaaaaaattaatgaaacattaaaaagacaaaataatagaagaattttttcgtgaaagtttcaatgagaagggaagaatttgttaaggccgcaaggtagaccgtaaaactcatcgtttcgcacgtcaagattgtataatcgaaatttgtcccaccatttcaatccacaatctttcttggtttcatcgctttcacgacacaatgtgcaatcaagcactatcgcaattattgccgcaaccgttgtatgtgacatgaatatcactcttatcacatctgccaactgttttgtgtattcacataaaaggaattctcaattcgataagtttcaaaaaagtgtttgcgatttaaataatgtgtctcaaagtacctaagaagatgtacttacccaatttgagcgatgatcagaccgccaacctccattgtagtattctctgaagtattgtgggattgaaatagccatgaaaaaagaaaatcccaaaatgaatttggtgttgaagctattgaggttgcaaaattgtagaaagctaagtcccgcagaagctgcaatatattaaatttgattttggttttagtaaaaagtataatacatatatttataggaaatgtaatcttaacacttatagaaattacaagtgtgatgtgatgaagcgacttacacacaaaacacaagacgatgcaataaagagatgccatgattggtaatggtatggacgcaaaaaaagctccaaattttcctgcattttgaccaaaataaataagttgctaaaccagtaaaagatattcataacatcatttatacaatacaaatagaaagatataggttaaacaaaaaaaatataccaaaaatggagaaaaaaagcatgaatgctgctgatatttgtatcacccttcgactcccaaccttagtcattgctaaaagtccaacattttctctgaatatacagttacacccatatcaaaactatatcattagcctttaattactagaatttatatattagaagctaaagataaaaaaaacttgtaatttagagatgagtttcatttacgttgatgttgtgatccctgtgatgcctccaagcatgccattgagtaatactccaactccctacaagatatttatttaaatatttatatagatgatgaaataaatagttaataaatggtcaaaaaaatatgttttaaagtgaaaattaaattgtttgtagactaaccagccaaccagtaccacgactaacaactgatggtggaattggcgtcgcacttccatatcttgccgatgcatagaacaaaccagtcgactacaatagtacataaaacttatcactcttcatatttaaccatagtatgctaaattttattttccatcagtttcatgtaaagaataaagtttaacctcaaagagagtgacaaaagatgcagccatcatcgcaaaagaatcagtgatgtcgaaagttggactcccccattgaaaaggatatggtatgtatatcctagtattcatataaatataataataaaaatagtgaaatatctccacttggaaaaagaaaaaaacatttcaaatagaagaactaaccaaggagtgttggtgattagaccagtacgatctgtacgacaactggtttgagtagtttgaggcttgtggtcataaacaccactcgatgtgagtagctgagcgaacaaccataccactggaatgcataacatcattccataacggtcacatctatttccatcccaaatcatcggtcctttcttcaccttcagaaaacgcggtaagtactacacccaacaggaaaaagaaaaaaaaaaaagactttgttaattgtaaataccaaagccaagcacaaacaaaaacattcttaacaaaaaaaattgatgtaaaattaaaatcaaaaagtgacatgtaaaatgtacatgtaaccaaatatagttctcgttgactaaattaatgtttttataatcatgtgtatggatctaaaacaaaagaaaagtaagaaacaacggttagatctttacttgagtgataaaaaccagtaggattaaccctggaagtccaacttcaacacatcttgctaactgaacaaaagaaatttttttatcatattataaatctatataattacttaataatcaattaaaaaaataaaaatgttaatggccaaaattagtgtatatacataaacataccaaagggaaaccaatgtggtagagtcccaatccggtaaatgttaccaaaggagcaatcgacagagggcttagaaatctaaacagcacaaacgaaaagtacattcatgtgtaacggtagagtcataattcggtacgcaaaatagtaataagtaattttttggtaaagaggtaattaacctcacaatatttctccatacaccgaggaaacagacaagaacttgaaaacaaccagtgataatcagagctccttgtatgcttctcattgttctcacaaacctctgattaattatgttatcaaacaatttgttattagtacaatatagtttgtaaaattgatgataatactaacgttaagacttacttcaaaaggatccgtgtagtaagtgaatctggtggaataaatgatggaagtgataggaatgatataggcataagaagccgaagcgatcacaggcaatcgagttccaaagaaagactggaacaatgttgttaatccagacacaaatagtaatgtttgtattactttaaccttttctgcctgaaaatgttgataggaaagaaaaatcaaaatgtatgtatagaaaactaaaatatatgtaaacgatttagtgttttaatttaatttctagaaatttaaataaatttgctgtcattagtttttattataatttattaattcaatctaaaaatcatgtgctgtattattgctactatattgaatattatatgttaaaataaaataatgttttgcatgaatttatttatatagcaaatttgttggtgtagatgaaaaactatgataaccagaaatttgaaaatatggtaattaactactaacttcaaaacaaaactgaaataatatttaaaaataatcaaaaccatgatttaaaaaatcaaaagctagaagatcatatattgtgtgtattgagatatgttaataattatgtatgatatgttaataatttacaaaatttgttacaatcagatctttaaaaagttatttgaaaatatatatcaaagaatcatatatgtacttacatcaccacctcccatgagtggaactaatagactcggaatgagaactgtaataccaagactcaacaaataatgctggaaacctaacactaccgcttcaactgcaaacacatcaaagtaatccattaacactcaaaaatattaaatagaaaataaggttcatttataaataaaaaaacatacgccaaggaggaggactgttgacacaatattgaattccagggagttgttctttcactgggtggggttgtaactcctccgcccggtttcctgctccgttgtttccaccaccaccattgccaccagctccaccaccaccattgccggctccatttgccatggatgtaaataacttctttgtttccttaatccaaagtaaaccactcaatcaataaacgacttgataaactttttatccttctagtgaaaatattgtctatacattaatacaccattttttaacatcatattattaattgatacataagagttaacgtgatcgacacacaacttcagaaatccatatacataaatatagaagaaataatttttatatttcatactttaaaaaaaaacatcaatactcaatatatagaatgtaatcaaagaaatcaacgaaaatattaataaacagaaggaggctcagagtttagcattaatcaacttgaccaataccaaaaatttaaaaatcaggaacacaaaaatttcttcagaaatcaacgaaagaagtataagaattataatgggagaacttacttttaaaatacgatggaagaagctttctttggtgcaaattaagggagaggtcgtgagagatttcggaagaaatggagtgagacgtaagaggagagtgaagaagaacaagaagtcaaaaagacttatggggttttaagtcttgccaacttttcaattatttgaatgattaaatgacatattattcaatttaatgtcgtaataaaagtcttcataatgtcagtttttgatatatgaaattcgaaatagaaatctttagacatttaactgactatagatcaagatattttgagatcaattaagtaccccaaaaatattattgtgaccctacaacaaaacggtaagatacgtcattttcttaacgtcgttttggaacaatgacttatcaaacaccgagacaatactcaacacttttccgagtctgttgaagatttttttcattcaaaaaccctaaaaaataaactttcatggacggcactaataaaatttcaccatgccaacaacactcgttcaaatcgtgtagaaatcttaagtctacgacttgcaagagacacaataaaaccgcaatattgcttttgacaagacgaaattcttggctaaaatctttgaaaattcgatcacaattttcatgtcaagccattaccaaattcgaaatcagaaggtattattttgcatcctttcaagcactttgttcataaagtctcgatttgggaccttgctgttagaaagcggagacgattttgtttctagccatttcctccgaatggagaggctattcattcaagttcattggagtttgttggttttatgattcatcttgttctctccgtgaaaagtcttttgaattttcatgaatgtccaatgtccacaatcccgatcaatggaagggattgagtaaaaattcctaggatatatatggtatatcgatcggcgaatgtgggatccagaaataacaagttcacggataatagacgaatcaatataagaaaagatattgagtattagtcgactatggagtttctcccatgaacgatagatagggaaagaaacagatttcataatttgtttgcgagcaaggcttcggtatcgatacatcgtggaaattcacttctccatcattcttttgaatgattggttatgtatttgtggatatgtattttgatttgcttagtagcaatgtactcttaaagtatcaattcttgtacatgattccaaattaataaatgaaatagatgttaaaaatataataaaaagacataacttcatcataaattttctccactttgatttgacatgttagaacgtactaccaatattatcacttgattcttaaaacgtcattactttatagagacgccagtttttgctcgagacgttttggaaacgtccctctatctaaatctttgtcgtccatcaacggcaagtggtccctgccttgcccggaacatcttggagacgttagccatccggtgttggagacgttaaactgatgccaattaaatttaggtctatagaaagtagaactatcattataaaaactgaagaaaataaatgtcaaccatgtttcaaaaccctttcaaacccctcctcatacgtctccacttttcaagaaatatgaagatgatttccccataggacaaacatctgccaggttcatttaaaactaacaacattgtttcactaaaagtgttcattattgatattaatttccataatctcttctcctaggacacataatgaaaaaaatgtttctaaagttcaaggcaccagaaaggttaaggcgaaaaaaactcgacttctattacctgaaactacggacgatacaaacttatacaaacttaaacaaacaaaaaaatgaagaaggagctgacgaaaatcccaacgctgactaaattcaatcaatttttgatttcatatttgcaaaaatgtctaccgtccacagactattactgatggtgaggcctctgaaattcctggggagacaataacaaaacgccgacttagcaggtgatttcgattatggttcaaacaatgtgtaaacgttgtcgtttgtataagggtagaaaatagtgcctaattatgtctcttgctgttgttaggaaatccgcccagacagctgttccaaaagattctagcaatcgacatttaaaagggcgcagaaatctaataatctcatctgaatctgaacaagaataaacaccattgaccccggttactacacaacatagatgttcaatcttccgatgtagccaaccatggtcatgatgagaagagatctttcatgaaactccagaatgtttttttaaatattattgctctataccgttttttccacacttccttctgttgtacgttccctgaaattataaacattactatccctctctaatcagactttaatccattgctgaataaacaattatctaattacttacacttattacattattgaaaacctttaaaacaaagatgttcacattttccccgttgatttattttccatatttttctctacaaaaccatttctacccaattcttcttccagacattgtaattgctaagatattagtgttctcaagcccaatgacgataatgtccaattcaaaattttagttactttcaaagtttaacatacgttttgttaaaaaactatcaccaattttcaaaatttgaaatatgttttacaaacaacaaactcacattcaaattaacatttatatatatatatatataacaatattactctttggtcatgtattcataagtgaatatagtatctacctactctaataaaatttcctaatgaagtcttcttctcttagagcaaaggaagagtcatccagcgttctcctgattcaaaccgaaggtacggaagtctgtatttcttaaattttctaacttctttcccttattgttaaatttcaatccagtattgttgacttcttccccttactttccactcaatgaaatcaactttctgcgagaagaagtcaacatattcagagtctggagacatgatatggatgaagcacttaggagtctggagtctggagacattgtcaatgaaactctaatgtggcatcgaatggaaaatccagcagacgaaaaaacattgggaggcaaatggatttacaagctgaagaagaaactttaaaaacctaagcttcagaaatcgatttgttctactatgtttctttatattcccgatttgtgattagcaatttccaaagttaaacatttcaatccattcaacattaagagaatttttcataattttcccagatctctaatgtaatcttcaaatcaaatccattctacattaagagaatttttcactatttttcaagacacaaaatttacacattcaaaaaactgtgttcaataaacactaatacgttaccaaatatcaaatgacaggccaaaaaaaaataacaattaaatgcaaaaaatagtcatacgttagacccaaacaaaacaatggatactactcacaaacgccaactaacgattcattatgaaaaataaagaccaaataaacacaagatcaaaccatttaaatacaacaaagtacgattaaaatttcaagaaatttactactcattaataaaaccaaatcaatattctaacgacaacaatagaaaagacacaaaattaacacattcaaaaaactgtgttcaatatatatttaaaaagtcaaaacccataaacactaatacgttaccaaatatcaaatgacagcaccaaaaaaaaaacaattgaatacaaaaaatagtcagacgttatacccaaataaaaacaatggatactactcacaaacgccaactaacgattcattaagaaaaataaattccaaataaatacaagatcaaagaaaaaccttgtctccacatcagagagtgatctataaatatcaataacataaccattagtcaaacatcaaagtttcaataacatagaaagtcttccctattaaccactactggtttcatccggttctgaaaccaaagaacaacaagtaatcaacttgccatcacatcaacccaagccatatgtaagaaattaccattttaaggcacatgtgaatgttgaatggtgttgttccaccgaagcgataaaatatttatttaaatacatcaacaaaggggttgacaaagctaccattgttgtagacggcgaagacaaatcattttatctgattctaaacaacatttagacggcgaagaggcgacatcttagcacatctattattgtaacttgacgttaccatctttagaatttcctatattagcctacttctcaaatctttatttcacaagttatttctctttatacattccgtctctttctctggttctgtaataaaccattatcttattactatagtttgagcatcatatattagtgaggaaggagcataactaagtttgaatagcatgacgtttttttggtttttacttatttcctcccataaataaaaaagtatgttcaacagtttctgattccaaaattttattaacaatatcttccaatcaagaaaatcttaaaacagtaaatacataatcaacatattgaaatacaaaattcaaaacaatacatgtaatttgatttaaaaaaaaaaacattattaaaaaaccttcaacacttcgaaacatgtatatatattgtatatgtattaccatttttacatgtacatagcctcatttcgatttcacctactctttcaaaagcttcacgatgaacactggctcacctaaagcacatgtagagttatcacaaggcctcctcatccatttaacggaacctaacacaggtctgtattaactctttttcctttttccttttttttgataggatgtattcactctatttccaaacattcccactattttcttcattactaaaatatatttctgacctcaatcattttaaccttggatactttctgttattcaataaagcatcatgttaaaaatatatatatttgtttttactgtttttgagccaaaatatcaattcagtattatagaaataatattgtaaacttatgaatattgttgttgatcttaaaatataatttctcaaataataatctgtcaggaattgaagaacaaaatatcagtataatactttctacgccaaaatatcaatttcttttattctaaaataatttcaaactataacccatattataaaattataatatttacttttagacaatatatatatatatatatatatatatatatatatttaccatttttgagccaaaaaatcagttcagtaatatataaatcaaagttgtaaacttattaatatttttgttaagtaaaagaccaataatattgttaagaaaaatatatatttgtttttactgtttttgagccaaaatatcaattcagtattataaagctaagaaaaacgtacaatcggatgacaaaatatatatatatttctacttatttatgttgattagagctcaactgattaaatactttttttgtgatattttgtatttaaaactctttgtaagaatacatagacgaattataatttacgtttgaaatactatttattaaatccacgcatagcgtgggtcgtcacctagtatgatataaaggattaatttgatattttctcaaaacaccaagatcgagagcccaagagcaatatgaagatctccatgagaatcatcatcttctgtgtgacctttattgcagtttatgctacctccatgcagtgtcatgtctgggtttataggggcttaaggtgatttaaactcaggcacggcactgcctccatggctgctacgttttttaaatacattgaagttaaaaatataaaacaatccataaatgtatataaggtttctttgttgacaaaaaatgctatgtatttaaaaacgtttttaaatcacagtttaaaattcatgaaacaatccatgaataaaatgttagtgagattatctaacacatgtgatttcttttagctaggcttttttccaccactctttgttttttaggtgaaaaacaattaataatctttgtctaataataagaaaatatacaccaaatagacaaaataaaacttgatgaattcagaataaatactagaaataactaatattaccaaaaaatattaacgaataaatagaatttgcaacatttttctctacgtcaaattaaaccgtgtacaattggagaaagatctaccgcgtctgatttctcatttctcacaattcccatttttcgatttcactaagaaaattgttttcccagtacttagaatggaaacgtaaaattcgaagacccttatatgtgaaacgtctaaaaaaaaataggggctcagggcacaagcacaatcatgggtttggcaaaaacgtcgttgcgtttctattttctattcgttctttatttgcatctcaactttatttccgtcgtagactaacgatccttacgtctagcttccgttgacaccaaccatgtttccaccatatccaagccagaaggtgttattggctatggtggaaagacgccaaaattagcagtctttatccaaaagggcagtggcggtaggggaggaggcggacgtggtggcggtaagggaagaggaggacgcggtggcagatacgaccgtctaaagcaatctcgcggtggtctaggcgggtttccatatttttatggtatgtcgcaccaccacgctaatcggtcaagcagtagccggaatcttggaaggtcagggtgtggtttcggttggttaggtttattaccggctttggtagtgttgattttggtttcatagagttaattagtctttattagaactttaatttgaaagagtttcttagattttgatttttaatggattttgtaaagcatataatcttgtaggagtatcattaactagtatgtcacggctctttaaagagatcggagggatcaattaggtacggctctgtaaataagtatgtcgaaaatattagaatgaccttgaaggatctgaaagagccgacaataagatccaatcaactaacgctagggagaacaaaagagcaacgaatgccatttggaaatgttgtatacaaaatgatgggatcatattagcaaaattgtttgtcagctacctgaaagaaacgtcagcgcttggtcatacatgcagctaatttaatatataccttgttatctatactaactagtggcatcgcataaacatgcctgaaaaaacataggttatgtgcacgacaccataactatagattccgctactattccattgaacagctcgacggattttggtaccgtataattagttccgtttagacccaaaaggccatccattccgcaaaagttcagatagttcttttacatgatatttttggggtggtatgttctactttactaggcttatgtatttattggtgtattaaccatcagccaaaaaaaaaaaaaaaaaagaagcaaattctaaatttctccagaaatcgaattagcctaagaaaacattctatatatttaaaatcatttaaataacaatgtattaacgcttgtactttgtaccgtttcatttactagtatcaaaaaatgtaatcgtatttataaatgtatctaatattaaatttgatatgaatggtatatctaatctacctaatatatataagtattctaattggacttcaaaactaaaaaataaagtaaaattcagagataaattgactaaacacatgaccattaacattaagtaaacaaaagacaataataaaagcagtttcatcttgactaggcatggacgttcaagtatagattcgatttcatttcagtctggttcgccgattctttcggcttttaagtttaggatccgttcggatattcttttcaaatattttttgataatttagttttttggggcatttttctatattttcgaatatttttggatattttgggtaatttttgattttttgaatattttttataattttggaaatttagttattcgatctaaaaaataactaatatttttgaatatataatcatatttcagatattttcgggtacccaaaatatggactgaaccaatttttatttaccattcacaaatcatgtccgtagtggtgcggaccaaaaattaaccgccatattggtcctgaaatcgaattagcataaaaacattttatatacttaacatagtttaaaaaaaatgtattcatgcttttacattgttttgtttcattttactagtatcaaaatgtaatcgtatttataaatgtttagtgataaatttgatataaatggtacctaatatatacaagtaaattgtcatttcctttaatagattatgtcaatggacattcaaaagtcttacattttctagaggcagaactcacacaaaattaaatttatcctttcccaacgaccgtcgaagctagcaccgatttaccgctggataaacccacgtcagtggatgaaaacgttttagttcacaaattcaaaagtatttgagtgaacattttgacagagaacgccaattaagaatacactaatatacgtagtattaatttagaaaatctaattacgttttatcaaccaaataaaggtcaaactatttatcatccaaactaactaaacatgctaacgtgtcatagaggttaattagtttttaactttttataacaccattattgttgaaactgttagaagttagaatcataggtggaaaaatttacgcggttaactataaatcatgtttttatttttaccatttacccttaacagcaaccaaaaacaaattttgctattaatttccagccaatgagattatgccatctcagcaatacaagtctttcccaccattcttcttttctcaaagtttctctgtcttgtctttttttgaatctcctttgatgtcttccctctctgtctaacatattcctcgattcttgagctttccaggtatgtcgaagtcgaatcatcaatatatgtttagaagcttattctaatggtctgctgttataggttataattgtgaatgcgtgcgtaacacgctaggtgctctcgtttgatgcagaaatgaagagtgaaggagaaagtggtccatttcagggaattcttcgagatatcgaaggtagacgaaaatgttacaaacaagattggattcgtggcataaaaaccggtattaggtaaggttaattatatttcaatctttcttgaaatttatattgatgccaaacattgaattacttgatttcaatgtttcactagaattttggctccgacttgctatattttctttgcgtcgtctcttcctgtagttgcctttggtgaacaattaagtaaacatacaggtatatatataaatatttcttttccatgttgcttttttatgaatcgcctaaagaattaactttgatgatttttacttaacttgttgttgaaaggtggagctctaagtgcagtggaaacattagcttctacttcgatatgcggaatcatccatgcgattttcggtggacaaccattgttgatagttggagttgcagagccaaccatcattatgtatacttatctttacagtttctgcattagtagaccggatatcggtcgagaactttacctagcttgggttgcatggtaatgatcacaacaaatcaataatcttgttagtgtacgtgcatgtaatctgctttctaagagtttgttgttatatgttgtttctatagggtttgtgtatggacttcagttttgcttatccttctttcgatatttaacgcgggcacaatcatcacgaggtttacgagaatcgctggggaactttttggcatgttgattgctgttctgtttttacaagaagctataaaggtataaccaacttcattttctaggttacttagtcaacaagtaacatacttagttataatacgttttcagggattgatcagtgagtttcacgcccccgagattaaaaatcaagaaacagggaaatctcatttcctcttgatttatgcaaatggtttgcttgcggtaattttctcgctaggccttctaatcaccgcgctaaagagtaggagagcaaaatcttggaaatatggttttggtacgtcattgtctatttacattagttcatgaaaagtgtacattgatattcacttagaccacttataactatagggtggcttcgaagtttcattggagattacggtgttcctttaatggtcttgttatggacggcattgtcttacacagttcctagtgaagtccttccaagtgttccccggagactgttttgtcctcttccatgggagccagcttcattgtatcattggactgtagtcaaggtaagattaaagatatgcaaaacatgattgagtgatcaatacaaatgcaaaacttatagaatacaaaacttattatatacaggacatggggaaggtaccgataatgtatatcttagctgcgtttatacctggtgtgatgatagcaggactttacttcttcgaccatagtgtagcttcacaaatggcacaacagaaagagtttaatctaaagaatccttctgcttatcactatgacatcttcttgcttggaattattgttagttcttaaatgttcttaaaacttatttcaaagatacttatttcatggcataaataccaattaaatcttgttgttatggtggtgatctatagactttgatatgtggactacttggacttccaccttcaaatggtgttcttcctcaggctccaatgcacacaaagagtcttgcggttctcaatcgtcaagtaagaacaaatacatatatatatatgagaagaagaaggagagttgaaacagagatgatgatatattttttgcagcttatacgcaagaaaatggtgaagaaagcaaaggagtgtatgaaaatgaaagcaagcaaatcagaaatatatgggagaatgcaatcagtgtttatagagatggagacatccccacctcaggttagtaataatgccttctcctatatttatagaaagaaattgtttgaaattaaagaaaaaaaagaaccttaaattttttgcaggataattctgtagcaacagatttaaaagagttgaaagaagttgtgatgagaccagacgaaggaggcgatacaaaaggaaaattcgatcccgatgttcatatagaggctaatttaccggttagagtaaacgagcaaagagtgagcaatcttttgcaatcagttcttgttggtttaacacttcttgcagtgacagtcattaaaatgatcccaagttcagtactttggggttactttgcttatatggcgatagacagtctcccgggaaaccaattttgggagagattgttgcttctctttattcctcctagccggcttttcaagttagttaatatatatcttttctttagtctatttttagaaaggtctgcctttctcaatcactggtttcatctaaatgcagagtcttggaaggagtgcatgcttcatttgtggagttggtaccatacagagtgattgtaacattcacacttttccagttggtttattttctcttgtgctatggtatgacatggattcctatggccgggatatttttccccgcactcttctttctacttataagtataagagaacacttgcttcccaagttattcgatatgcaacaccttcaagtgttagatgcttctgactatgaagaaatagtagcagcacctatccaacactcaagtttcgcatatagggtaaacctttggtctcttaatgagtttaaactgattcaggggctttttgtgtacacgtgtgtgatacctttaaaccattttgtgagcagaaactagggtcttctcatcatttatcagaaggtgaagatgaattctacgacgcggagatattggatgagatgactacaagcagaggtgaaataaggatccgaaccataagttttaaagaggtaataaaaacaaattatatctattctacacaatccaagcattgatatgaaaaaatgcatataaacaagaatcttgtttcaggtgcacccggagcctgaagagaagcatgtaacctttgaaccacattaaaaagaatcttttgcaattgtttttgtacacaactgtatttgtgcataggcatacattgactatgttataactttccttatagtggaactttgtttcagcaattaaatatgagattattcagcattcaaattatccagtacttgctgcattatggccatttattcgggtgacggtgaaagcattatttataagcttatatatatgtcttccgcttcatgaggatagctaatagctattctctaaatccggatcgatcacctctgccatgaataccttgtcacctcgtattgcttgctttgcaagaaaaatgcgccaaatttcaagaccagttaatagctagcaagaataacaatggtacaccagtcaaagttattttagaggagataaaagattttcacaacgctttttgctttacacgtcatctctcggttattcttctgacacatagcgtggctccaaagtaatcatattttcaacgtattgcagagagagaggtcgaagaagataatgatcattgtatagtgtaaaggttcaaagttgattagcatatagctctgttcttgagtgatggataagaatggagaattaggtcttgtttcttaatacttctcgtcatatacgagttattgtatacaaatgcatacattgactatgttataactgtcttatagtgaaacaatgttttcagcattagtaacccttatatagtttctcctcaaatctgagctatagcattcagattatctagcacttcttgcatggttggtcgcatcttcgggtctacctctaggcattgtttaataagctcgcacataagtcttcccgcttcaagtggatagctattcttcaaatctggatcgatcatctccacaatgttgtactttttattttttatttctcgctttgctgagattgtgaggtcttttcctaaaccagttaacattttaagtagtataacaccaaagctatacacatcgcccgccatgttcgacatcccttcatttgattagtgcaatcaattaaggttagtctctttgaatttaatggtcacttttaactttaagatataaggaagaagcagaagattgttgcctgagagtatgtattcgggaggtgggtattgatatctaggtgctacatttgaaaacccgatggtgtataccaattcatcgagagaaacttttggctttccaaaataggaaactcttgcgttgaagtcctgcatatcccataaatgtcactttaaaggtaaggagcaagtattcaagaaaaaaaacaaaaaaggcaaggtgaatacaaaccgagtcgagcaggattttcgaagcagtgagatatctgcggtatagaccggcttgcttcctagagtgcaagaaggcaagacactgagccgctcctatggatatcttaagtcgtgtctcccacggcaatgactttggacgactatctatgatattatataaaccattaaatccaaaaggaagatgaattactattggatctaaggttaagatcgtaaactcgtgagagctccagaaatcaatttgagcaactctctttattccctctctatgatattaaattatctaggaatcatttagcttggtgttcttcaattagtatattttcctcacttccactaaataaagctctaatgagctatctcaatttttagatctagttttaaagctcttattaagagctcttacctttgggtcttgctcgagcaagattcttcttgctttgagtctactcacaagatataatgacgaaaaggagatgaataaacttaacttccttacctctactgatgtaacttcctaagcttccatttggaaagtattcagaaacaataaacaacatatcacgatcataacagtagccaattagcttcaccaagcttggatgagagttatgtcgtagaaactctacgtcaacctacaaaaatatcatctctaatgttaagacacactgacccatctctaggggtaggcaacatagacatttaccatccaaaaacatcaaaaaatttagaagaataaataagtaacaagaaacttaacaatattattggttttgccgaaggttctcctatagattgagatgatataattacttacaagccaatcttgaaaagcttgttcattggctaagtaaattttcttgaccgcgacggccatgccaacacctttcttggccggagataacgttttgggattgatgtatcccaagctctctcctagttccatctggtttccgaaatcattagtcgctttcttcagatctgccaccgtgaagactttcacaccctcctccactatacatatattataacaaaacttatatccattatagtaacattcaaatcaaaagtacttaaatccgcagagaaatatatatatgtatacctgatttgggagcatttggttcggtgggaagtgtcgaagctgagagacaatttcccattcggatactctctgctaaatcttaacactagagttcaatgaagaagagaggacttttagtttttcacaccgaggagcaaagtcaacgaaaacgcgtttgagagtcaacggttgacgcgttttatttggtgagtcatacgacgccgttttttgataagagtacatactacgccgtttggctagagtttcatacgacggcgtttaaacagatgtctctggatgcttcttccttcttcgttcccgggttaaattacaaatagcggcgaaggggtttcatcacaattcacatcttcaacgttactccgaagaagataatggcgtcgtttctccagagactagtagatcccaggaagaatttcttagctcgtatgcatatgaagtctgtttctaatcgcctccgcagatacggtactctttctttctctcttaccctagaaaccaaaccctaattctcttctggctgattttgggaattttacgattttttaggtcttagatacgacgatctttatgatcctttgtatgatttggatattaaagaagctcttaatcgtttaccgagagagattgttgatgctcggaaccagcgtcttatgcgtgcaatggatctttctatgaaacatgaatacctcccagataatcttcaggtatgttttagtctctaagtaagtgacaacagagctaaaacggtatatagctatggagtttgtagatagagcttgcaagatttgacttaagacttgtattaggatcaagaacactctgttttcagaaacctgttttggttctgtaatataattgtaacttgataagctttgtaagatcttgtctatgaaagaagttttttttgagatagtgcttgttagttgtgagataggaagcttatgtaaatctttttttcttttccttgtctctgtaattccacaggcagtgcagactccattcaggagctacctccaagacatgttggctcttgtaagaacaaaaacagttttatctatcttgtagtgatagaagaatcatatagcaaagttctaacacacgacacttcatgtgcaggtgaagcgggagagagctgagagagaggctttgggagctttacctctctaccaaagaaccattccttaagcatgttagtctctcttgtgcttatagtagggtcactgttttagtactctttaggcttcaataccgcacaatttgcttttgtatggttatgcatggatatgtgaaccttatgtataagattttatgagattgaattggatgtgtaatgtaagcttgattgagctattacagaaatatgagtaaaatatcccacaccggtaggaggagagtaaatcatgctacataaagacataaaggcacacaaacccttaagctagcttttggaaatgttttcacagttcctcataggagctctgaagagaggcgtgtaacctctgaaccacaatcctttataacccttagtttgtcctctcaaatatgggctatagcattcaaattatctagcacttgttgcatggatggtctttccttgggatctctttcaaggcagttttatgagcttgcacatacgcatcccctcttcaacacgatagctattctctaaatctggatcgatcatttccacaatgttttcttttctattctctgttgcttcctctgctaagatgatgcacgggtttcccaaaccagttaagatctcaaatagtataacaccgaagctgtatacatcgcccgccatgtgtgatctccctgtatatgcgtattaccgtgcaatcagttttaggttagtgtatgaattttaatggtcattctgtagcttgagagaggacttacctgagaatatgtattcaggaggttcgtagtaaattctaagaaatgcgctcaatacaattttctagcttgcttactcctataaatgtaacgctctaagcttccgtttggaaagtattcagaaacaatgaacaacaattatcatccgaaccgtaaccaatgagcttgaccaagcttggatgcaggttatgtcgtagaaactctaggtcaacctacaaacctcggctgccgtgttaagcatacatatatgagtgatcagtctctctcgtagaggttaatttcttacaaatcacttttgcaaggcttcttcataggttaagtaaaatctcttaacggcgatggccatgccaacaccttccttagatggagataacgtcttgggattgatgtgtctcctcacacagattcatatatacctggaattgttgcaagttgttcggttagaaaacagtttcccatgcctataagatccgctttcttgacagttaaacagagtttgaggaagaagatgattcaccttacttatctagatctactccaccgggcttcaaggttctggagtaagccattgagtatatggacgtctcaagtcaatgtgttaaaatgtcaacgcgttggaaaatgtcaacaagggaaccaccaacttttgtagtttatagttatagttttaaacctatgacgtggagcacaatattcaagtttgtagtttaaattgatcttgcaagattgaacataagacttgtataaggatcaagaatcgtctgtgtttaaagagcccttttgtgaacaaccttacataattagctttttcccatagccaattttgaatttttttttttgtcgtagccaattttgatttaatatacacaaatattcatattcatattcatatctttttttttcgtagggttcatattcatatcttgtgctaataatgatcaaagaataatagtttatataattttatgaatttgtagtcttgtagcatgaacttttctctgtcttgtagtgttagggggcttattgcaaagttcttacacgatacttcatatgcaggtgaagcgggagaggcttcgggagcattacctttctaccaaagaaacattccttaagcatgttagtctcttgtactatataactaaagcccacttaaccaaacattccttatggctctttaggctccaatctaccacacaattttaccttttatggttatgtacggttcacttaaacactgaacttatacataagattgatgtgtaatgtaaacttgatcattaagttagatgttaatgtttacacaattcctcaaagatgccacttttaaacattttttacatgaatcatatatatacaacgatgctttgcacggtctagtgaataagtgtcgaggtagataagaatgagataaggtatttaaagtatttaatagagtggtgtcagtagagagaacgatatggatttgtatttgaagacatttccatgtgagtcacattagcacaggagggtcctttgcctaaattcattaatgaattacttaacagaaataaaatgacaatgttcaattaaatgtgagtagacttactcctattcttttctctcacttgccaaatgccaaattgccaataattatttattactgatgattattaaaaaaaatatttttctttttgcggagatttattaaatattgcatgattttaaaaaatagttatagcctagcttccaaaaagccaaatttatgtagctaaatgttaaaacaatagtatatggccacacttccaccaatcagtcttactatcatttgtctcttatgcggttttgaaaggattttggtgcttctaatttcgaatttagagggacaaactaaaattacgcaatatttgaaaagtaagaattattgctattaaaaaatcttgatacgattcaaaaaaaattatataaaaaatacggtttttaattatttaaattttcagcatctttacacaaaaaagaaaagaattcattctcatgttcaaaactatctattttgttaactttgtttttgaattatgcaattttaaatatatttcctaataatactagggatgtttgatcttaaaataaaaacaatttggtcttagtcatcaaattttaattttttttgggtttttttttgccgtctatatttattatttattgcaaattatgagaactgtttcatatacaattctacccagaacaatttttacgactcttattagatctacgagagatgatatctccttcttcttctccatgcttttgatagacatattcaatgatcctctttacgtagaatcttgacgaacggctataattgtacatcgttggagatctcatgtacatttacctccattaatctgcaaatttgttaataaatcttagtatctgggactcgaacctcaaattttttggtataaaaacattaataaacctttcgtcaatcaaagggatttccaaaatcacgcaatatccctacctaaactggaaactccgacccaaaatcaaacaaaaatttgaattcaacatccctacctaatactacgtatattatatgaatacaacgtacctcaaatagtattttgtctttaccaatataaattatataattataacggacctactaatatatatacaaaaaaaggttatcgatatctcttctctgtacaagagatcgagtcatgaggaaatgggcccgtaaaagagtaaaagaaatgtacaatgaagaggagacaaagcatgatcctgccttttgctttgatctcttcttttttgtatgggttccactacgttcgttacccatgccccacccacgttttcgacggttcctcgtctttttttggttcttctctcactcttattatacacttgtttatcttttttagattcaacattttaaatagtgattgttgtttgttcgaacttgggtcttataagtcctaatcaacatttaattggatccattagaaacagttctttcattggagctacgtgttacgtttttctgatatatgataaatattacaaataagactagccattttagattttcaaccgtaagtatgtgtagaaatacacggttttaaatttataatcaacaaggtagtagaaaagatagatagtccacactagatatgagtaaaatatatacatcaagtcatattatataaggtgggaactatttgtggttttattataatcgttagaacgatatctcgaatttatttagctcaaaaacaaatatcactagaaaactactacatcaaaatcaataccatttcttacaaaacaatatggcatattgatagaagaatgtacaaatcttcgatgccataaacagtcgcatcagaacagttgcatgaccgtgaccatgcgaagtagtgtacatcctcatcctcacgttcgaatgaacgttctcgtaaatcgttcctacaacacatatccctaaagagagagcaacacatcctgtttgtttaatgattcggccactaaaataaacgtgtagttaagaccaaaaacgtaaagcacacctgattagaatattgatctctaagagtaaagaacgcatatattggtggttttggcggagctaaattccaaaaaccgaacataagacaggtagttagaaatgattttagagtatttgtttttaaaaatgaaatcctttagaaaatgcaatttcttgggacgataagaatgagaagaagacacgattctgaatttttctgaggccaacttcatggccgactttggaaaccgcattcttagccactgaacggcgcccttaataccatagactattctcaattttgttattaaaaatacagccaagaaacaaaccaaaaaagagcacgaagaagacaaaagacttaaaaaaaagtttcaaaaggaagagatttgtgggtgtaacacatgccacgataaacgattctcctagtaatagtatctgtccaccgatgatctaaacgaccaatttggcatttcccagttactatcataattaatcatatttgtcacgtagattcagatgtaagattactaaaaaacatctcaattattttcacaatcttagacttaagtgtttatagcatgtggataagggatcatgatcataagtttatagttatgtttagtgttttgtttttggtagttttagtttcaggcggttttgaaacactttttccgatccgacctatactcattttattttttttgttttatttacaatttaatttacagattagacattaacacatattttcaatttctcaaaattatccaaaatattcatatcttaaagatgtgaaaatttatcagaattagtgaattcgaagtgtaatttagacgatttaaactatccgaatccgatcaaaactatacgattaaaactatccgaatccgagccaaaacggtatttagtaaatttaatattttattccgtatatttctagcaatatatttaaatactcctgcccattacctgtttatacgcaattacctctaatcatctacaaacctgtcccaattggacacttctggcttccccagtcacagcctaaacagagcttgactcaataaacagcaaatataattgcatcaaaacaatactttttttttacaaattttttattccggaagtaaccccaaatggtcaataaggttccaaatctctgaaaaggaatgaggtcacaaccccacgtgggataccaactagccacagtggcacacactcgtaatatatagaaacctccaaggtcattttcatagttctatccccttataagcaatagccacaactctctttgctaattacattttacactcatctcgttctctcttccgtcaatatggaaggcgtcaccgtcgtgtctttcttccttcttttcatcgccaccgccatggccgccaagtccaccgtctccttccgtgacggtaactctatttacacatatacatacacatacattcattacatattccggtttactacattaataacaaagttctgatttatcactttcaagtctgaaaattggaattggggtactatacaattcaagttttttttttccttcaaagtatattaacatacctttttttttatgttgatatatcttgaagaaaaaaagcttaaattgtacctcaaatccaattttcaacctttgtgtacagtaaattatggcaattttattttttattttcacaaatttagtgggaacaaaaactcatttcactcaaaattttatatagaagcgagaaataaaatcttataattataattgtgatatgaataatcaatataatgctggtacctaaaaaaaagtttctgaatggttatgaatcataactttgttggtatcactagtacgaacctgcctctgctagcgatagtacttaaaaacaaataaaaatattcgttttgttacgctttaaaatttagattttttaagaagacgatgtaataaaaattacagcttcctttgcccatgtttctgacacaaacacaacaccataaagtttttggacatttccaatcaatgaagttgagagtaggtcctttagttcatgttacatttaggaccagtttaggctgtcttcggacacacctcacgtgctctatgtatatctttttcttttaaaaaaattccaaaattcctaatattcacaaggacattttgataatatccacaggcatgttaccaaacggagacttcgagctaggaccaaaaccatcagacatgaaaggaacagaaatactaaacaaactagcaataccaaactgggaagtcacaggattcgtcgaatacattaaatcaggacataaacaaggagacatgcttctcgttgttcccgccggtaaattcgctgtaagacttgggaacgaagcatcgatcaaacaaagacttaaagtggttaaaggaatgtattactcactcacttttagtgctgctagaacttgtgcacaagacgagagacttaacatatctgtagcacctgactccggtgtgattccgattcagacggtttatagtagtagtggttgggatttatatgcttgggcgtttcaagctgagagtgatgttgctgaagttgtgattcataatcctggtgttgaggaagatccagcttgtggtccacttattgatggtgttgctatgagatctctttaccctcctagaccaactaatagtaagtcattactataaatactctgtttcttgctctgtttttataatccttgaacatgtgaataatgatgattttcttttatgtttgatttggcagagaacattttgaaaaacggaggatttgaagaaggtccattagtattacccggctcgacaactggagttttgatcccaccgtttatagaagacgaccactctcctttacctggatggatggtggagtctctcaaagctgtcaagtacgtagacgttgaacatttctcagtcccacagggtcgcagagctattgagcttgtagcgggtaaagagagtgccatcgctcaagtggttcggactgtcattgggaagacttacgtgctgtcttttgcggttggagacgccaacaatgcttgcaaaggatcaatggtggttgaggcttttgcaggaaaagatacacttaaggtcccttacgagtcgaaaggcacaggagggtttaaacgagcttctattcgatttgtggcggtttcgacccgatcaagaattatgttctacagcactttctatgccatgaggagcgatgatttctcgtcattgtgtgggcctgtgatcgatgatgtcaagcttataagcgttcgtaaaccatagatgaatcaccaatcctattacaagaaaatgcatcgtgtggtcttcttttattttccttaaactgtctttggtgtgtgttggattttattgaaacgagaaggtgaaaaaaacagagttttatttacgagagttagggttttatataggcagatgggcctttgcttatattgtattttcttgtatgagaaggcaaaagaaacgttgcctatatcttatgtatctaggccttttaatttttatggaagagttacaaaacttacaataaagttgtatgcatattttacttctcacgagcatataagactgaatcacaatcgagcatttccaatgaagtaacagaagcataagaaatttagcatttaagttttgttaaagcaacataagggtcacatataaacattacaatagtaagtttggtaaacacgaatgttaaagaaaagagactagagaggactcatctcatgttttattgatgaagtgcactctaacagcagtaaccagttctccagagcgttcaagttcacaaaccatagagtctccggttttcagattgtactttcgacataggtccacccagccattgaaacaaggggcactgccaccgccatagatcttagtggagccatttattttatctccgggaagaaggtaatgcatgggggacaaatggggaccaaacttcaagccatacttcttaatcactgttttgggcacatactagttgcacattgtacatgagaaatagagagaaagataagtcttagatttagaggcaacaaacgtaaactagaatcaaaactgatgaaaacactgctcttattaccaaaacgtcattcccttttgtcagcgttttcacaaagtaagggtttttggggtttagaaggtacagctcagggtttttgatatcagcacaaccatgtgtctctcgccaattgtctgaaaattctgccaaaacagaaacaaaaagaagcaaactttggcattgagagaaaagaaaagagtagtattgagtatgaagagcatcaaaacgattctttcattctgaatatagccataccagaagcagaagcagaggcagaggcagtggttgtctccttgtgagaattttttggtgtagtaggatgaaatggttcagtttcaggttcaacttcaggaggtgcatcgatgatctcgttcccatcattcttaaagatttgcacttcaagaaacatcttgtcatcgtgtctgaagaacacgttatcatttgggcctaaatggttgtcatccacaaactcatcccaatcttcttctatcataaacagatctttttcttctcgctccagccagagttgccaagaattgccccaacgaacactgaacacaactctgtgctcaaaagccccgggcgtgcttttcacaaactcttccggaaaactcctcttcataaagacagaaatcataacagttgacaacaacaaacgatactgacattagaagaaggaaacatgagactaaaagctaaaatacaatcagcagaacacgagcttgtcaagcagaacaagaagcaggaatcattgtgccattaaaatctcctcaaatgtttcttgaaagatcaaaagctttttcgaacaagaacaacaaacgaacaatagatctttagagcaaacaaagaagttcaatggaaataacagtgagtacaaaatcaaaggagctacattttcgaaagattagaaaagaagagagactaattttgttttaccatggatttagatttccagttttgtcctggagacagagacttccaaaagcaaggcttgctcacatttccttgtatcttatcagtagcattcctaggcaacatcttgttctcttcaaaagctggatggattcggcaaaattagggttcataaacaaagacgaagatgacttgcatgtaatgaaatcagtgaaacagtaaaactggataaaaattaaacctttaatgcgttatctcgcttttcttactttcagtagctaaacccgaaagtgttacaaagcagagaacacgaaaatggtgactaatgagagacacagagaaaaacgaagaaagaagcaaaatttgtacggtcaaaggggaaaaaaacttaggtcagaagtcagaacaaagtaaatgcgtaaaaggcaagtaattgcgtcaaaagtaacgtcgccggagcatgaaattcacgcaccgtcgcagtcgaagaagcttcctctcgctgctgtgtctgctcttctcagcccttgttctccaaatcgaatctctctgctttcagaaagagaggagactcaacagtcaacagcactgtgacaagtgtcaaatgtgtactgtgtatggaaataataaaatggtcaaacaatattattgggccggatatggcccatattagaaactggcccatcatactctagaatcgattcgattgcaagtgaattgacaagtttgttaaactaacacataattgacacatttagcattgttacagaaagttgtaaataacatattgttgttactagagaggattggtctagtctttcttgacgaaatgcactcttacagcggtaaccacaccaccggagcgttcaagttcacaaaccacggagtctccgatattcagattgtgcctccgacatagaaccgaccagccactgaaacaaggtttcccgttatagattctattctcgccttcctcttttttctccccgggaagaagataggtaatggtggacttaacgggaccaaacttcaagcgatagctctgaaccaccggtcggctcacatacttgcacatacagcaggaaacaaagacaagctttagctttctaggccacaaatggaataaaaagctgacaatgtaaacacttgtattattaccagaacgtcgttcctttttgtcaccgcttgcacaaagtaagggttttcaggattcaagaggtatcgctcagggtttttgacatcactagaacgttgttttcctcggccatttgtccctccatttgctgagaattc

SEQ ID NO: 744 - DNA, 94362 bp, Arabidopsis thaliana
gaattccacaacagacctgaaagaggctgcaatagttgtcataagaatcaatcctctgcttcaacgtcggagacaacctcgcatacaaatgtcgaaaccacatctcacggtacagaagacagaacacatggtcgttgtctacgtaaggagcaatcgcttccacacttggccacggcgtgtccttgaacagacgctccgatatgctctggaacgatgtctcacacatctggtggatctcgtacacgttcttatcccttatgtgtctgtacatgtgtgacacgaacgacttcaccgaatccggcaccatatttgggtcgtacccactctccctctcccccggaccttcctcatactcattgctgctcgccattctcgccggatcaattcttagcggccgcaacaatgttagctcttaactcactaccaccgcctagggtttccttattaccaccggttctatcatccggtttcgtttccttattaccaccggttctatcatccggttatgtttttttataaagtcattttaataaaactttctatggttcggaaaaaaaaaacttcacataatcatcgctattctctctctctctctctctctctctctctctcgctctcatatttgcaggtaaagcttcgttgattcgtcctctttatgttcaattatagtttcgcatccctcctatgtctttctttctagatcttaaagcagagtcattgcttaaccctaattatcactgttcttgtataaaacacttttcacctaatcattgagattgttacgggatctgataattgcgtctgtgaattacaagaaattagggtttatttcttcttgattttagattgatctttttgcagttgacaattcgttctctttgggaaattagagatgcaggtaaattgcttaattttttttttgttttgttgcaaattctctgtgtatgtttatgatttgatttgatttgattgatgtaataggcatcaagagcgcgactgtttaaagaatacaaagaggtacagcgagagaaagtagcagatcctgatattcaattgatctgtgacgataccaacatattcaaatggaccgctcttatcaaaggaccttcggagactccttacgaaggcggtgtttttcagcttgctttttctgttcctgaaccttatcctttgcaacctcctcaagttcgattcttgaccaagatattccatcctaatgttcatttcaaggtttgcatctctttttataacaaccttctcctgtgataaaaggaaacgcaggttttttagttagtacttgggaattttgtagacaggagaaatatgtctcgacattttgaagaatgcttggagtcctgcttggacgcttcagtctgtgtgtagagctatcatagcattgatggctcatcctgagccggacagtcctcttaactgcgactcaggtacaaaatgctagtttagtgttttcaaaaatgtaaccatgggcgttcgggtattcggtttggttcccgttcggttctagttcggttccgattctttctgttctcgattttaggatccatataggaaccgaaacagtttcagttcggttcaggttcgggttcggttctgaagtttaggatccattagaatattttatttcgaatatttcagatattttttgtctttttttccggatattttggtgtttttatatatttttccttatttgggtatttttgattattcaaactaaaaataactaatatctttggatatataatcatatttcggatacgcaaaatattttggttcggttcgggttcagttctaattactttggttctagaatttaggatctatttgagtagtttaccatttcgggtcggattcgggttgcttcagttcggattcggttctttcagtttgattattatgcccatgcctagtttttatagtaagcaactgttttttttttctactgacgcttttgttgtggttgctatggaaaaaagggaatcttctaagatctggtgatgtgagagggttcaattcaatggcacaaatgtatacacgcctcgccgctatgcctaagaaaggatgatgatgatgatgatcctcttgctttttttttgtttttttttttgaaatttgtaatgatattgatttgcgagagtgaatacattattaacgagaagaagatgattcttctttattagttcacaatattacaatctgtcaagttgtcatatcttcttgtttaaggaatttgtcaaaccagtctgatgattctttgatcatgaaactcgtcgcttcgtgtccaactccatcttctgctttgaactgctctctcgaaacatcaaaagtttttctttttcaattctctatctggttgcaatagtgtttaaaggttagatcagtgatttaccttgaagtttccaggagaagctgtttccttatacgccttttcagctctctttaacgcaagttctagtccgccaagaggacatcgaggatcatttgcgcctgcatatgaaatccgagaaaacttgtaagtttgttggtagttagtgagatcatacatatatattgattgtgctcaccgttaaggatgtaaagaggccgtggagcaatcactggtaatgagtacggtgaatcaaacttcgaagctaggccaggagctattctgttccacaccttctcgactagttctttgtcgattatgttctttccgagatcaatccttgcttctggaaccatagaagaagaaaaaaagcaaaggaattaattataatcctcatacttattatattgaatcatattttttgtatgtttttcaaaatctgaccttcaaataaaggtttgatactgttgactcttgcttcccactcatcattctctattgcccatctaaaaccctgcaacatacaaaacattgacaagttttttgaattacgaaaccatcctcatactcactcatacaaggaagaataggcctcatagttgctgctatcttgttaagcacctgaacaccgattaatgggacaaccacggaatagcgagtgtcagctgcagcagcaaaccaagcatgcatccctgtaatatgctttaacaatgaacaaaattagtatatataattactcttaatacaaatcttgctactcaatttgttgtataactgacctcctagcgaaataccggtgattcctatctttttcgggtctatatcatccctctgagtaagatattcagctagtttgatcaaatcccatacctgagaaagacaacgataagatgtgttaacactctaaagtgtaaccagaaaatgaaagctaaaaagagacaaatgtttatacagtatcaaagataaaaggcatagtgtttccatttctccaagatgatataagagcctgcatcgaaattttacaccaaagagaaaaaaaaaaaaacatatcagaactcaaaagactagaagaaccattagataaacgaagattcgtaacaacgatattacatctcgatatgcagttttgcaatcagcacgttcaccgtggtaacgagagtctaaaccgatggctacatatccccgcgaagcatatgcctaagtgaaaaaaaaaacacaaagtataatcaacagtactatgttgattaaagaagaaatcaaaagttatgaaattgtggtggttgttttacttcaagccatggccttaaccattctttgtttgtgtttgtgccatgcataaacacaatcgctggccttttttcttcacttctctctttcaagcttaaaataagcaaaggtaatttcccttgctctgaatccttaaaccattacatagaaaacagtttataacacatacaaaaataatcagaaatttgttgaatatatcttttttaacaaaatgttacctcagtgtgcaaatgaatgttttcttctttaagcatatcttttaacttaccaatgttttcttttggacaagactctattgcctgtgtttcgtaatgaatcgttcacttttgtacgaaaaaaaatgtttgtagaaaaaagagagatatctgatcttactgtggtagaaggaacatcagcttgaaagagaggattctcgataggatttgaagaatcggctattaatggaactggagattaagattaagagattaatcaatttaaaatctgtgattaagagatggggaaattaaaatgaaaaaatagttaatttaaacaaaaattgattattaaccttggggtgatcgtcgactatgaagaagacgaagaaactgcaatctaaacatttggggttgagtaatcggcgattccatatctccggtggtgatcggtgggagaacaagattctgtgttctgttttttcttttgttacgaaatttatgtcaacggcatgcaatttcacaattatctacatgactcttaatgacgtgttttagttagctttaaatacctttttgttttctttaatgttatctttaataaaaacactttttatatttgtcgtcacatattttgttttctattgcatttggttagatactttttaaaaaaatttcgataagttaaatgaaattgaaaaaaaatcaaatcacatgccttgcaccaactggtattggagagggaacattgtttccttgagttatatgtgaaatctggacaagaagaaacaagaaaatatttaacaatcgacagctacaaacttgagaagctctcctccaagtcatcatcattcagtgccgtgtgaatggaaaatctgcacgaggaagaacaaacaaagagtcaacaccttcatcttggttatcaattggactagacacgataagatgaaaaataccgatgcggtttttggttggatctatcgaacagagatggttgtgagaggaaggatctttcgcagcagaccgcctctaagaaattatgtttcagaaaccaagaaaaaaaggacaaggttctaaatcacatgtcctttttcatacttaaatgatgacaatgaaaagtctctttcagcttttaagatgatgaaaaaatgaaaagtttatcattgactcggatgtagacaaggtttctgcaatacttgtgcatttgctctgtttgataagtcaacattttcgttttttttgccaatcatgcttgatgcttccattcttttggataggtttattctatagagtggaactgaccaatgtctcatattggtaccgaatctacatggactctctattcttcttgaatcagcattaccgttgaaatatattgcgctctctcattgcttctgtgtttttggcttctttaatatatacataggtgaaaggtctactaactatcagaactttctttattgattccaataagattaatgaggccaaatattgaactagggaattgtagggctttaccccgaagggagcccttccagaaattctcgaaggccctagacaagcttaggcctaggagggggtttggaaatagttttcaaccagcaatagacgcgcctcggttaagacctcattagctgcgtcattgccccaagcgcaaagatacttttcaagggaccaaatcctctttgctttatagtcacacaatacccatcatcttgatacttacttccgatgtgggactctatatacccaaagacaaatatcaaaaggttgtcaaaattttcaattagtgatcaacaagacaactagtttgttattataggaagatatgaagattaagactaatgatggtaggggctgcgcgaacgcaaaccccctctgccacaaataatgacgcaggctcttcctcatgggaagaccttaagcatagcaccccagcgttatgtgcaatgcggtcactagcctaggccactcgtcttattgatcacgagttgaccccgtccaggtaagtaatttgctctaaccagccacttctctatttatactcctgtagtacccagtcattgtttctagtctagcgatgtgggataattatcacttacacacatcctaccgtttaatggtactgctatccaacaacgcgctgttctcttacacatgagtttgataagattagtcagtgaaccaaatgttattcaaagccaaatgacgattaataaattctcatttccatcatgtatttaaagttcctttggatttctttatattggaagatttgtgtgtggaatgagttttgatcgcaagatttgtctagtattaagaatcttaacccttcaagtgtaattacgaaaacttaaataatgaaaacaatatccaaaggaaacaaaatttctcttcgaagtgtggagaacgcgatatctaagagatcgaagactaagagagggtaacaaaagagaccgagaaacttacatcaactcttgaacaatttcctcagtaacatcaataagatcctcaaactcaacttctttggcttcatactcatcttcttccacatcactaacttcaccatcccgaagattttgcctcacgagtttctcctcttcatgcagagacttccactgcatcacccatttctgccactcttcattcaatgccctcctcttctctctgtcttgttcactcaatagcaacgacacgtcctgatcctctgcctcatacctcttgctgtaattcctcaggttctttgctatctcttcttccttctccgcagtcaagaatgatgccggtcttggacgccaagccaactgtgtaaccaaccatacacaaatattttattagacatctgaaaatggatgatgctagtttgagaccgagttttttattgttacatacctggaagaaatgatccttcagtatccggtaaaccatattcccattgaaagaccatatggtgaacccattctccatctcgtggactgttgtcactgaggttgcaacgtacctttgaaaataaaaaaaaagtgcaaacaacatcagcaattggtgaaacaaagagaaaccaaccaatggactggtttggttttaagacattagtaccttccagttgggtcccattcgatatctgtggccatgaagtgttcagctgtggccattgtctcgagctcatccacgttgaaaaattcaagctggccattgaaaccttttaacccagcaagaatgatgtacttgcctgtgggcgaccagaagagggcattggcttgtttggccttcaaagttgcgagctttgaaactcttccagtgttttgtgcagtcttcatcgagtagaaactaacatccggtcttggctggtcaccatgaatcacagcaaacctgtgacccttgggctcccacgcgaaagcaatgatcttatcgttcttgttatccagctcaagaacctcgattggaatatccctttctttgatacggaaaagctcaaatccagagtatgtactcttcttagtttttgtgtatcgatcaaccttaacagcaagatactctccactactctgccagtacatcttgcagtcgctcacactgaagagattcttctgcctcagctctaccttactcgggatttggactagagcaacctgaagaatgggatatcaacatgtaaatacaaaacaactggcagagaaacggaagattattgaggtatcagggcttttcatttacataagaaataaaagaaacataccttggctggttggtttccaccaccttgttcaggaacaaacaatgaaaggattgaatcagtgggagaccagcaaatatccacaacattatcaaccttcatggatttcttgtctattaggctgaaagtctcagtctcatagacagagatagtgtttttgctcagcttggcaaagtatttatcatcttttccgccagcccatctgaaaaaagttggcaagatatcaacaaatttgcataatagtggaatagaggagagaaattgactattatttttagtacattgacatgcggttgaagaaattacctgaaaacaggccaagaggcaccagcaacaccaccaggtcctccaattgaaaactcatcagcactacccttgaaatctctcatcatcctcccggttctcacatcaaagaccttaatctctactttctgaaattttgacaaatatcagaattctttgcatagaaatgttatacgaataaaagttggaaagaacagaggcaaagatgaactcacacttgcatctctcggattgcttggttcttggctatggtaagttacaagatatttctcaccaggcgagaaatcaactagtttgacctaaaacggaatcaacaaaagaagtcaattttcagaccaacacaggaaaaacggaagtactatgtagcaattgaaaggaatttcaaaccattgaatgctgataacgcatgagacgcgtaaatgtatcagcaccaccccaaacagctgccccctgcttgtgaagtgtcacaaggtatgtacctattggagaccactgcacataactctctgtccaatactgcataggaagacaacatcattaattcagatgatggtaacataaacatataacattgctctaaactgacacagatgtaacttacagaacgcttatgaacaggttcaggcttcttctgcctagcatcattccagtaaacttcagtatcatggccaaaacgaatgactagctggtcccgggctttgtcatcagtaagccacttctgcaaattttcctgaaaaacaaacaccatataagtatcaagaccaagcacctcaaaaggctgcattgaataaaaaagaataaacatttaacaagactgatgaaattattatttattggttactatacatcaaatacgtaaacagatcctaacactaattcagctggtaaacacataaatcactgaaatcattcagagaacaaccaatatcaagaagtacacaggcgcagtggaacttattcaaaaacatataatggtgtcgctgaaagagtaatatgaagaaaactaaacttaccccagggacatagggcctttcttgaggaggctcccactcctccttcacattcatcaacctatcgaaatcatcgaacatattaacagcaaatatgtgagacttgtccaacttgtagccatgagacttttccttagcgttttgtgcttcctaaaaacagcacagacattgagacaaactcttagaaaatacacttaccattgaaaacaatctagttctgtgcctacacaattgcttaagcaaaactaactaaacagagagattaagctttaagctgcgagtagataaacaacctgaggagtgttgaactcaataaaacagtagcccaatgtcatcttagtatcgggatcaacgggcatcaacagtccattttccttaatcacacctaactggttgtaaattttcttaacaacaccttctagtttctcaaacttctccttgggaacaacagggaggtgatcgacaacgataatgttaccgaatccagtgtcgaattctgactggtcatcttggtaaacactttcatcatcactacccaatcaccacagaaacaaatcaacgcaatcagttcaaaatactaagcgatttctcagatttgaaacgaagattctaatagaagcagagatgtaatggaaaaaatctcacctttcgatcccaaagtcgtttccaggaggaagttggattgaatcgagattaacatctgaccaattaatccctaactgagctgttaggacatcaatatcaacaaccgccgccatgatttcgaatcttagaacgaagtttctctcaatcgatatcgaggaagaagaagctttgaggatagagagagagagagagtgtgtgcctagggttttgagttttgtttgcagtgttaagtcttaaaccgttgattgatgaagaagacagaatatttttctcggacgggtcgggtcgggtcatgtaatttgattggacctttattattccaaagcccattatcaactaaacaacgatgcaaagcccattatcttcgattctctgttttgcgatatagtagtgacaattttcactcataaacttcaaaccatttttaaattttaattatgtctaatcttcctaattatttttttaaaatgtgacatggatcatatgttaaaaatgagtatgatcctaaaaaaaaaatcaaaaaaattccctaagcaatgtccctaatttgagtctcgatggctttgttcttcatcttctggtttctttcaacttggatttgtgttgcttttgatatttttacctgcttaaaataatgtcttaaattagcacaatcctctacttgtaaatatctgaacaaggatacgatatcaaggttaccatttatcctcgcacggtttgagagctgaatgagatagtccctgaagattgacaatatctgtctttcttgctctaagtaaatccccgagcttgtgtctgtgtcttctttctcttggcttgttttcactcgggccgatgtctctttctctgacccgatctcatgttcttcgtcacacatcaatgcacgtgttgcgggagatataggcttctcgtccattctattagcatcaaggacacaatctggtgagtcattgatctcattagcaactctttgggctccatcaagtgaagaagggcctttgtcgttcttcctccctttgtctgtttcaccataacaaacattctcttatcaaagaccttattatatgaggaacgttaacctatcatcttgtacatctaacggcatgatatgtacctgacaatttatttgctacatcaaccgagtttgagaccaaaagtgaacatagctctctgacatgatgtggttggaatgtatttgaccaagaagacctatagaagccattagtcaggtatcacggtagtttcaaataggcaatatcatagagaagatgagtttgatatttccaacctgtaagcacttgtggtagatccggacacggccttgttgttagggagtgaaaatagagaattttcaccatttcttctaacgtggtttgcctaattggaaatagaaaaacacaaagaattatgctttcaatgcaaaaactgaagctaaagaccatgagatcaacacagaattgtactatttaccctctggtattggacaccgtatgatgaaactacagaatctgaaatgtccttgctctttctctttcttgattcaggagggtacagataagcagacatgtcgatggcacggttaacagccgcattggtcatctgttgtatgtaggtatccgagacctgagatccatgaagaagagcttttctttcttcgcttccttcaaagttcttgcagtcttgacatctacaattctccgaacatagaatattcgcctggtaacactcacagtacttcttgagacatcctgatttcctgcagtggcatcctttgctgtgctttccaataagcaacacttgctgcacattctcctacaagttataaaactaccatcaagccctaaagttacatcttttttttttcaagtaacaagatcacaaacctgcaaatctttcattccatgaggactaccagcaatcttgggcttaaacgcatcagggttacgctctaagatccccgagatagctacttgtctcgaagactcattctccaatttgttgtgacaattcacacagttacaaccattacaataagatccagaagcaaagcattcacaatacctatatagatcaacaagactctgtataaacaaaaatatgtttttaaactctattaacaaaaatagatacttacagtttcaaacactttgagtttttgcaattgcaatgtttttgttgtttatttggagtattctctttcgattcaacttcattatgtcttcgtgaggtcgatggatcttgattgctacataatcaaacaatcaaaaatgctaattccttaagattgaaatagatttgatggaacagagaaattaaccaatttttacctcactcgattcttctgaacttggttgtgaccaaattggtgaagcggtggtttctgaggcggtgtgacttccgtttctgattgttgagaagatttcaccggagaacacggcggaggttctagcgacttttgaaacgaatccatcttctccgcagggatggagatatctgattgacgcgggaggagattctgattactcaaatcttccatagtgaagaactatataaggagcagagattgttttatgctttaagcttgaatagctctctcttcttcttcttcttcttttgcttcgtcgtcgtctctttgagatctttttgaaaaatcaaaaaattgaattttgatgagagtttgatcaacaaaatctaacggttgagatgaaaaggggttaatcgacggtttagatcgtttgattaagatcgatctaggtttttagaggatacgagcggaatttggcgctaaaggagagagactccgagtgttttacacgtgcggtggtattgtttttttttttccttggtttatgataaccgaccggttaaggtttttccgaatttaaattttatatttgttttggatttattttctgtaaattcatgctggaattggccgttttttttacctttttattactgtaaacaaacttgaaatgtcaactctttttactatatgaaaatcgccattaatagatgctacaaaccaatattaccaaaaaatacaatactgaattgtgagtttcttgttgctcatatggtatacaagggaaaaaatttggctttctgtttaagtttattgcttgatacctacaaaacagagagctacttcggcttgtgcttgaagctcttcaagaaccttgacaagtttctcacggtcaaacccgatttcatcctcatctttaagcattttccgcactcttcatattgcaagaaagtaagaaaatccaatcagattccaaatccagaagagatttgaatgtctaaacacttacgatttggatagagtgctacaaacctgtgtacaatggatgtgtctccgtgtccggtgcaaactataaacatcgcatttgtaggtaatgcagcataaagggattggactctttcattcattttctttaagatttcctttgtttcaggtgagacattgcttttcttaaggccggactttttgttacatgtaagcaatgagatcatctcggctagtctggagtttagtttctgtggatcatccgctctgctctggaaatgtgcattcaattctgagaactgtgtccaaacgaattgagaccgcttgttctttacctagaagcgtacacacacatacattttacttttatgtagctggcgagaaatacagaggcataaaaatggattcagaagtttttacctccttcacggcctttgaaagtgcttcgtcgtcagacgaaactggaattgcatttgatgactcagaagcatatcgcttcacgatgttgatattgtcaattatagaagtcgttttcccgctctcatttaaaacggcgaggagcttttttcttatcacttccggtggtgaaccaaaatcaggtcctagaggaagccagaaaagaaaatcacttaaaaaaggatacatagaaaataaaaacaagagttaaatagcgaggttaaggatagaaagttcttgccatgttttatcttcaatagtgccaaatccatggctgcttttgcatcctctgcgctgtcatgtccggattcagactcctgtatctctctagcaagaaacttttttgctagaattcgaagtttagttttataagatcttccatgtggatgcttgtatagtactgcagtgtcaatcaccagattatgagagatcttcaaagacaacaagtcattttccaaggagtgtccgactaatatggtctctttgaaaaccagctttaagaactcttcctgaacatagcaaacgactctaattatactagaccattacgagtcttcatttcaaacatcctaatcagtatctaataagacgttataaaggaaatagtgaaacctgaatatctttaagtgttgttgtaactccctccatcatcacagctgttattccactatatctgcaaaccgataccaatactgtgttttttaggcatataccttttaagaggtactagaaacagaataaaaaattattagcatggcttaccttgtgttgtaatcagtaataggatttgttggcatgactaatttatctaatagaacctgcacaaccatgaaaaattggtaagataaatgacgaaatcaaacatacttaaagaagtaagaaagaagatacctgtccttggatatccaccagcgtcactctcgtcaactccaaaccctcctttgtaatacactaagggtgaaaaaaaaggaaagaagtaaaactctataaaatatttggctgttgctttatacataattgttataagatatattaaatgattatatcacaaagcatcatcatgaaaggctagaaaacatagttgtttaccatctcgcaatcaagagccacgatttcggggggacatgatcctgatggtgcaggaagtgtaggtgtcaactctgcataaccaaaggaaacttatcaaaggatgttacacaaatgtaaaaagttaacagcacaatcaggattaagctgttaatcttaaatgaatggagctcgtaccgagtttttcaaaagtgtaaccattttgttccatttccttttgacttagagtgtagtaactaacagggaatggtatatctttcgtgagctcaacgaacgatttccccatcagattgcatgcttctacaagcgaaagatatcatctagttaatggcttaaattgagagaagatttataaaacctgacactgaaacctcggaagaatcatcgggtgaaatctactacctgggctagatacaaggggaggtggttccactgaactagtaacagttttcttttttctacccttgcaagtaaggattgtatcgattgtcctcatctcatcaactacacagctaacataagaataaaatcaaaagatagtttttaccaacaatcaaccaaataattgtattcagctacaagtaaagagaagcaccaaaacttacaccaacctcaaagctaaaagcgccataggattgccacaacatgatttcaaactagacagagttttagaatgtgataagtataaagctgcatccaatccaggaaggtagagcagtacaacctttggaatgagaggcttgttctacaaaaaccatacccttaaaatgtcacttaaacttggtaataacaaagaaaacgtaaagacacaacacaatcaatcttgttcataccttaataaatacccatgaaggcataaaaccttctgcaagaacccatgtcacaagtccttgaacatcctaatcaaacccataaatgcaaaatcttacatttatcattcataaacttccaaaacagaaaaagttattagaaaaaagtctcatttgcattacaaaacctacttgtaagttcaatgttgtttcagggcttttgaaatcgagttctgctttcgcctaccaataataagaagaataagactcaattcacatatcacaatattgagcactaatcaatcaaatcgtaaagaaggtgttttacttcgggtccatatatatcgaagaaactgtttccggtattgctcttatcagtaccgtcgtcacaatcttccgcggcggtttcggcgccgcgcttccgcttcgaagaagacattcttcagacggcggaaagattagtcgaaagagagtgagatggaaaaagcttccgccgccgaatatagccgtcgcgtaacaccgtcggacaaattgagggttttaacttttaagtttatgatttgagaaaaaagtacagacgaccaattcagttttggtctaattcggtataataaaaattaaatcgaggattaaacaatccgaaccggattctaaccggttagaaggagacgacaagggtttaaacccacttcgcatattaacgggcttgtatttttacaacaaaacaaaaacagtggatttcgagacttaccgtggaaacttttgacatcattctattagtagggacattttcattttcatttcaaagtgaaaaatgttaagaagaaaattgtaacttcacattgcaagcttcatggaatagtcataaggagaaagaaaaaaatacgagaaaacagttgttggcccaatttataaagtggcaatgaaatggtatcgagatcatgtgtttttttttggcatttttgattaatgtggatgcttttattgttgtttgcccaatttgtttaggattcgtgctagtgaatttgcatggacttgaagtcttgaataaggaccaaagttttggccaactataagtttcacattctgaaatctcctcgtttgatcttccaatagacatgttttcatttgcatttgagaatgaaccattttggtatcactacataaaattgaataatcggtgagtctagatcatccaaacattcaactagcaccaagttgcttttgatctagtggctttcttgaaacacaacaaaaacactaataaggaagttatgggttcaaatccacggaatgaagggtagtcacaaaagacttcgcggaaattagaaggttctgatccgaactttgcggttgtaaaaagcaattttttgataaacaagatatcaaaaatactgtaaatgtcgaattgaatataatttggaaattggaagacgcatactagagaaactttcaaatagaattagtccaaaagtgttatatatatatatatatatatattaaaaacgggtggtactgtgccatcatatcattcaaacaccgttgcaatgtcatttcaaatttaaatagtcttatcaaatgtaataatccttttatttatattgccaattctgcaataataggtgtaaatatagatgcacgaattatttcttgctaatgagaattgacggaatttatttttcccacagtcattgatcatttctactcgatctccattactagaatttcttattagagttgaccgtaattttaaaaaattatccctaagatccatgagtactcgtgttaaatttctttttatcaactttgacctcataaacattgtatatagtccaaatggtgatggtataataagtgccacataacaaatgtaatttatcccgaaaatagtcaacttgcttcatagtcattttagaggtaattaaacccgtagtagatggtttacgttgtaatacaattttacattatatacattttctatccgaaaattggaaattctgaaaatgttcatggaagctatcaagtttatttataaaattgattatagcttgagaacgtgaatttcgtaaagccgacaaaattgacaatgatattgaatatgatcctcgaacatgctaaaaacggatcgtgatactactctacatgcatgcttcttcttgtttctcttgaagagctttttctttttccatcaaccaccgcctcggctctctggtctttattccttctttctatgttctaagtcttctagttccagtgaacattctccgtaaccgatttcactaatcaaacataaactcaatataatagacattaatttcagtaatagtctttaaaaattagtacatatccttcttcttttttcatgtcaaacttaatacaagatcttaaaacatgatatatgccgtgaaacccttttatgtttcaaaactattcaaaatattgcatataacgggtttgagtcataggagactctaatcacactttaaatatagtcatgatttgatatgtataaaaagattgaatgcctgactctaatacacattataaacatttaatattgaaagattgaacgacttatataatagttagaattaatagaagtaatcatatcaaatggagatatttataaaaagaagtttggaatgcatgatatcatcttttctagaacatctatataattaaaaacctaaaagcaacaatacatagaaacggctttgaaggctgcattatttctaagttagttattctaataatcaactattacctggacgttggttacaaaaatttctaacaataaaatgtcagctttttctaacttctttgataaagctaaaaatttaatattgtcttgtcggaacaaaacatataaaattaaggttttgcacatagtatatacttttccttactatatcggactccactatccaatatctttcacaagacaataattgagagcattcttgaaatggcaagcaagaaaaaaggtaaaaattaaagttaagtttgtcaaaaaagttcattctctcttttaaaggttatacttaattttattccgagatattcgaacttattcaatagcatttttgtttactctatgcattatatatatttatttttatttttttggcgtgatgactcttactagctctaacaaaacaaaaaaagttggtgctctattatggccttttaattcttttacgaaaaatggaaatttttgtgttatatcactcgtattttacaaagaagttttcagtagatctttactttttttgtcaaagttttcaatagatatgtacgttttcttttcattttgcgatcgaatttcaatgatatatgattcatgcattatttctatcctagtgaaaacataaaaatattatggttgaatggtataatgagtaagcagctatcactaaacgataataatgagatcaagtagttattcttttgtcaaccttgacttgatattttttaaaactaaaactctagtagatgaactcaaatgtattatgtacatatttaaattttgtaactaaaatttaagcaacaatttgccacattattttgcaaattttcattaattttgttgtaactattatattttacatttctatatattacggttagaaattttggatgcttttaatagcaaaatgacatgttatatgcatgtgtatacatggaaccagaaacatattgtattaagttattacggtaaaaaaaaaacaaaagttatgacggtaataggaaaaagtttttacgttaatttattattattatatgttaatctttgattatatagaagtcatttcaatagattctgtttttatttaataagattaatggatagtgaggaattctaattacagttaatcattaaagtttttagccttttttcaacgacgaaaaagaaaagatacgtaagatcgtgaccaaaaaaaaaacaaagtgggatccattttgaaccattcattacagttattaatttatttacacatagtatcaaactaactacacttgtattacaatattacacaatattgaacttagtgctccagagaccgaagaggagattcttttgtactactattgggtcgcaaaaggaaatgcaatgagtaaaagtcattgtttgattagaatacaacaagactcgaatgcaaaataattcaagtgtttggatattttaatatatatcaactaatattaaaattcaataactggtagtggaaacaggaaaaggcaaaaacaaacaattggtcaagattaatttatgcttaatcagaagaaagttttaacctctaactctaagggggaaaacaagaaactgaaaaggaatcttcaataattttaaatcaacaacctacatagtttttatatcaatgttattaaaaacaacagtattacgtttaaattaacattaacctacattcaaaatagaaaggtacgtggcttccattggctactagtccaatttattcatttccaaagtttccacatttattaagaaaaaaaaaacacatgttatgagaagtatgtacaagtattcatatatcgagctctctcacacccacaaattgagaaaagaagattcaaagacaaataaacctaaagccgccctatacaaaataaaggggtcattaaaaagtaattattaaacacagcattactagtatatttttatgattatgacttaataattatacagtccttgaagatcccaatcttgtgataacgaggcaggaatcatttggtaatcaccttctgaccattgcggtggataaggccataagtctgcggagtcagagaatataaactcgttacctagctgagtcaaaccatcatagctcgatcccaaacttgggagctctacaatctcccctagctcctcggagccggtcgcggaggaagacacgagagactctagcgaagaagaagactgtgaagatgaaaacgttaaagaagaagaagaagaaaaagactgtgaggtctccatgtgtgcggctttgagagccgcgacctggatgtctcgagggctaagcgagctagggcgtgggaaagagccggctaggtcagggaaattgagtatagcggaggctcctttgatgctaagagcggctacgtcgtgtgcacgcgccgccatctccggggaaggaaacgttcctagccatattcgggattttttcctaggttcacgtatctcggacacccattttccccagttcctctttcggacaccccgataaaccggatgcttaccggaatctttaaccggtttcttcttctcttcttcattctcttgtctgactgcgctagcttcccagctcttggtactctctgaagctatcattggtgaagagctttataccaaaaacatcaatgccacactaaaccaatgtatttatttttttggatttcgaggtatagaaaaaaaaaagtttgaggatatgataaatgaattattttgggcaatgagtaaataatgaaggaaagtgagagacagagtttgatgggtatttgtctctacatttatcaatcacttccttatttatatgcaacaattgtttgagggtggaggtggggtgtggtaggggtaaagggagatatgggacaaatattgcactaagtctttaagtaagtaaaagaaaaaaggacccacgggctaaattgatttgatgctcttaaaagacccgtacatatttttatctatcatgacaacagcataagtccatatttgcttgtgtttagatgaccctattatcctattttttgtttactattgagagaggtggtttttttttttgggttttgtttatagctggcttttgccaatttcatgttggatacattcacttgacagaacaaattttgtgtgagatctaaatataataaatagttgtgacaacagtccacaagttttcacatttattgcaagtgattccacattttggtaacttatcctaaccctataaatacgacttgtatgtcgtatgaataataggagtatgtaacaactcaattatcaagaagtaaaaactctttataatagagtatccacaagttattataaaaagctagtataagacttgttttctttttttatcagccatacattaattaataactaattttatgattagttattcaatttgaagataaaaagtttacaaaaataacttcagaaaacaataatctaaatgtcgagctaaacaatataagatttgtttttatatattaataatgtttcgtttttatctaattatatttctaatacagttatagcatataacatcatcaaattttgaaagcatgaaaacttttttgtcaaacaaacatgaaaacgttatgatgttattaatagtaaaatatagcagaaacaaattcaatacattattcattaatcatatatgtgttattattttgttaaaaagataaaaaggtaaaaatacacatcactaaattatcaaaccatatattcagcgttttatggttgttaatcgtgtatagtacttaaagtgtttatcatgtgtcatagagattattattctgctataatacttagctaaaattgtattatttattttaagaggttattatgatttttgaaacaaaggaaaaataaggttagagctaatgtaattatgtagaagatgaggatcttatttgcaactaatcatctctcgtgtttcctaaaagcaaatttcattaaagttctcaatttataaataaataaaagtcccctttagaattcaagaatcaagaaaacatcgatataacgagataaattattttggtgtagagccgacataataatcttttattttaatacatgatcgtgactttttattagattttatgaattttcttcttcgcggagaaaatggtgtgtcaactgtttttagttattttaatgttttcatcgcaaatttactgttcaattatcccttatcgtgatctcaatgcatcatcatgcttgtcactacaaactcattatctatacatataattcgaatatattttttgtcaactataaaattcaaatacttttttttgtctagcatgtgtgtttatatatgcatacgcatatcaggttcgataaatttaagttgattcgagattgtaaagctgccaagtctaaactttcttaaggatttccgcatgcacgtttttatccaagagatccttgcatctaattatttcgacagaaataattttattatgattctttgacattattgcattgtaatgatgtagccccaaaaattgtaaataattgtagacagtgcttaagtatttatgaattttaacaatcttttcagtcgattttgatatataatatctaacgatcgaaaaatcgttagacactaaacggggtgaaatttcagaatcgaacacttagcatacctaatcaaaacgtaaatgatttttttacaatgtaaaaatttatgtcagataaaacaatttattaggtatattaacatataaaatatcatatttattataattaaagtatagtccttttgcaggatcatgcaaggtttcctcttagaaggaccatccgtattgaatttaaacaatggagttaaacgcttttttaatgtcaaacaaatttaagatttaaattccaaaaatccatgtaaaaatcatttcaataaataatttaattataaagatccatgtaaaaataattttaaaaaaataaaaaaataataataataatttcaataattatcatgctataaaaaaaatttgtatcaaattaaagaggagggttagacttcaaatcaaatattttaacttcaatagtttaggatataccccttttcagacatgtcaaatcaaatctctaaacttagttcatggcagtggttggttttgggaataattccaaatgtgacaacttattaaatttccatagttatttgtttatctctatatattttatattttattctatagaattttaatatatcttagaacaagtcttacataaatatccaaattaaagaaaaattctagggaaataaacaatttcaaattagaaaattgatgatataagacaaagttggttacaaatttggatgtgaacatatatactaattcaagtagcagcaacgaacgacgtattgcgttccttaaccgcatgttcgatatgcatacatgcattttaaattggtactaatattctattatagactaaatattgattgatatggttttggcgatcaaaattctagaatgtgttagtcgctactcatttgctggatgaccaagttgcgattaagccgagtaaacgatgactagtcgatgttattcttttatagtatttgatggttttatattatatctttgaaaattgagcataaaatcgttgaatcttataattgtaagagcaatgaatcacaatgcatgcttttgcagtgtatttaggggtcgatcgatcatacaaaacttagttgtcaaatgctaaagttggtcaaagtatataataagctgaattataacggtaggtgggtgtgagagaaaaagtctattttagatgaaaataaacaagggatataataaatgttcagattctaagaattaatgttcagattctccaagctccatactaataaatataaatggatggaaaatgatctttagctattttaggatgcgatctacggtagattctgtatatctggatgaaaagagtttaagcatccaagttttgtagctactacctacattcttgagttcgaattaggtttagctaccaacgataaaatgcagcatatttttctgtaagaaattagtttgtttgatattatttttatacatagtaatttactcttctacgatagctctatcgggtcgattttggagagtttaggagagtgattacgacaagatcatgattaatcactaaatagagatttgtactaaaggaatatttagtagttggattaattagtacactgaatagccaatatattataagttatttagtattgtgacgtgcggtttaactatttataaagtgtggtatgattttaatagtaaagaaaatatatgtatatatatatatatatatttattactatttgaattgtaccgcacggtacagttaggatttaatttggagcttaaaaatgaagtttaatggcaattgtaatagaatggttaggatgattgttagtacatatgtattagagatagcaaattagtgaacgctgaattaatgaaaatgagaaacgagagatagcaaaatctctttatcaaaaaataaactaatggaatttcttttgtttattaacattcaatttgtttatttttattactaattttagtttatagtaaaatacataaagtatttcttcaattatttcattttcagattgtggccaaaagtagtgcatctaacaaattttaataataagcaatagcaaataatatcctcttgagcatcttataccacaatcaggccggcactggcatattttagtaatgatattttaatacttgtcacttcaccataaaggaaaagggtcatgtgtaacgataataaattactaatattatataatgaatactaaacagattaatttaattgcctttaaaatgtaagcaattattttcgaatgaactagaaagatgtttataaatcaacctcaccttaaaacttaagaattctttttttatttaaatttatagaattataatgttttcatgattttttttttaaatatagctaagccccaaaaagttaatcatgcatgtctgttttgatcgaaccataattgaagcagggcacttgtttttctggtgagattaagctcttgttttatttacgaagtatgggcagggcgaagtcttatgtttcggcgctaaaagtagtatctacttcaaactcgattttcttttactattagatgatcttataagtaaaagcatcaaaaacatataaacttagaggtgatattaaaatttgattatctcaactgtttacattaatacagattgttgtcttgctgatataccttgaatctggtataatacagtataaatattgcacattaaaagttgaagcaaaaaaataaacctgaaattacggtctatatagaaaaccaacctcggtgtttttatatgaacctattttctaaaaatactcttctttactctatttttttattgtattcgggaattatgtatcacgcttctaataataaatcgatttcattaccaatgaaaggaaccaaccaacttcgttgggtgaactacgtaaatttatgtttttgcgttagattttcgatctatctactcacattttctgttcagtttgcgcgaatttaacatatatgtatatggaaattgtatgaacaattaagcggtaatgtcttgtctagacatcattatttaacaaaggtctcatggatattgacatgttttagtatgaaagatgcagcctccaaaaaatgttcgaatgcgatgtcaaatacacactttgacattccctattttcatttttaagatttcatcttaaaatgcaaaataaagtggtgtaactgatcagtactaaaatagttgtatttcattaattttcattgttcatttgtgatttaaagtagttagtttctgtttaagttctaaatcatgtcttaaaagattgtcattcttttaagtgaggctacagattggattcttttttctgtaattgttccttttactaaataactgtataatcctgataatattgaataataataacaaaaattacggaaaaggacgtgaaagaagaatgagttacagaaaatagaaaaaggcattttttgtgtcgacggcagaaaaagacattttatgtgtcgacgagagaaaaaaaaggcttatcgatagggaaaaacattggagcaataagatgatttaaatgcaaaataatagtggtccatgagacatctggaaatgtaggacatgaccataaagatttttgattttcttcctaagagagtatacaaggtagtcaacgaaacgcgcgtatggttgtcgttttggacccactcatacatatttatgcatgcaacagtttgaactcaattattgcaaatgctacagtgttagtcgaaagatattctacaggaattcaccgacccatgtcattttttgtcgatgattcatattataacttgaattaatctgacggttcagaagtccaaacgaaaaaacagaatgtacgaaacgaactctttaaaaatgtctaccattacgaacaagaccattctaatccaaacaaatattttatcgtggtttgtagtaactaattttccaagactaaatacacattagccgtactttatgatacttaattctgttctagttgcaggtgtcaatcacaagcaataaattacgtatgtacttttgttttctaagacgtcgttttatctgttgctttattgttgttaagaacttaagattcaaaaactctgcgatagcgtttattgtttgagtgttaggattgtttccatcttttcttttatctacagtttttatggttttcactcagcttttatagcagtgattttttagctttgatgacttgtatttttttcctatatccaagtcttccgttgatggagtgtaacaattatataaaatctgttcaaataagaaaaatttcagatcaatttaatgaaatgtttgtgtagccgctactttatttggatgataattggccaaaaaacatatgataatatttccgtagatacgtagtactagtaatttatcgtgcagggttttgagaaaattaaaagtgatactaagcgaaataatgtaacatcggataaaatatgtgttattactaaagatcatgcacgataaattgcattaattattgaatcaattatgaaaatgccatttttcgggatggcatttgtgtatattgccttttttagaataatttgtggattttgtcattttttaggttacagaaatatgatttaacatgcgttttattcattatgtttggatttagtcggttgtagttattcttacggtttagtattttgtgtaaactacgtatttttaccaaaaaaaaatccgaaattcatacatttttaagtcttagaaaatggcatatccgtaagattttagtaaaaatgacaatttcaaaagatctctatgaaaaatggcaaaattaacaataatcccttaattatttacaaaacatctcatgtgattatttagtgtacttttttttttttggtatcttatgcattatttttcttaaagcaatgtaactattgtaataacttttctagttccgggcagaacacacacacacacacaactattgtcgacgggttgggttataatcaatgagcagtttcatttatatttctacgaaactattcaaattggaccaccagtgtctaaatcttgaaattggattgcttttcaaaattataacaagtgggatgtatatctggatttttgtttgttttctcttaattataaatgatgtctctatggttgattgtagagaaaaagcgaaaacgacataacatcacctttttagtctttcacaatgtatgaccaattaacattacacacatcatattgattgtagtgtctaaagtagtgtttgaaatttagtatgcaatgatgatttggattttttttgtttttccatttacagttctaatgtttgtgtcataattgttatcttttagaattcaactttcagtctatacattaacaatgtcggagtgaaaataattttgggtacatatatatggatcaatcccaccaatgggtgatttagggttaggttgaggaagagagttttgatttaggattcatagcttccaatgggtgatgatgttccacattaaaatggttatgtaaaggacatattacaatcagttttacatgtttgcgacttgaaatactaaaaagttatcaaaatcgatcatgtgatgttgaaacaacaaaaaatagttcatagttaccatatcctcaaaaacgacaatgtttccagatttttagtgctgctctagaatgagtaacctcaaaatgccaaaacttttgataacaaaatgttactggaattttaaaatacgatattgagtaaaatggtattgccataaatatataatcatgattttcagaccacaaggtgacaaatacttctttcttttaaaggacaaggtgacaaatacttccacgcgagtttgagattctatttttgatagactggaaaaaaacaaaagataatacagtacattttcgttgtggctaaattagttttgtacgactacgttatacgtaccttttttttttgttaactcaaagtaaatcctaaatctatggaaggattttgactaatctctcacgaaagtgtaacctatggattatggatagaccctctctccggatacaaatacatacttatcaatacttcagtcgtatttttttttttcagcacttcaatcgtatctagatatttgtaatcaaatgtcaaaatgtaatcgtaggttaacatatgtacataaatcaaaatcttcaaaatgtggaagagagcagcatttactatagtgttaggttaagattcccgttatgacttatatatgagtgatgaacatatcaaatgttttttagtccgtatttatcatactttttcatcaagtttaagggtttcaaatttaatcagtatgcttttcattaaaaaaaaaaaacgagaagactaatttcttacttttcgggaaaatttgcgattttatttttagaaaattctatagaacaaattgattcagaaaaaggaagattatgagtatttgactcggagtttcgttaagaaattttttttttacctactagccccaaaaaatctcaaatgaatttcctttaatttttctaaaatatattataaatttataatttgtttcctttgtaatatgcatttataaaaatagtaaaacactttttttttttaacttgggataattactgatataaaaatgtagtttatattagtatatgaactacatgccatgccaaccatttaaaaataatggtttaagttttgtttagatgtagacttgtagttcatatctttatctgctttgattggtaacgttccactacttttatagtcactaatcacgaaaaggataccaaaaacgttatcaaaatacatttattctcaaaacatttcactcttatttggtaccattttaaatattttgggatctcttactgcttttttttatccgttataaagcttgtattattttgtgtcaccaatcgaatatgtgaaaaagttaattaattttaaaaaatttaatagtaatttattaaaatattatttcagacaagtagaagaaaaaatcagtcaaaagttaataattatactcgcaccctatttatttatatatatgtttggtgaaaagttaaaaataccgaaaagttagaaatgataaggttaatgtaagagacagacaaaacatattaaaaagaaacatgtctccagttacgtcaaacatcaccatcttcatatttattgtcctcttaggtgttgaatatttttccaaaaggttaagataattccagagaaattctagagactaggaatggtttttctgaacatagcagcttcaattctgcttcttgtttctcacatgcctctgtttggtttaactgattgaaataaaactacacactgtgtcataatttattcataccggttcagtttcataccgggtttaatctactcaattatagccggtcaacttcggttttccttgtcaatgtaagtgaaaaatctactgctactagatatactaatagagctactacaatggttacaccagagttaaatatttcgagaataatctgatttccttcaagaaaactagactatagtttttgtaaattgagtttactcagaaattttatctgtaaaaaatgtacattgaattgttgaacaaaatttttaaacagaaatttggaaaactcggttataccaaattgaatgaagaatcatgtgaaacatatcatacttctctggcttagcatgccacagaaaatgcttttgaactttcttcactctcatctgcattgaccggtaccggctttccggtatcgacatcagaatcttcttcaaattcgggatatctttctccggtataaaaatcgcaaatgattcccaattcaaaacctcgaaaaatggcgggacaaagttatcagatatgatgaccggaacacaatcatagaaaatggcctctaccactctcggactattcacttcaaagcctttggcgcaaatgcagtacttgctcgtcttcatgaactgaaggtagttcttgtttcctttagtccgcggaagtttaccgaatattttcaagtcgggatctttgttgttaccccaatatgagaggaggattggcctgagatacccgtggtcgggtttaccagcaaagaacgcaagtatcggtctttggttcgcggactttccacccatgttacttagtggtttcttgggatctctaacgaatgtttctggtaaagatgtatccttcccaaaaacaaatccttctttcacatccgagttgcacaatgcccttatactctttgccatatgcttccgcgtctccgatggagcctgaaaaaatgtcacaaaataccatacattaatcagaaaattacctccaatcttatataacctcaaaaatccaatcttataacctcaaaaataacatgtcacaaaataccataatatatcaaaacatgttctcaagattgcatctatattcatgtagagacgtcaccaaatattctcatggaaaagaagagagacattacccaatcatggcaggcggcaaggaaatgatcggcaccggaagttcgattccaaaaagggtatttagcagaaatgaagtctatatagtctttaagatacttaataagattgcggtgactgtgagagtcctgaacatatagagtcacctcaagcatccgggagctaaagggtaaatagaaaagatgagcttttgcagggtcctttgtaacaaatttgttgttgttggattcaataatattcataaaccagccttctgatgcataaatccctctgagtattggactatgcattattggtttatttccttctttgtaagcataaacctttaatatcttctccatcaactcatagctcctaatgaattcaatatcaactcaaatcagtatcatcataatatgagctttgatgcagttttcaactaaataaaccgactcaccttttgaacatggaaacattgcgataaagaggagcgtagaggaaaggatctttgtcatcgataggtgcattctcgatatcatattttgcttgtaaaagctctaagtcaggtttcgttacccactttggtttctgaaaaagaaaaaaaagaaacatgttatacaactgttacttcttaagtaagaatgtatcgtatcaagatcttgatgaacctttgctagacgattatgagaaatacggttttgacgcaactgcttgctcatctcggatattgacatcactccgaaaccaggcattttcgcattctcctttacatcaggaacaaatctcacaataggagaagcatcaccaacattttttttagttggattcctttccggtaccttgctagtggtaggcaatgtttcgtttttcattactggagacgggtttatactaggtaatgcaaccggggcctttgcactagccacaggcgcggttgcattttctttaaccgtagacgggtttagaataggtaatgcaaccggggactttacgctaggagcaggcgcggtagcgttttccttgactagagacgggtttaaaccaggtaatgcagctgggggattagcgctaggagaaggcgcggtagcgtgatcctttactagagacgggtttaaaccaggggcctttgcattagcggtaggcgcggttgcattttcctttaaaataggtaataaaggcggtaaagtagcggtagtaggcgaaatggcgggggcagtggcatttccgctactatcatatatctgatcaacctcaacttcttcctcatctcccgcgggactcggcgctatagcggaagtcgagttacctataagtgaagttgagtttcttgaaatgggaatcttggtggaagaaaagatggatgagatagcgtacggtagctcgatgtattgaaaggtaacaatgagagcaaatgtgagtcctaatagccatagaagccgtctgctttctactttccatagccatggagactcacgcctcatttttcaagccttgcaagtacctgttacactcaaaagtatcaatatttatgatcaatcagtctgattctaaaatctacagagcatagtctaggagatttgaatgttgttgtttctccaagtatcaatctttaacaacaacaatgataattcaatatgacatatagatgatctaatatggtcaacgcctaaaaaccaatttatcaaattcgattatgaacattacacaaattgtgaattttagagctaacttgaagcaattttacagaggaaaattcgagttttgttactcaagtatcaatctttaagagtaacaatcataatgcaacataattcttgaatctgatatagtcaacgattgattttctatgttattctcaatctgtaatgattataatcagaatcatcacaaaacctttttcatatttttagaaatcatcattgcatgcaatatattaaaagagaataaagaaccgtaatgatccctatatgattttatatacaatttatatgctctgcctcaacaagaacagagatagagagaatcagagaaaagcttacaaagttgagaagttgatcagaagtcaaacaaagatcaaaagaggcatgtcgaaattgatcggcttataggtcaacacaggactcacaaccaaaatataaaccaccaaacaagagatgacaaaaaatagtttctcctttgtctgattttcttcctaatgagtatctctggtttacgagaaacccaacggactctctttggaatcaagaacttattattattttagggtattagaaattaagagagagggtaatttaggaaatatggtaggaggactttgagttagagccgtcacgctttgtaccttcttcgtcttctcaagtcacaaaagattcttctctttttttcgatttaaaatatattttttatggaaatttaatgtaatcgttttttttgtcattaaattttgaatttaaataaatttctaaagtcaaatttttaaaaaaattcagttattacagtgtgttaaaaaagttacagactagaaaaattgtatcacactttttttctttcaattattataaacaaaattggttacgttgaccaactgaatccaattaatgtagtttgactcggtttagttctttcaattgaactaatcttaaactcaaccgaatttataaaacggtattaaagctaaaccgaactttaaccgaacaatcaaaaatgagagacaatcaatcgtattgaaactaaccaaaccaaaccgaattggaccaagatattttcaatgctctgtttttaacatttgacatttcattacatatggactaacgtacccttaatcttttcgtactattatcgagaatgacacaaatacattgaattcgttgacattgtattgaaaacctttgcaacgagtaaaatgggatgccattaaggtttgggttgcttgtacgttgcggcaattaatatgttatcgatatacgtaaattcgggaaactgaaaattgatcatttcgggacaaagccaaatcagcagagttgtaatgaaaaccaaaatttacatgcatgtagacaagatggtggttgacaagtgacatcacatcaaaatttataatattctctgtttgatagtatcaaattaagtatttcttttaaaactgatattttctgttgaatatatcatatgataaactttagttttaatttttaaaaccacttgttgaaactaccatttcatacacacatttatttaatgaatttgatttaaaaaaatagtagtgtgcaatgattgttttccacaaagacaaaagttctctataaaaacgggtttgtaaaaatattaggaatagcaccttttaatgtagataaatatgggcttgaaggattatcatgggctacgataaatatgggcttcaaaattgggtctctttgagccataccttgttgagattcagagtttttcagattggaagctcgtaaatttagccatttggtgaaactgtcattgcttagttcttgtcacttattttgcaggatcattgtaaccagcgtagttattgttgctttgccaactcagaaacagacccttatgttggttagttgagagctgcattacgtttaaaggagagggatgtgaacaagttgatgcattctgaatttctctaagcttcgttttagtaattggtcgaaagtttagagacgtatagttcttgttacttataatgcgtgcaataccattgacttgtagcctagggttgttgcaagaaagtgtagttccgcccgctcagaaacatactttatgttagttagttgagagcttgaatgtgtaaaatagcgaggttaatgaattggggcattattctggattggtttaattaatggtggagagcatagagacgcctctcgttgatcaagtctcttatatggtgtagttcactagtagactgaaagaagagggttcactggttccacacttatcagtagcttctgataaaagaaagctttcaactttgtcgagacaagcttttgatatcggaattagtgtttctattgtgcccttgttagctcaaaaggatattgtaagtggatttttcaatatttgtttcatgttttgcggaagtcatatgtctgaaatccaatcccttatcaaatgatgatcatctatttgctaaaccaaaccaaaacctccttagttcaacatctctccccggtttactttggttatgccctttagatcacatgatttggaagaggagaatcattacctactttgttagttcagctaacaaaacaatgatcacgatagatgcgacttgtggataattagaatatcgtttaattgtcaggagacatgaatgatctatctcttcacgatttaacgtgccaaattttttatatgcgcatgggaacccatttttcggcatttctacgttagcttcttatctccattatttatttggtagaagatcaatatattattaagatttagcattttggctctggatttgtaggatttatattttggtatcaaaaccaggaaatctgatattgtatttttaaaattctatattataattttcagtagtatactttttactgaattttatttgaaatgaaataattttatggaaaatttagattatgattatttcaccgtaaaacaaaatttgataaatatatatttcttgttaaatgtacctgataattaaaagatcaaacatgtacctttagtcaagtagttacagagtgaatcaagattttcattatttcttaaaaactttcaaaggaataatattgtatcgagatgcaaaatctggtttaagaaacaaacacaactatggatgcttcatttagatgttgattatattgaatctggatggatgaagtgaagaaattaacgtgctcttgatactcgatagatcgcatactaatctatcaatatgtacgagacgatctacttttatctggccatagatatagacgtaattttggactatgaactaaaattaagattaaaaaagaactaaatttagaaacgattatatgaatacggagtttcacaagtaagtgtacttttgttgttgtcggatacatgtgcttaagatacatgagcgttcatgaaaatgactctctctttctatgtgcatgtgcatgagaggcatgtgaccaccgcaaactaagccttaactgatatctttttctttaactaatcatcaatttttaaatagtccaaacaacacttgattacaaaactacgacttcttgttatgaatttggcagtgtctatgagaatatgaaagaaatgtcgacacttgcgaaatttctatttgccgaaacaaatggaatttctgtaattttagtttgtttagtttgataattttatataatacacatttatagatctccaatgttatgaattagtaaaccaaaaaaaaaaagagagactattttaacataaaggaaatacaaattactatggattagtgctgcatcggatcgtgagagcagaaaattaaattactacatcccgagatgtatttatcaattaatttacttgaaaatcttttcctcttgtccttttgtattgttaggaatatatagtagttttaaccatgcatatattataagaagggaattgcatgagacaaatattagtactaatctaaatcatcaaattgaagaagctaacaaaatagcttacaaaataccgttcaatctcttgacttattgtcaactaaacaaaattagatgattgtcaatttagaaacaatcacaatagttgcaaagcagaaactttaaaagaactatgctacaaaagagtcgagggaccttgatcattgaggtgacacattaccaacactgagacactctcccaccaatatctcatcattatgaatttttaccttatgtttgcatatatatattaactatgatactacactctaaagtgaaataattcagttattccttataatcacaataattaggattttaatatacaagcttatcccttattgtggtaaagtataagcctgataaaataataataaacattttgtagatcttttttttttttggccaaacattttgtagatctaacattagctaattaatgtatgataaagtgatcaacagaaaagtaaaaactaaaaaaattcatttcatgtcatgaggaatgcaacaaaagctttctagcaaattccaaaacataagattaaaaggaagaaataagtaaattgtcatcatcaaaatttagattagcaaaatttgatctaagaagataatccctaattaaattattggaaaaataaaaagggatcaaatcaaataagctgtctgaaatctgggccaacgttgtggtggatcaagtaatcatcaccgtccgatgaaacgtcgaaaatcatggcagtgtccgtaccgtgatggtgatgtatgaactcatgatgggccctactcatctccttctgtcgccggagctccataactttccgatgagaatttgagtgtttcgccagcacaaacgtcggactcgccgcgggccgatactccggcactaaacgtcccgatttgtacctaacaccgcaagcgttgcacaacgtcttcgggcccattgggcctgtccgccattgcggagtcttatccgtggcgcagtggagacaccgtctctcctctgcgccaccagactccggtgaagaaacatccttcttccgtcggtgtcctccatcaacggcttgctttttccctagcggagccatcaacaaaggcggcgaggttggcggagacaagtgttgttggctagagagaatggtttctccggtgaaaggactgtcgtaaaacgtttccttgagaagcccacgtgaggcccaattacacgcagcggcgcgtgagcgtttgcttctagctttggccggtacagaaacgtcggtagtaaaaatcggactgctgctattcgggttttccgggcttccggtatcggatttcgggtccggtcgactcttaaaaccggatattagctcgagcttgtgtacatcttcaggcgacaatgattcatccacaatgttcgaaagccactctaactcatcagccaaatcatcagactaacaaaaacaaaacaaaacaaattacaaaacataacttttttgttctttttattacaaaacataactaaaattcaagaaataccaaacatcgttaatattaacgtacaggtatacaaaggtcaccggagaagctagtgccgtcttgaacatcaccgtggaaactgggaagatcagcagcggagaagttagagctgtcggttatggtggtggtagtggtggaatcagcaacaacatcgttttcttcgtcatcatcgttagagaaatcaactaaaaggtcatcaacggcaaaatcagatgtgtggaagaattcatgtgcttcatcttccataagtttcgttgattaaaactaaagagttgttttttttttttttttttccggtaaactctcgtcggaggtctttggagagaggagagagtgaagtgaggggaaaatgtgagtttaaaaaggagtaaagttagagaaagttatggtttctctgtagaaaagataaacttttgtttattttactttcacttttattgcgcttgaaggggacaagaggtctaattcggaaaagtttgacgaagacaaaggagtttttatgggaattatttctttttacactcactacttactattattcctatttttactagttttttttcctttgttaaattgtaattattagtgttattttagtttgtttacatgcttgtacaagcacatgtgtagtcacgtttgtggggagttatttatttttacactttcctagttactaagccataaatttgttgggaaaattagaatttggttagttgacaaacacaaaggtgggaaatgtttttgacttcattaaaggattaattgaatcaaacatgtgcaattatggtatagtggtggggacaactttaccaaaagagtcataagattgcttcaaattacagaaagtaccacgcacgtgcatgtgatggatgatgatcacgccgttgattatcatcaaccaacactcgataagcgtcgacaccattacgcgaaagttgaaaccgatccacattaattatttatatgtattgtaaactggatcgagtcaccggttttggtataataccttctttttcctttttctttgttcatccgctttttaattagaatgtaatacctataagaataaagtttttctctttgttattgatttaaacggcatatattaactgaacccaaataggttaacaatagtatgtattatacgggccaatcggtccacaaaataaggaaaaaaagtaaaaactgaaacaacaacgtatcaaagatttgatcagggtggatatcggcagtaccgacaccacctttaagcttaggcgataacaatagacctttttgataaaatgatagtgtatcaaatcatgtacatttgaggtatattcggatctagagaattaattatagaaagtataaaacaaaaatatatttatatgacataaaatggctgatcgagtatgtgattattcatgttggtagtaattactagcgacactcgaacttgaatatgttttaatattttcttatcttcacatttttggtagagctagattatagttaagtttattgctttgcatatagttttagacttttaggctatccaaatgggataaaaaaaaattgaatagctgttgctcttaagtcttaagtgattttatcttttagcagtttgtcgtaaactttatcagtaatggatgcgacaagaacaaaccctctcaacaatgcaaataagaagacaaaaaaaaaaaaaaaacttttcacgttagatataagtaattaattataacccatttcaagaaaactaaactaagaaatcattaataaccctaaataggcaactaaattagctaactatacaaccagaaaatggaaagcgacttaattcttaatatcaagacattctatatttctattggccgagttccattatctaccacatcgaacaatatatctcgggacttgtataagaatatattaagagttatttatcttttaactattgttatcttataaacacgttaacccttcttcctaatcccatgttaaatccctttattcctttttccgattcccacttttagccacgacaattttccagctcaggcaatcagaaatagtatgaccggtcaaaacattctcttctttagttaccccctaagttttagtcttactattaacctagtaaccactacacgttacaaatatgaaatatcagtcataattagaatccaatcccgtttcctaaaattcagacacggtaatcacttcaaaagacgaaatgagaattactaatgtaataactgtagctaattaatacaaaacccatctacaatatttaaagaagtcccaatacatgcatgaagagaagtgataggtactataaacaaaagccagatgcaattagagcgaatatatatatatatatatatatatatatatatatatatatacctgatcaatctacaagaccgtacataagtcctagaacgtattaagtttatgaactcgatgataacaaaaataagaaaaagacgaggatattaaaacttcagaaagtttttgaaggttcttttaacttagtgattgtatctactgatcacttatttgtgcattaaccataattctagggaggataaatcactagagtaacccaaataatatgattaattattagaataacacacaaatggattttaatgaaaaaactctcgaatatcatttatctattttaaatcccttaactaaattacttaattaaaagctactcaagtgaagaaccgtcaacaaaaaaagaccttcgactatagtgtcgtgaaaaccttaaatgactgctatcgaatagatatttttgcattttgctttgttataaaacaatgtatatattttttagatataagagaataaaatgtttgttttaaaataagagttttgtgaattaatcatacaaagtcaaaaataatatgcaatttgatatttttttgctatagtcaagttcgattttttttttttacaaataatatgtcaaatcaaaattctctagatgaggagttcatatctatctttataattttaaaaatctaatgtttgcatccagaaaaacgtttacaatatacgtataagggtcacattgcatattattttggatttcgtaggattaatctgtattttctagagatagaaggtaaagttgcaaaaattagcgaattagagagttttttttcacaaaaccctgaaaataacatcttcaatgtgatgcaatcaattgggaatatgaaattatataagtaaactatcgcattcttgcataaaacgatgaaaattgaatattccatgtagaattataggaactaaacgcatctcaaataaaagagaagcacgaggccgaatgatgaatttcttttttagatttgaagtcgacgttaagtgatttttaaaaatttatgttgtttttgagaagaaaaaaaaatcaatctataacgacagaaaatacatattaaacgatactatttgtttagatggaattcaatcaataaagccattcgggaaacaacatttatgaaatcaagaatcatcatcttacaaaatccatagagtgaacaatactcattttttatttcttatcattgtattttatcctgctaattttttttcataaattttttaggaaacgatccaaaatatatacattaaatcatatatgaaaagtcacgcgtacttataaaattatcaaaaatatgtgcttatccatcttatacgattgagtaagagttgataaagttgaggctgagatggcaaagtgaagacgtgggttgggggtttgcggttattggtatatcttcaggtaaatttgttttacaatttcgtatgcttgttgttgagttgtttcagcagaaatgagtatgtggaagaatgctatgagttcctagatctttttgagactctaaaaagtgcccatctagatatcaattagggttctctgtttgtaatcggtgtttatagatatcaatacatgaatttggagttcaattcttaacaccatcatacttacgtttatgccatttttttttatggagggaaaattgttagtacttcttatttttcgatatctcattcactacgaaatagctattcacctcaatggtaactatctcattgcaaatttctattagtataagaagtaaaggaagagtgatatcaaattgtctcctccatactatcaatatctatattccaccggtacatactttccatattcttacatttccataagaattattgttctctatttatttctttcgagagaaacgattcactaaaagattgaagattcagtagattcacatgattgtctgcttatttcagacacgtgtctcgagaagactttagttccgtgggacctagatattgatcttacgccaaccccgaacgtccttcgaaataatggataaggttcttcttcaaatactattatatcttttcacaattatatattcatcttagctattcagtgattgcttgaaccagactcttcttgcgtttgaaaattacatcactcaatccttatataatagaataataattagtttatgttatcttcctatatatctaatgaataatgataacggatcctgagaaatgcgtaagagtggccaaaacaaatgcctaagagtgctcctcacgtgccaaaagcaaaagacacgtggtgcaatacttaaaatcaggctaactagtggacgcgaaacgagcctactcatggcttgggtaagatgcttctttgaaagtaagcaaagcctcatgctctagagaaccgcgtgccgtttataatgtgtaaaaacaacgtgaccttagatttgctaggattctagtgcaatggtgataactgataagaatatatccaatactagatttttaactaaagtacaataaaatgttatagattactagagcctacgcaaagattaatagcttatgactgatgcggtataatggtcaaatccttttacttctttaccaaaaggtgatgagatcgaatccataccatacattacaaatttttctaaatgaagtcaactgggttttgtgatgagatattttgctttaaagcaattgttgatatctcctatagcgatttctttgatttttttttttttttaaaaagagtcgttcaacccctagctagtattacgtttttctcatctaagttttaatagtataacattcataatcaattttttctccattctaaagatcatcctgctatagtgctatgactattgtctctaaaactttcactggatataattacaacactggactattactatgtatacgaactagtttaaaagctaagaacaaaataagtttcatcgacctatgttactataagaaaacagctgtttaccgacttatgtcaatcatgtatacaagaatttaaataagtatatattaaggttcgatattcttatagtttgatgtcaaagtctcaaatcttttacatgacgatgattgatcaacatatacatataatagtgagaaaacggacgtttgattgataataaacttgacgaaaaaatattatacattacaatttacacacgtaaaacttccatcggtttttaactacatatataactcacttaatacacatctccgtctgcatgtaaattcaaatctatatatgaacataacatacgtgtacgtgagtatacaaataagctaattaaccaaggtacgatctttaagctccttagctaaagccggcatgcagctagagctcctagcgaggccacctttttcaggcttggtggctccaaccatcttcttagacctctttttcagcatttccttaaccgcttctgcttggtacaacactggataactccggcctagcctgttgaaccgggaacatgcgctcatgtgtaccttcactgcctcttctcgccgcttctccatcagcacttcactgttgttcatcttctccatctccccctccaccgctttttcgcacagcccgcaaatcagcttccctgagaattttgaacgcacacggtgtatgtactccggcgtgcactcttcagacatgccacaacactcacactttgcatcttccacttcggatatcgctgataaggataacaaagttgttgcggttgcggttggagatggttcttttgttagagtgttgtctattgaaatttggtgtgaaatatccgagatggtgcgttgaaggggggccattggaaggatatgtggtcttttggtgttttcttgtgtttgttatatgtatagcaatcacttgtatctatgactagctactagattgttatgatgcgcatttatagtgtttaagacttaagagaatagtctcgagggttctgcttctttatttacttttgttttttgtcctgccaataaaagcatgaacaatttagctttaatttaatgacctaaaaaaggatcaacttcacatgtatatcttgaacaacacggtaaagccaataaaaggtttcctcttttgttagtgggaagatgaagcttattgaatcctttaccaacaagaaaaagaaggataaggtttattgagatatttggtaacccattcatttttttgtttttcatttcaaccgcttaaactatttttttcattggtgaccacatttgaattaaagaattaggagtctgcattctctttattcattaaaataagtgataaacttggtccaaaatatgcaaaatccgcatatttcatatttgaatcggtttaaatataaggttatacagggtaagtccgctttatttttttaaaaaacaattttgaatttggaaaaaactcataatcaatacatatttcttaaaaaataaatcaattcaaatgttaaagatgatgaaactgacaacaattaaaagttagaaaaaaatatcattccaaatctagagagcacatacaaggaatttttaacatatcattttatatagctacatgtgaaaattttgtaacaaattttaatttgctacggatttgctataatagttgtaagttctaaccaaattttatttgctatggatttgcaatgaaaacgaaagctatcattgcactaaaaataaaagcatctatagctaagtgtttgttataaatgatagagtggggcaattaatagataactcgaggcttcgtgaaatgtttcatcgtaacaaacttaccactactgaatttgtttttatagatcgtcagccacttggcagtcagttctgtttcgatgacatcagtgggtctagatctgacggcagtagggtcttgatccggcatcagcagtcagatacggggtggatgggttaaattgacctgatggactagttgatcaatttcttaagaaccgataccattccaaagttagtcctactcacttactaaataaccgaaacaattctaaatgacgacgttttagcaagcccacttaatatattgtcacagaaaaatctcccatctcgtaggccttttaaggttgcgcagttacaattgatgatctcatgatcctaatttcgagtacttgcaagttgcaacaaaaaaaacttgtgattgaaggtaaagtactaattaatcatgttttgtgttgaatagtttgttgtcatatactctctttccgtttcattttatttgatctttaagattttggcccaataattaagaatatataaacattcatttaatttttctctcttttctataaaaagacataattcagtaaactgaatttaaccattaataaaacaatgtaataaactaaatttaaccaataagaaaacaagatgtaaaatataattggtaaattatttttattattttttgcatagaaaaagttgaaaacatcatttaatttgaaactatttgttttttctaaaactgagggagtagtagatttgagacactgaattttctgaaaaaactttttgttttgcaaatttgaagattctggtgaatatatatagtaattaacggatataccaggctttttataagacaagagatatattaataagtcacggttccatgggtcggaaaagcaaaaaagggtaccgaatatatcacatgataatctttattctggttttcatttttttgtggacggatcttggaaaggaagcgataagttttttggattagggtggttttgcacattatcaaataaagactcgtcaaccatgagagctgctaatctgcgtagaagtctttttccacttcatatagaagtcaaagctctactctcggcgatgaagtgtatgaattttgccgacaatcaagaaataacttttttttacagactgtgcagacctggtgaagatgatgtcttctccaaccgaatggccagtgttttcaacttatttggaggaattccggaccgacaaggaagaattcataagtttttgcttatctttaatttctcgtactgcaaatgttaaggtggacaaattggcacaaaaaaattgtactgaaccgcttcatatcacttttgtaaacaattttcctcagaattggcttttctgagctctaaataatatctgatgacaaaaaaaagagttatattaataagagtatatagtttaagacttttagttatattaaaatgaagatttagagaacgcaccaattttagattggagatacaaaataagagaacaacgaactaaagttaaaataaaaataaaaatagaacactaactaacgttgaattttagacttatgaattagggttacttaaaattcagcccatactaggtccaaaatgagtgtaactaacctacgcctccaagtcggctctttaaaaccttgtgctgcaattttgttttgcccaaattattggtaattttgtttttttcaggagaaaacagtgatgatgggtagaaaaaactcaaaacaggttcgttattccaataggttgatactcataaataggttaagccaattatctgatcctttgatatgtcagatactttctcatcttcccataaaggaggttgtcacgacaagcgttttatccactagatggaagaatatctggcttagtgttcctagtttggaattgatatattcgatattcccaaatttcaatacctttaggagttttggtgataggtttttcgattccactagggtttcatgtatacacaatcttaagttatattttgatgaacatgatgcatgttatcttacatcatggatcaatgcctttgttacacgtaacatccgacgtctatatgtccgtcgtgttcgtgggaattattttcatgagctgcccttaagcctttatgtttgtgagacattggtgtcactaaaactctttcatctgactttggttgaccccgaatttgtttctttaccgtgtctgaaaatcatgcatctaaactatgtttggtttcccaatgatgccactttcgagagacttgtctcttcttgccctgtcttagaagacttaaagattgatgtattatggaatgatggaagagtttatcgagtgaaatctcgttcacttaagagactccgtttactacgaagttctactatggtgtttgattctgttccgggtgttgttattgatgctcctctaatatgctatttgagaatcaatgatcgtgtatcagaaacctatatattaaatgatctggagtccaatgccaagttagatatacatctagactttggttctgaagattttggcgaaccaagcgtttcatcgaggagaagtcgcatccgtagttttctgcccgcaatatcgaaggtcatgggtttgaaaatatctgagaacactttcaaggtatatatataatatgttttgaacatgcacatttttgttgtaatgaatagtttctaacccacaagtcctctgtttggtttcaggtcattcatcactattccaatttagcacaactacctcaatttgataacacgtcccgcttgcacgttactctccgtgtatccgaattaaaatggttgccgaattttcttgagtgttgcccgaatctgaaatccctcattgtggcttttaatggtgactttgagaagatgggttctgaggagatgaatcaaataagtttccttctccggatgaagaggattgtggatatgacgatattcatgtacacttccaaggtatattatatattggacatgaacattgctataatgtataattttctaaccaacattacattatcttttgctcaggtcattcgtcaatattcccaatttgaagtactgccttggtttgcttacatgtcccacctacatgttactctctctatatcacttttaaattggttaccaatatttcttgagagctgtacggaattaaaatctctagtcttggtgatgatttacttaaccaatgaatttctttttcgtctttagtgtttttatcttatattgccattcaactctctttattttttttccttaggtattgttgcatagtgataacataaatcaactaagtttttcatctgttcctaagtgtctactatcatcgctccagtttgttgaactcaatgcccaaatcttgagatttgatggcgaaatactgaatctggcgaaatacttcttagagaattcatctatcctccaaaaactcactctacatccgaacaagtatggttcaacttatgcgaatatgctacacaaattccgaagacgctctagaacttgccaattcatcctaactgatttggaatagcttagagagagcatgtgaaattcttgagacacaagtaatgacaggtttcagaatctgtgttgtttatgtaatgaagttttgtcccttaatgcttatctattacgaatttgaatgctccaccatcactcaatgcatgttttattgctacacttgcgtattttgttttctttagtatattgattaacttatgtgttttgtatattaagttctatattactaagaaaaacagccttttacactccgtttttgtttgttaagcatttcacactcttcgtcaattaattactaagcgctctataaaaattaattggaattctgaaagtagttcatctataggttaggtctttggagtactgtggaagtagatgtttttgagtttcttctttaccctaggtatgagattagaaggttgagggtttgggatgtcaagtgatcgctctcttctgggagttagtcgcgaggatcatgtttgtcctcggtagcaacttgaactgttggaaccggttactctggccaaagggctcattgtcaaaaacttgcctcaaagtggcttctattgtaaccaccagagtttgcatatgagtgacccgtggtttcactaccgactagacacatatatttgattccagttaaagcttcgccgggcggagcagcttcgttgtttctgttttttgtaacccatggatatgttagggccataactcaagactatttgagttgaattagcatattctaaattttatatgtaaaaaataaaatagacatgtatatttgcataatgatatgcaataagtgaatgttgaacagttcataaatgtataagttggataaatggaatttattttcttaaaactactatcaaactgacccttaatcagctagcacaaattcaattttcttaaaaagttacgtagtttggttaccatttctcctaatattaaaaatccgaaaactgttaactcaaatcaaaactaggaggggatgtgaatctcacaagaactggatatgaaatttagatggacgtttaggaagatcaagaaggtgattgatgactctcagtttcttgttatcatcatgagcatcaatttccactttcatcacttgaagaaactgcatttcccgcaacaagcacttcacttgtctcacttctctaccacatccactaaacccatatatctccaacaccttcacttcatttcgatcaacgcaaactccgtgatcacttgcacaatgcaaaccctaaagcaagcatcacaaataaagcaccatatatacaaagttaggattgtataacgcacaagtgaattaattatctctttataaagttcagattgcgacaccttgaggaccaacgtttctagctttggagatttgttaagcagacgcggaagcacttcccaaccttctttctcattactttcaaaataaagcttaacaaggtttgaaaagacatgtaattccacacatcttgaatacatcatctgaaacgcaagaccaaaaatatatactaagataacgaagaagaaggttttgcaaacaaagatacataccttaacagaagcaggagacaaggaaagggtcttaacgttgcctatccaatcaatgatcggagatagatgcatgtgagtattacattcatgtcttatatgaacatctagtttgacctcaacaagggaattcaagtaactggtccttgaatagcgacaaggagcgaagccagagtattcgaggtaaagaagacttggtgtgtcgaattgcattgggcgccccaattcaaaactgttattgaagtgaactgtgagtctcttgagggttttgtgggatatagagaagtttggactgtcattatatctgtaaccgcgtaagtcatgtaagaataattcctcaagtattggacaaccaggaagcatcgaatggcacaatctttcgcatgcaaaccaaattgcatggagaaaaagactctttagcactggaagaaccccttttggacaatatggcattttattttgaccaacctctattctaaatgttagcttgaccaacgtcttgattgtgaaaacattacaaggccactcattttgcgtaggagtaaaacccattttaaaacgcatatcaagatccacaacacctcgttccatggcatggtgtagccattggtcgatgtccttatgagcgcaacatttaagaggacataatattgaaagtttctttatggtattgcaatcggtaagggttttatcaacaaaatccccgaagctctcctgaacatctttcatttctcctttaccttcctctggataaactaaatctgagtcgtctaaatagagatgatgttgagattcaaagagttgaatcatcaacgcaaacagattcctccaccttttggagataagagatgtagaaacagctcgttttgtgggaagataggacaagatcttagcaagtatctcatctggaagacagtttactgcatctctagagctagatttcacctttctggtatccatgagatcgaagccctagtagtcaaaatatgagctgaagaaaaaaaacagatatagagaatgagtggtttgataattaatatagcaattagggtttcaaaatatttctaactagctaattaatttcccctttatttctagtgaataatatatacttttttattttattttttttatcaaccgatataaattagaactcaaatgagttcaatcctatgggatattgtttacatatgtgacatgatacggttcggttaacaacacaaaacaaacgttacttttataaaacacaaaacgtttaacaactacttcttcttctgttgactttgcttccttcttgttgaatttctacttcgagaactacttcttctcctacttcttcttttgcgtcttttctgttcttaatcttcttctcacttgacgctttctcgttttcaggtttaatcaaaggttcaacatcaacaatattactaagattatcatttatagctaaattattattattccaagataaatataattacttcaaggggttttggtcatgtttctttaagaaggcttggtcgtctacttccagaagtctgttgggttgattagtcttctcttgtcaccattatcatgctctcaagcccaagcccaatcccaagcccaagcccaagcttcccttaccactaccaacctacactccgatccaagtttgaagtttgaacgagctaaaataaataattgttaatgtaccagattttcaaaagacactaggagtattttcaagaaacacagaagagaacattctaatgttagattggagactacaaaatgagaaacactgactaacaaaagatgtcaacaatggttttgagttttttgttctgttgaattatgtaagtaatcacttcttttagtgttgcttcccttccttccttgttcctcccaacttcttcaatccgatcatggtagatccttcaaccgtataatcttccaatcccttgcagaaataaaaatagacatgtgaaaccaacaacacaagttaacaaatacaaaaatcatgaacatgatattattatataataataccctaatcaattcttgacgtgcttctcgaagctcatcgttaatttggccttgttttaccatgcggtcgtctagttcttttatcttagaacacttcttcagttcttcttcagctctctttcgtgctcattgttgatttggccttcttttcttatacggtcctctagttcttttatcttagaacacttcttcttcagctctctttcgtgctcatcgttgatttggcctgcttttatcatgcggtcctctagttctttgatcttagaactcttcttcagctctcttttgtacttccgtttcaaagttttctatgaaacacactaagcatatcagcactcaagaacctgaaatatacatctctatatatatagacaaatacctctttcatctgaagattttccctattctctacttcttctagctcatagtatttcttctcgagcttcacaagtatctctgaaatctatgaaaagcatgctacaactcaagaacgatcaatacatatatgatatatatatataatatacatacatacctcctcaaattcgtcatgctctttaaggagctcctcccagatttgccatgttttttctatagcgagcatttccttaaactctcctgcttttgtcacatcttcgtccttctcaatcagtttttcgtcactcgtctctctcatttttgccatctctttgttttccctccttgtctctatccttttcctcagttctttagaagtctttatcaaactcttcatatcctccatctcgaaactgtttgatttttttcgaaatcgaaaaggtaactgattgattttcttgtaaacacacacgaagaaagagtttttgctttgtcttgtttttttaagggtaaattgcgcacagtagccgttgacccacttttaatttcagattttgacattgtggactgcgcctttcatttcttagacattcagccaaaaactgaccaaaatgcccctgacgaaattgaacccggtttatacgtacggaccgcgtcgttagaatccaagtgaatcgggttcgtacgtacattgttcatcgttgagaaatgcattaaatgatttctgggtttcggcgaatttgacacttgagattggaattaaatttttaaaaaattagttgggcttagaagtttttaatgctaaaaagttttgacaagattaaaactcatgattacctattataatagagattatattgtaagatatttacataattgagattagaattctggggaaaaaagaaattcgaaattgtgttacggtgaagaatctgaagttttcagttgctgttttacaaagtttgaaggattgaaggagagacaatctgtgttctgggtaagaaattcgtgttaatcctattaattacacttgagaacgtgatatgaaaataatgatacgtttttaaaaatttctgggttcataaattgttttgttggagattctttttgtatttgtaaacccaaaattatctaaagcaaattgagaaccgaatgagtattcaaatatagttatatatttaacataaattatatttagacttttatattccaattacccaaattacagttataaaatcgaagttaacgtacactcgtacatttatcaaagaatatatacgtacactagtaattatgtatctggtgaattatgtaaagataaatgttttacgtacacgaatacagataggcatggtagaagtgaaatgaattgtaatggtgtgcaatttagtattggaagatcggttttacatgaatgagagtacgattcgttgaaatattatatatgcataatctatattaaaatatacagcatacatataacttacataataacttaatctggatgtcaaaaaaataaaattaaattttttcgtagacaatggttagagaataattaaactcattttaatgttgtaccatgtacgttccaataaatatttttgtgtacgtacatagtattagatttatgtgatttagacatttttatgatgtaactgtttagagcggtcgtatacgtgtacgtgtatctcaatattatcgtgtatgtttaagggtttagtttaaaatcttgtttattctcaacaattttaactcaccaacaaagatgtacgtacattattatacatgtacgtacataacatttttcaaaagtacgaggaacaactatactctgaccatataattttatttaattattatatatgaatagatttatgatgaaaaccccaaaagatattttatctaatcaaaataatcaaaagtttctaatgtacaaactcaataaatattttgtatgtcgcctttacaataaaacaacatctaacatgtttatttctattttaaataatattttatttattatcatttgaagacaattcacgattagcaatatcatataaacatatgtgcgtaacggtaataatatatacgtacacggtagtaatgtgtacgtacacggtagtaatgtgtacgtacacggtagtaatgtatgtagtaatgtgtgtgtacgtataccgtaaattacatatacgtacaaattttttttttaatgaagggtataattgtaattttgcactcgtcttcaacctctgcaaccctaattttgcagccgcttgttaactcattaacatccgaaactcctcgccgccgactactcttctttatctccgccatttgagtatgaacaataattcaagaaaccagaaaatcctctttttgttatcctttatcacgagctcgatcgaaatttcctcaacttaagcaacgaatagaactcgcacagagcctcaatcgaactttcactttcgatcggagtttgtgtttcgtcggaattgttattcgtcttcgacaaacagtttttgattttctttggttgttagaaagttaataacgtatttttgatttaattttaaatttaaattttggtaatcagaaaaataaagaaacgaaactgaaccgcctcctttcatttctcgttccagggcaaatttgtccatttttggctgaatggctaaaatctggttgggcgagcccactttgtctctttgtgaaagaaaaagtcagaaaggtgtcaacggtgaaaatttcttttttttaaacgggaaaaatgtcgttttatacgtgaactttcaaaaagtggacattcaatacgtgaactttgcggtcggccaaataaaacatgataaaaacgttgacccgccatttaacacaaatcaaaatgttgaccaggccaaaatcccgagacgttaactggcattaacagatctgataaccgccgtaagcagacgttaattgtttctgttaaagtcgaaaacgacgtcgtttcacgaaacaataaaatccccaattcaattttgaaatccctaattctatcatcttcttcactcttcttccatagctaattgaaatcccaaattcttctatcttccatatcttcttctatcattttctttaagtttgatttcgaaatctctaattttatcatcttcttccattgtttgatttcgaaatcctaattcttccatcttcatccatctttctagctccgtcgattaccaagtatctcctccatgtgaatatacttataccaaaagtggtccacgtgaggaagaatcttcacagctcaatcccaaacgttcctcgcatggttgacgtctttgttccatagcttcattaagcaaccatggatgataaaagatgatatgaaagctatggaagtttgattaagttagaagatggacgaattagggattgaagatggaagaagatgatagaattagggattttaaaattgaattggggattttgctgtttcattttatatgaaacgacgtcgttttcgattttaacagaaacaattaacgtaattaacgtctgcttacggcgggtatcagatctgttaatgccagttaacgtttcgggaattttggcctagtcaacattttgatttgtgttaaatagcgggtcaacgtttttatcatattttatttgactaatgtcaaagttcacatattgaatatccactttttaaaagttcatgtataaaacgacatttttataaacttgacgaagaatctatctacctccaagatttgttattaacggaacttgataagacgttggcgtgtaaattttttcataatattgtggtaccgatgaaattcaaaaagctgtcactgaacggtgattaatatcgtaataaataactaataaattgtcgaacgattctttttttctttagtaatgttgataggcttatagctaatcgcctaatcccctacgtgtgaacactagaaatagcctgaagagacaagtttactagtactatgccattgaaatgcgtgacatttacagtgatacaaaattactattgctttcctttgttagtttagcaactaaaatttaattaaatggcttctgacaggagtatatttaaaggcttaaatttgatttgtgacaatttaaagtcctttatgatttgtgaaaaattttggattcttttttaaccaagtgattaaaacttatctatatcaacaatggtcttttataactctcttgcttttgtgtttaggtacatttaacgaaagataaagaaacaaaaagtgacgaagaagggtttaattgcaacacttgatactttatggtttaaaatacatcccaaatttagtgagtgatttgtagtttgacaaatttcgaagaagggtttcattgtaacatttgatagtttagggtttaaatcaaatctcaaatttagtaaggtaggtttacataaacaaaaccaagaagttgtgttttgttttgcaattttctcaaagacaagagtacgagactcgtcgacgtctttcttcctcaacttcgacaaaagaaaataggattatttcagaccataagtcattgtctccgcctacaaaatcggcgattattaatcacattgtcttcttctatgtttgatccactttaatctcttcataaacatcatttttcctctaaaagctttttcctttactcatcttttctcttctgatcaaaattgtgaataatgggcaccaatcagactcagatctccgatgaatatgttaccggtaacagttccggtgtaggtgggggaatctctgatgtatacggtgaagatagtgccacgttggatcaacttgtcactccttgggttacctctgtcgcaaggtacgatcataatatctttttcagggattttctattcaagattcgcaaaatatttcataatttcttgatttggaatcttctgttaaaatgaaattgatttatttgttataacttgcaaaccaagaaatcttggatctttctattcttgttgtataagaaagaaagagagatttttcttacaaaattagtaatttttttgaacagtgggtatacattgatgcgtgatccacgttacaataaaggacttgcttttactgataaagagagagatgctcattacataactggtcttcttcctcctgtagttttatctcaagatgttcaggtgaatttttatgtttatgatttgagtaatatcttcattttcttttgaggttatgttaatatgagtttgcgtgtttataggagaggaaagtgatgcataatcttcgtcagtatacggttcctttgcaacgttacatggctctcatggatcttcaggtgattaaatgttctgtttttggtttaggtattgtactgtttggaaatgtgagctggtgaatctgaatcttttaggaaaggaatgagagattgttttataagcttttgattgataatgtggaggagttgcttccggttgtgtatacaccgacggttggtgaggcttgccaaaagtatgggagcatttataggaggccacaaggtctttacatcagcttgaaagagaagtaactgcgatttaatacttgtctacaatatcattctattcattttatttgcatttttaagtaaaatgtggtatttctgaaggggaaagattcttgaagtattgaagaattggccacagagagggattcaagttattgttgttaccgatggtgagcggattctcggtcttggagatcttggttgccaggtaaacagagttttaaccaacctgaaacacttagtctctctttgatcttatgttgatttggatggtggggaagttttacagggaatgggaatccctgttgggaagctttctctttacacagctttgggaggaatccgtccatcggctgtaagtaacgataaaagcctgatgaatgttttggtgcttatgtttagtaataagtgtacactttattcttcttgtagtgccttccaataaccattgatgtgggtacaaacaatgagaagctgttgaataatgagttttacattggccttaaacagaagagggcaaatggcgaggtttcactactatctttctagtttttatgcacttcttgtgtgtttaaagatcaatgtttcggaaactgaaaggtctagtttcttgtattgttcaggaatatgcagagtttttgcaggagtttatgtgtgctgttaaacaaaactatggagagaaagtgttggtgcaggtaaattatatcattagcttcttactaaaaacttttgtttttagtattatgttgatataataacgtttcgtttcagtttgaagattttgcaaaccaccatgcgtttgagcttctctctaagtactgctcaagtcatctcgttttcaatgatgatatccaagtaaaaacttgtgttcaacattcgtatcatttgtaagttttttgaaaggtgcctagtagcaagaatttgttttgtatgttttaaattgtagggaactgcatctgtggtgcttgccgggcttattgcggctcagaaagtacttggtaaaagcctagctgaccatacctttttgttcttgggtgctggagaggtgagaccttaaaacatataccaaatgaacttttttttgttaagtatttgttatgttgctaaagctttttatcttctttgaaggctggaaccggaatcgctgagctaattgctcttaaaatttcgaaagaggttagatagtttttcgcggttccgcgccttcttgacatttctttgattcctttgctccttcttaccaagaacctgtgactgtattgtcttgtagactggaaaaccaatcgatgagacccggaagaagatttggcttgtggactccaaggtattgttggctacatgattgtttgattttgatttcttgttcatttacaaaacattctttttggattatcttgcagggactgattgttagcgaacgcaaagaatcgcttcaacatttcaagcagccatgggcgcatgaccacaagcctgtcaaggagctcttggcagctgttaatgtactttaataaactcatcttaaatctcttcatgagtagatgaaaaaacatatctcagacttttcgttcttgtcttaaatcaggcaatcaagccaactgttcttattggaacctctggtgtgggtaagactttcacaaaggaagtagtggaggccatggctaccttgaacgaggtttcttttgtttacttctttgaatctcatttctatctagctatgctcttgtttcttatgctcatctttgtgtggttggttacagaaaccattgattcttgcactctcaaacccaacttctcaagccgagtgcacggcggaagaagcttacacatggaccaaggtaacaatcaaaagcttattgatactctcacaaaatgtaaatttgcatatatttgatgcaactatgaaaaaagaattgtgttttgattatagggtcgtgcaatctttgcaagtggaagcccgtttgaccctgttcagtatgatggcaaaaaattcacgcctggccaggttcgttgattttcttttaacattttttctctataattcatggctcatgtccttccaataacattcctttttcaggcaaacaactgttacattttccctggtctcggtcttggtttgatcatgtccggtgccattcgtgtccgtgatgacatgcttctagcagcttgtaagtacaacacactccttttaaaactgttattaaaaaattgacgcattgtgatataacactgcactctctaagttggccctaaatggttttatggtactagcctaaaagctaaaatacaactcttttctcataagtttgttactttgtttccatacttaacctgccatataatttttagttgttttagaagatattttttttgttattccggttcatagtctttcatttatttcgcttattagtcaattaaaaatccgccaataatcacgaaacattatctagatcatttgtcacgaaaaatttcactattactattaagaccatttgtgtttttaaactatttgttctatcagcggaagcgctggcctcccaagtgacggaagagaattttgcgaacggactgatctatccgccttttgcaaacatcagaaagatctctgctaacattgcagccagtgtgggagccaaaacctacgaactcggttagtttcataattcttgttttttgatcatattaaaaataggatcagtccaaaaaaaaaaatctccatggcaaaaatcttatgtcatgtacatgttgttgttgttgttgttgttgttgttgttgttgttggttttgcaggactggcatcgaatctgcctcgtcctaaggacctcgtaaagatggcagagagctgcatgtacagtcctgtctacagaaacttccgttaaaacattctttttaacatttttggctcagctttttactttttgcttttcagttttggtgctttctatatacgacaacttctaaactatttatacttttgctttaactttaaataatgaaaccttattaacttttatgaattgtgaaataatccattactcatttctttgccgtacgcgtgttaggttatggcgttttccggacattaaataaatttaatttaggtaaatctgcagtggaacacaaatgagacgaaataatgggggaaataatacagttaatgaaaagaaaaaatagatttagaaaaatgataaaatttgtcattgtttggagtatcatttgtgaatttgccactttcactaaaattttgtggatttgtctttaagctataaaaataggattgacaaagcgtttcacatgtgatgtttgagtttagttggttacttttgtttttaaaatttagtatttgttataaagtatgtattttagcaaaaacaaatcgtaaatttaaactattcaaataataaaactggcaaattcgtaaattttgtaaggaaaatgacaaaatccgtaataatctccataattaatataaagtcttatatatctttataatatattaaaaagtatttattcaaaaaatatattaaaagggaaaagaataaagcgcaaaggagtgtaaaagagaatatttgaagtgattttgggcctaaaattataatcattgcaaagtcaatgatcccatccatcattaatcttaaaagtcaagaaaagataaataaataacaataaattggtagataaaaaggtaaatttgcaagtggtggccctctattagtagcaaagttatttatgataatgatgattgtttgatttctttttgttagaatggttatacattcattgaacatctatactggttcttaacctttttctttcaaaatgagaggcatgcctaaatgtgtaccgagtattagtagtttagtaccaagatgttcatcataacttcttcttttggaacatattatttgccattttatttttatttttatttttatttgttttgctataaaaataacaatatagagatttatccgtctaaaattacgttgataaaatgtttaagttaattggattttagatgtttaaaattctttttatattgtttagctaacaaaaagctgataaaatttatataactcttaatttgaaaatttgtattatttatacattatttctaccaaaatgttttgaaatatattatatattgattcgtacatatatttttctaaaattattagataatgtatgattgagcatagataaatttagtttctcagattagttagcattaacctacgcatcatataaattattttatgttgttaacaaagtaacacacatatttctaaactaaattcgagttataacaagacaacaaactaatctatattattaattggaaagcattgtatgaactacaacattctaagagtagtttaaaattaactaaatgaatctttgcataggtaatttagtaaattaacaactacaacaactaaataaatatcttggattttgttcttttaaaaaattgaatttaaaatcaataaattcataactacccgatatttttggaaatcatttaaaaacatttccataacatatcaggctattttaattcgaattgtatatatgaaaatttatttattttggtaatatgttattagataattcggaaactttaatctaatttaataacaaattatcatttagtttagattttaaacaatttctttaacaaaactatgttaattgtttctcattagtacacataaaaatacgattttagttatgatttagcatattcaaaagataatttttggattttagatttgtaaatatctagaagatattatcagtatagattcaaatatttaacattttaattagaatttaaatgatataaacttttaaaggatttttttaaacatgtaattttcattattttaaaaatatatcgctaagctaaatttgaattatatgaaagaaaatatatttttaaacgtattataatagatacaagcttttagaatattcattcttctagatttgatttttttttaaacaataaaacagagtttaaaataccaatgtttaaaatttttaatgcaaatattcaaaatgagaaaatattgattcacaccaaaaatattttttcttttaaatttgaatgacttttttttaagaacaaatagtaatatgattattttgacagatcaataattgtattcgaacaataataactaccatatttgcgataatgcataaggataagtttgatcaaaaaataccaaaattgttgagattatagtaaattttagattgaaaaaaaacgcaattcagattagtttattcagtaaagctaagattgaatccaaattaaaatctaattttccgtacaatccatctcttataattataaatgttatgcatacattcacattgcctcacaatcaatctagaatatcgattctttaaaacaatatatagagattcataagtaaagtacttcatattctaatgatgtttatcttctaatattactatccatctatgcgtattcttatggatttttgtttcagggtcaacactagattataagaaactagattatagttatacaatcttaaacaataaacaaaacaaatataacttaatttaattttttatttttaactaaaatcaactaatttaatagtttataaaaaaaccaaatactattatttaacataaagaccaaatactattatactttaattataaaaactacatcttattgaaaggtatacactaaaaattggttttatatactacaatatcataaatttgtaaatcacaaattatttttaaatatattaatccaagatgtaccacatgtcgatccgtcgatttttatatatattagaataacaatatttaaaaataacaaaatgattttcattttacggaatgaagttatatggtggaacgagtttgggttgatattaatacgggacgataatctacgagtaaaatcttagaattaataactataacataattatataatcttaaacactaaacaaaataaacaatatttacaaaacaactatatcttaaaatttgaatttttagttacaaaaaatcgaccaacggtgtaccgcggagttaaatttacattatatcatctaattgatcaaatttcaaacaaaaacaatcaatttatatatacatcaaactaacaaaaatacacagattttccaaatatctctatatattcagcaaatccaaacaaatctaacaatatatttaccatgcaaaatataaataaaatataaataatataaattaataaaaaaagttagctattttatcataattaacactgtacactgttctatgcatattataatttatacactataatatttttaactaaaaatgtattccattatatttatatacacgtatgtgcagggtcagaatcaagtaaaaattacactataagctctgtcattattagtgtgatgattagtcatggtatattggtctcggactctcggttaattaatataaatcggctgaagaaattgttttgccccgagttaaaaagaataaaacaaataggtgatgacccatgaaaaaaggtcaaaagacaaaagagaatttctagattgccacaaatttctagacaaaagacacaagataagtataaaccaattcaactataagaaactgtgaaatagccacaaattttatgtgtctatttcaacagttttatttgtagtattttgagcgttgacccattttagttattttcactaatcaaattacagcttatttgattatatgccatagctattaagtttttttaagattgagttgaaagatccttaaaccatcttgatatatttctaaagttatacttgattatgtttaagatgacttttcatgggttggcaatttccgtaaatcaatcgattatgtaacttgaaaaaaaggacaaacattatggaggccaaattagagtaacaaaaaccaagttggtagtggacttttcgtgaaaaaagagagaatttgtagtggaattctaagtatacatacaattaatatttgcagtacttatatatcaaataaaaataaacagaagaaggttagtaaacgaaaacctactactttactccttttattggtaggtactcatttaagcatgcctaggaatctctttcctctttcttgtttccttttctatgtcggcctctactctccaagaatgggtgtggagatgatcatatgatgactatgttgatgatcacatgatgacacaaccatgcatgatacatttctttgtctcatgagtcacggtgacatacatgaattttctaaaatacatgtgttacaaatgtcatgcataagagaagcaattgtacatagtttatatgattatagttttcattttctaagtaagaatagcattcattttcatttttcaatatgattttaattcatgtcactagctaataaaggggtattactaatcactgttatttatatatctctttgtttaaattggtttatgtgtatgtgttggatattcattttgactttggtgctatggtagcattttagttctttggtaattttcggttacccacatctttttggatcgaattagaatgataatggacacgtctagacagcgtaataatttggtgattacatctaagatttttggaatcatatgttttgtaattaatcagagttattcggtagtatgagaccccacacggctatgaaccatgttaccatatattctaagtgggtttttaatttgataaccacctacctataactctaaattagtctattggatttttctaatgatcatcatataaatttattctctttatataatagtaatcgttgtaaataatatatgtgtgtctcccatcaatccgcatcacattcgtagaatcatacacgtatgtaaacgcatttttgacatacggaaaccatacaagtaggatctgttaggtggttattaattcaaaataaaatctcttttcattagaaaatataaagagactacttttataaaaagattgggattgtagttccttgccaaccacccatataataatactccccaacaccaaaaacacaacacaaacttagaaaaatggaagaagaaaagagattggagctaaggctagctcctccttgtcaccaattcacttccaacaacaacatcaatggatctaaacaaaaaagctcgaccaaagaaacatcattcctttccaataacaggttctcttaatctcttctcatgaatgatttgaatcattcttgttcattgtagatgtcttatatgataataaaataaaaataaaaaacaaaatcctggtaattctacagttttcggagattagtttgggtttcggtatctagttatcaaaaagtatttgtgtatatgttataactagatatggctaaaacagggttgaggtagctccagtggtgggatggccgccggtgagatcatcccggagaaacctaacggcacaactaaaggaggagatgaagaagaaggagagtgatgaagagaaggaattgtacgttaagatcaacatggaaggagttccaataggaagaaaagtcaacctttcagcttataacaactaccaacagctttcacatgccgttgaccaactcttctctaagaaagattcgtgggatctaaacagacaatacactttggtctacgaagacactgaaggagataaagttctggtcggggatgttccttgggagtaagttttaaatcaaacaaaactaattccatttttttttctggaactgaatatgaacttactttatcaaaaattcattttatatctatctacttttgtttttgtcgaatttaacaaatatttttagtatgagttcctaaaaagagtttggccatttctcatcagattattattttcctttaaaggtcatatttttggatatttatctgataataatttgaatcattggacatattaatgatatagtttactttatttgttaggatgtttgtatctactgtaaagaggttgcatgttttaaagacctcccacgccttctcactctcacgtaagattacaattcttacgaaactttttcatacatctcatcacttaattactgccttgaaattaacttatatatttatttattttttcacagctagaaaacatggcaaggaatagagagaggttggccaaaatcatcagttcgatggtttgtttttaatgtaatttttgtggaaactaatggggtttggctttgatttactggttttctttttcacttatgtactaggtttttgcttgctatgttatttcttgttttggttgtaaatatgctgttcgtttaagaaatcgggggttagtatgttatcgtgtgtataaaaatagtgtaagcacgtaagttgattacaatgcctgatatgattcatgccttcgtttcgttttttagtagggaaaatggtatttaattagcgaaatcaaaccgactcattttatgtttttttcagagaggtaaaaatccagagagcctgtttactatgtatgagtaaagattacccgaaataatagagaaatagatacaagaggctatccaagtttggtgggttcgagttttataacaccatccaaaaaaaattgttgttttgtaacacacatgagtaccaattgtttatttcacaaaagacaaaccatttatttcatgaactgtaatcttgttatgttcatgaattatttcggtataacatgtaattaactcgagtaatatcttaaaatagtatttagagtaaagatagtagggagaaagatactttatttttttataactcatataattttaaaaatttcatacacccaaaaattgattatggagtatggaaaaaccatgttaaattacttaaattttggtggctaatactactcgaactcagatggtgaaaacgactttagacttcattaatataaatatatatatatatatatatatatatatatatttatatgagtttttacttattgtcaattggttttggaattagtaatctatgaaacttaacatagtatcagtctatcagaggttgaacattcgctgacccgttaatccaacttggaaaatggtccgattacctctactaattgatgatccaaagaaaaactcaattatgtcgagataggtaaaaaaacattattttaaaagaaataatgaatttaaaattagtaaataaaatttaaaatttaaaaattctcctataaattttgtgtctcacaactttctttcaaactttttttcttcaaaaatataccgtatgctgatgaaatttttatctttaccaattaagaatataatcttttgtttccatctcaaatcatcatcatcacctccaaagcgtttagcaaccccaaaaccaaccacttggcgactacacagtattttactcaaaacatcacaagtttctatgaaacgtaaaacgatgagtttagtaaaaaaaaactagagattatagtcagaaaaactataataataagaagataacattaaacggatagattcatgtctcttttttgaaatccaaaattgggtaaaatccaaaaaccaaaatcttgccaaatgccaataagagcaaaaatccaaactttcctttctcttcactattacacaatgaaatcaacactacattttcacatcaaaatcacattccttccatggccttcttctccatgatctccattctccttggctttgttatctcctccttcatcttcatcttcttcttcaagaaacttctctccttctccagaaagaacatgtctgaagtctccactctcccctctgttccaggttttttttttttttttttccgattttgtaatctgggttttgcgattcataggtttggtgactacttctgtttcaaagtttgaaactttctttgattctagtgatttatggaactaaaaatttgatctttgagaactttaaaagttgggtttttgatgtagtggtaccagggtttcctgttattgggaacttgctgcaactaaaagagaagaaacctcacaagactttcactagatggtcagagatttatggtcctatttactctataaagatgggttcttcttctcttattgtcctcaattctactgagactgccaaagaggttagctttctaggtttgattgatatgtttggaatcgaaaaatcgttcctttttcgatcttgaacacatgactaaagccttacacaacttgatgattgctcttgtttatatgattgtagtctgaacttatgtagaaaagttgagttgatgtcttctcttatcgtttaggttactctttatgtgtttgttttcaggccatggtgacgcggttttcgtctatctcaacgaggaagttgtcaaatgcgttgacagtccttacttgtgacaaatctatggttgctactagtgattatgatgatttccacaagttggtgaaacggtgtctcttgaacggtcttttgggtgctaatgcacaggtgaattcattgttcgtttatcccgcagcttctccttggtatacataatggcaactgaatcaatcttttgtgttgtgttggttttttttgcagaaacgaaaaagacattacagagatgcactcattgaaaatgtgtcttccaagttgcatgcccatgctagggaccatccacaagaacctgtaaacttcagagctatatttgagcatgagcttttcggtgtagcattgaagcaagtgagtgtttcgcttatcctatacatcatttcttcgtcaacataaagtatgaaaatggatttttggttttgttttcataggcttttgggaaagatgtggaatccatttatgttaaagaactcggtgtgactttgtcgaaagacgagatcttcaaggttttagtacatgacatgatggaaggtgcaattgatgttgattggagagacttcttcccatacttgaaatggattccaaataaaagttttgaagcaagaatccagcaaaagcataaacgtagactcgcagtgatgaatgctctgattcaagatcgactgaagcagaatggttcagaatcggttagttttgtttgaatagtctttcatatattgcattacactgctgatctaatctctacttataaacaggatgatgattgctatctcaacttcttgatgtcggaagcgaaaacactaaccaaggagcaaattgctatcttggtttgggagacgattatcgagacagctgacactactttggttacaactgaatgggccatctatgagctcgctaagcatccaagtgtccaagatcgtctgtgcaaagaaatccaaaatgtctgcggaggagaaaagttcaaagaagagcaattgtctcaagttccttatctcaatggagtctttcatgaaacgcttaggaaatacagtcctgctcctctagttcccattcgctacgcccacgaggatacgcaaatcggaggctatcatgtccctgcaggaagtgaggtaaacctacctattactctcaagtcattcacatttgaagttcacttacaaagtctagtttcaaaatcttgatgtgtagattgcaataaacatatatggatgcaacatggataagaagcgttgggagagaccagaggactggtggccggagcggtttcttgatgatggcaaatatgaaacgtcagatcttcacaagacaatggcgtttggagcgggaaagagggtttgtgctggtgctcttcaagcatctctcatggcaggcattgctattggaagattagtgcaagaattcgagtggaagcttagagatggcgaagaagagaatgtggatacatatggcttgacctctcagaagctttatcctcttatggctattatcaatccaaggcgttcttaagacagaaatctcttctttcttttgttagtttttaaccttgtatcaacttttatttgtaacaaatgctgttttgtagtactatttatgttttactgtgttatattttactatcctctgagattgcatcatcttattgattcttataggatgctgatggaacatacctagagcaacaagataactaaaacattgattaaagcaacatattaataggattgatgattgatgacttcgagcaaaaaaaattaaacatgactttttgagtttttagatgtgaaatttggttgttttgctgtgtggatttccaagtgtctatttttttttttttttttgtgtctatgtttttgatttgtcaagatttaagttatttaacccctaacgactaagctaaccacttgatattgtcgcatgtgtacaaacgggtcaacgacgtaacgagtacccaaaattcaaatctcttaatggataactccacctgatagaaactctttaatttcaaagtttgtatacatttcatattcacagtcaaactcggttgccgaaatttcccggcaaaacctctgacaaaccaaaatcccagaatgacttttttacccttacttttcatcttcttcttcctcacatcaataccctttcccgccttttcccagtacaacgaccggtcaacgctgctaaacctgaaacgcgatctcggcgacccattgtctctccggctatggaacgacacatcttcaccgtgcaattggccaaggattacctgcaccgccggaaacgtcaccgagataaacttccagaaccagaacttcaccgggacagttccaacgacgatttgcaacttcccgaatctcaaatccctaaatttgtcgtttaattacttcgccggtgagtttccaacggttctttacaattgcacgaagcttcaatacctcgatctctctcagaacctattcaacggctcacttcccgacgacatcaaccgtctcgcacctaaacttaagtatctcgatctcgcggctaactcctttgccggagatatcccaaaaaacatcggacggatctcgaagctcaaggtattaaacctctacatgagcgaatacgacggtacgtttccatcggagatcggagacttatcggagcttgaagaacttcaattagctttaaacgataagtttacgccggtgaagcttccaacggagtttgggaaactgaagaaattgaagtacatgtggttagaggagatgaatctgatcggagaaatctcagccgttgttttcgagaacatgacggatcttaaacacgtagacttatcggtcaacaatttaacgggtcggatccctgacgttttattcgggctgaagaatctcaccgagctttatctctttgcaaatgacttaaccggagaaatcccgaaatcaatttcggcgaagaacttggtacatcttgatctctccgctaacaatttaaacggttccattccggaatcaatcggaaatctaacgaatttagagcttttgtatctctttgtcaacgagttaaccggagaaatcccacgggctatcggaaaattaccggaactgaaggagctgaaactctttaccaacaagttaaccggagaaataccggcagagattgggtttatttcgaagctagagcggttcgaagtttcggagaatcagttaaccggaaagttaccggagaatttgtgtcacggaggtaaacttcaaagtgtgattgtgtactcgaacaatctcaccggagaaatcccagagtctctaggagattgtgagacactctcgtcggttctgttacagaacaatggcttctctggctcagttactatatcaaacaacacgcgtgaatctttcgaacaacactttcaccggtttcaaaagattaacgaaatctaccgtgcaaccatctatgagtgacttgttaggctccaacaacaatttcactggaaagattccatctttcatatgtgagttgcactctctaatccttctcgatttatctaccaacaaattcaatggttcaatccctcgttgcatagcaaatctcagtactcttgaggttctaaatcttggaaagaatcatcttagtggaagtattccagagaatatatctacaagtgtaaagtcaattgacatcggtcataaccaactggcgggaaagcttccaagatctttggtccgtatctcttctcttgaagttctcaatgtggaaagcaacaaaatcaatgacacgtttcctttttggttggattctatgcaacaactacaagttcttgtccttcgctccaatgcattccatggatcgataaatcaaaacgggttttctaagttgcgaatcatcgacatatccggtaatcacttcaatggaactttgccattagatttttttgtcaattggactgcaatgttctcacttggaaaaattgaagatcagtacatgggcacaaactacatgcgtacaaactattacagtgattcaatagttgtgatgataaaaggcatagcattggagatggtacgtatcctaaatacctttactacaattgatttttctggaaacaaatttgaaggagagattccaaggtccgttggtctactaaaagagcttcatgtgctcaacttgtcaaacaatggtttcactggccacatcccatcatcaatgggaaacctgatagagctcgagtcactggatgtttctcaaaacaagctttcgggagaaattccaccagagctagggaaactctcataccttgcgtacatgaacttctcccaaaaccagtttgtaggtctagtaccagggggcactcagtttcaaacacagccttgctcttcttttgcggacaacccgagactctttggcctttcacttgaaagagtttgtgtagatatccacaagaaaacaccacaacaatccgaaatgccagagcctgaagaagatgaagaagaggtgatgaattggacagcagctgcaattggatccatacctggtatttccattggattgacgatgggatacatattggtttcttacaaaccagaatggttaatgaactctggccgaaacaaacgcagaattaaaccaatataaataaatatcttcaatacgcttttattgcaagaatgtgttctcatggccattaacttgggagctaggaacgcttacgaatttgaaatcaatgtatttgtctaacaaaatgtcaggggagagactctagcgagttttgaatctcttcagaaacaaactccacggggaaatatcggatttcatcggagaattgccatgcttgaagtgttacaactttggaaaaacaatttcaacggaagcatcaactgcaccattataagtagtcttagaggcatgctcacacgggtgagattatatatggacttaactatgtagatgtttattttttaaaacatcacgattgtaagatgaatgttgtaagtgttcgttgagatcgaagaaaactcatagtatgagtttagtcgatcttctggagtagtatgttttcagcattgtttctctttgatcctaagttttttatggggtttaaggttcttttttcttataaaggaatcaatttatgttttggctatataatatgcaccagtttatccattctatgttttatttaacattttttcttttttgaattctctttatctccttcaaaatgtataatattaaaacagcaaaataagcatcaccaaatcacttttacaacaagttatcaataactccaaccataaagtaaaactcaaaattcttctccaaccttactctatattggactctaaaatagacatttctgcagaattactctatatatagagtaaatctattctctactctattttagagttgaacttttttatttatactctggtccatcaaatttatttatttttatttaatacatattatcattttacgaacaacaactacaacaaatagttttataaaattaataagtaaataattactaaatttaaaataaacaacataagaaaactaaaacataaaactagcaatttaatattccggtaaattgcttgtagatccaccaagatagttaaaatattgtccaaatgaagtagatggaggaggagtttcttgatattgatcttgttgttggacacgtcatttttgtaaaatccgtgcttattcaatctcaaaatatgcacgaatatttgggttttgaacgaaattcaaatcacaaaataaaattttgttttcttcctttaattgatcatatgtgggaaaaaatattctaatggtgttgtttaaaataaaatttgtaatattttattattgttatatgatgtaatgtttttttaatatataattagtctttaatttaaataatatcatattttatgggaattttgcaaaactatgatatatgggctcaaattgtaaattatataatataaaatataaatagaatatttctaaaaatattttttttagagtagaaaatagagatatacatttgagagaaacccttctctattttagagtaagatatagagctatacattggagatggtcttacaatcatcaacaaacttttgctcgttttttttttcgtcagttgggttccttagaacatctccatctttggtttgttatcaatttagtttggctcagattcgaggtatcggaaaggttctggtggttggaggttcttggaccattttttgcgccatctctggtgaagtctaagacagcatgcgcagaaacctaatcacaatagatgtcttcactaactaactgactagacattctctctagccaactgggcattggttcaagtctatttttgtcaagacccaacttcggtttaattggctcaacgtttcctcaccttggcccagatatgtgtttccttttattttagccagcaagctaggtttgatgttacgttctttcttcaaactaaacgatctagtctcccaatttcgacatgccttgtcttccttatcatgattttacccactacggtttagaactatattgattatctctactcgatctgtctccaaatgagcacttattgtagaagctagtttctaccatctctgatcactcattcctggaatcatagtcgtgtatctcggcttctcgaaaccgaacccattaagccggtcaccaccttctacggttactcatggaagcaattcaaagtgttaaaatccaacatctaagtaggcttccacatcacaaatcggctagctttcaaatcgtatgctaatgttttatcggcctactattagacctcgggggtcatcggcgtccaagcatctccatcatagtgagaacctcgactccgccttcctcattcatggagggaaacacttatcatcatatatggaaaaaaccttcccaccaaaaacttctatatcaggtttacagcttgtataacaagaagtcttttgactattctaaccgtttaactatcgtatgatgtagggtgtcttgtgtcagcgagacgcgaggttaaggagttttcttgaaaggtttaatgtcaatcaacaaggaccattcaccatattatcgtgttgttcgtgattgtggttcgactcacccttttctcgcatgtggcctggtgcttttgataagacccaaaataggctatcaagttaagtaacagaaagagatgagatgatagaagaaataaggtgagaagcagaagaattcagaagtagaaaggagaagaacatgagagaaggaagataaacattgtttggatgatcttaagcgatgatcctttacagagatgaacagagagactaaatagcaagagaatcctaaacctattgggcttaaacgatactaaatgacgcagcctagaaagggcccaacaagagaataagcgacttatcaataccgtcccgttgagatccaccttgtcctcaaggtggaaggaaatgaaagcttggaaaagttgtcttaactcttgtcgatcctgcacctgcaacctttttcttgtccatgatgaccacatcaaactccttgatcagtttatattgtctccaatctagggtagcaaattccctagtctctacttcttgtctctcaagaacctccatgtcttttaataaacagactagccttgaaaatgcagctttaagagaaatgcagacctcaactactccaatcaaatcagcaatccttaccttctttgttaaggttgccatcttagacacggtttgatccttctcacttttggttggcatgtattgagtacttccagctacaacttcattgtgtttcaccacggattgcacaaaaaattcaatctcatcgccattctctttagcaaccttccctgatcccaacattgaaacttcttccagatattcagcccttagctccaactcttaactttcaccactcttgtcatgtccacattgtatttccttaacgcttcctccacatgcaatctcactctccccttttaaagccaccttgtcctcaaggtagtaataaagaacaattccaaaatcatcttttagctcactcctcatctttacttttgtaggactttggtcaaggtcttcacccttaactctaagaatgatcccagcctttctatcttgcctatgcatttcacagatggatcaacgttgtaacacttatcaaaccctttcccatgagctcgattaactagtatgaggaaccccccaggctcccatactcgacttgccagaaactcagaaaacagttcccttaaaagcttagagactgagggttggtttccaccaaaacaacaatttggaaagaagtccttacttgtctgcatcttctggcctacaaatagccactccaccacataagccatgcatctgacaatttccagcagagaacctttctcattaagctccttaaaccatgacaactccttaatctctagaccgtgaagtgcgatcagtaacttctgattcaatcccaccaataaattcacgaatcttgaaaaattctgcctcactaagcttcggttaacaaacagcaacatcaacttttgtttctcatacccaactctctctgttccaatccatgctacttgatcaaaactaaagaattccttgaccctaaatcttcccttcacttggtaacgcttctctaacattttccacttctctagctcagcagttactccccaggttcccaaacgtgattatcaagcccagagatgaagtgcagagttccatcttggattgctagagcctcaactttttcaccaggacctagttgctccagagagataaccccaactaccttacctttgatagtgatttccagagtttcgatttccaacattcttggcagtagtttcggttccttattctcaccaaagtaatgatctatccagcctagttgaagttgttcacataagatttctccaggatcccagctaaaaacaaaagagccaaaaggtttattcccattcatgaagattcttttactcatacacaagccatctatttgtttctctactatgccatgaatattactcgcattccctatctcatcacttatttccttcattgtcatgccaaacgtttctgtcattctaagtaaaatcacttcaccagatttttgtgtaataatctgaaaactatcatgtatgtggcattgttcaatacaatttccatttgtgaagtttgtatcaaggtgagagagttcaccttcaacgctcaccatcgacgattctttaaaaggaggaaacaagaacgaatgagagttgtttttcttcactttctttgcaacaacacctgatttgtagttcgatctaaatgaggctatcacaactcgatacttgtcccgagatcttcgtttctgaaattggtgaaattgctgcttgaaattgctgtttaacaccaaataataaaagaaagaaaactctacaatttcatgtcacactaatcggattttttgtaatccaaatgtcgagagtagtccgaagatataagttcatagctgaaaattataataaagctaaatcacaatctttaaatctgtagtgaaaaaacacacaccaaggaatcgtaatatacgtttcgtgaaaagaaaaatatatttgcttatacacttcaaacacctaattgacttttaaaggtgtaccattttgtccagttactattaaaagaaaaaaaaaattcacaaaaaaaaaaaaaatcacaaaaacaatatgtgagagttgtttacaaaacaataatcgatcgtgaagacagctagctaaaaatattaaggggtccgcgcatctggattttgtttttatgttttgacaattctcttctggaatttcatgccgttgaatcgaatagtcaacgttcaaaatcagacaacgtgtataaaaaatattaaaatataacaaatgtgttactaactttttaagatacctattttttaatgtatggtgagatcattttaacactgatttatttatttttcattatttattttttgataaagatcatattgattattgtttccctatagtcgctccattatatataataaaactaaacagaacttttatatttgtgtttacataaaaacaaatattgtttttggtgaggcttagaatcgtaccaaggtagagtagcaaaatcgtagaaaactggaattattcaacgaataaaaaaggtatggcaaattgttgttctggttagtcattttcattacggaatattttaatacataaacataatcttgattttcggaatgatgtaattggtacaaaaatgtgtgacagcgaaataatccagcaataaactcattttttggctcataattatggttagattggttttttcaccattgtgtttgtaagactgtttttgtttttttggcatatgtttggatcacaaaacttgccgtatagttttatgttttcataaataaattttagttgttgaggatgtactcttacagatgctgattcaatttttaattcccttacttcatagattattttaatgtatatgtattatcattttgatgtgtaaatggttttaaaagtttctagaaagtttggtaaggtaaaagaaaacagaagttgcttccgatatttcaaaaatattacaaaaaaaaacaaaaaccaatgaaaagaagagaaacgaaacaaaaaagctctgtttatatgatatgttgataagtgttaggatttgaatatatttctttttttgaaataaccgaaatagatgataaagggaaacttatactaatgatcttagaagcctacaaaaattgggtattctaccactatatagtagccactgccacagtagttaataagatcccattaatttccgttggttaaatttacattatgattatattataaactattggactacacattatggctaaacagagaaagtaacactatgatagtatgattagttggactacaaattatgattacaagtcgtaaagctggaaatttcctataagttcccctgtaactgtttgctacaactacaagtctacaaaagtgcgatttgtcgcaacccaccaaaatttagtgctagtattaagaaattacactatctatttattttggtcaaattaacaataattaccgttaagatcactagtaagttgtaatttattattagaaaaacaaattaaaacctaggttgcctggaaattcgttttgaggtatgttttccgttttcgaaacgtttcggaaatagagactcgtcggaaacacaaaaaatgttacgaaaacacgtttttaaaaaatctatttttggaaatacgatggatccgaactagtcacacgacaaatcctttttattgactttagaaatttaataaactaaattagaaatattaagattactaaagtatataacttattttgaaagactttgagttttaagatcttttgacaaaccaaatttgatgaaactaattaaaatgagaatgaaaatgttggtctaaattaaatatttgaacttaaacattttaatctatatcttttagaattttaattaacttatttaatattaatgtcttggacttgtgttgtttaagccatttttaatataatttcatgctaatatacatatatatatatatatgtaaatatatgtatatatatttccaaaatgtttctaatctctaattttagaaaaaaccgtttctcatatccacataatcgttttctttccatgcaacataaattaaaacaatataaaaaaaacttcttattttcttttggtaaacaagacttttgggcaactggtcttcaacaaacatattccgaagcaggctaattcggagtatatgagtctggagatcctttaaactttagactatgtatgtcctctgcaaaatttactctctggtttgtgaatcacctgttttaactttgtttataagttcgttttatggtttctgtaagattttactattagctacaatacaaaagattttgtaaattagggaaatttgcatttataacctacaaaaatattataattaagtaaataacattctcaaaaaaagcaagcaatattgtttgtattttctgtaataatgccaatactatccctgtttgaaatacacgcttttcatcttctcccttccatagaaaaccaactattttctttcgccaactattaacttttgaacataggtttggctctaacaaattccagtccaccgtttatgaagcttttgattttgccaacgattaacagaggtatattgggcacaaaaacaagacagttaatttttggaaatgacatttaggttttgctcgaaattgaattagaggttttgatttacagaggcacgactttagattttgttggggtctttggtttttttaagagactttggttttggtttttgaaattcaattagtcgagattctcgctaataagcgctgaatttgatcaatctctgttctctgtttccttcatttgatttctttttttcggtctctctaatttattggcgtcgttgtttccttatcctgaaccaataaatcgattttgattttgagaaatttttgagagatactattctattttgtgaatatactatttacgtataccttgtactatatacgttttaaaatgaattgtttgttttgattaaggatgttaagtgatttgattagtgttttatattaaaagtcttgggttccctatatattatcttagggtttagtatccttccatcaaaaagtatttaattgattatttggattcatcggaataaacgtttctatttaaacaaatatatactattctatctttctatgatgatctgtatagaatttgatatcactattcatttttttaaaaaattcgtttccgttttttaaaattcaaatcatattagataaacaaaaaaaaatctgtttttacaataatattattaactttaaccaaataatattgttaaactaataaagtaaacaaaattaagaggggtgaatatatattagtcatatatatttctctttcctcctgctagtggcttctctttctctccaagcgcatccgtgggaaagagttgagtgtattttcacaactgacatgtgctatcaaataaattacatacattatagtactatatatttaataactttttcaaaaaccgtcattttttgcaattcaccctataaattaacactttataaaaactataattaaaaataaaatgaaactacatgttgatatacagagcaacacctcccaatagaggtttggtgagtaattattatataacaatagtatcaatttattagaacaatcgaatcatattctagattctttcatcaatttttttttaaaatcattctagattatagataactttgactttacttccgacttttcaaacggcacatttttcttggcaatatatttcagagaaatggcctattaattactctttgattttttataatgttcgcgtctttgaattgaacaacccaacttttagcatactagctctttaagcacacttttatttttttcacaatttggccaataatgttctagaaggaccgcatatcatatgattagtcattattggtgcttaacggagactctgttttttgccaaattgaaagttttagatttcatgctaatagataagagtgatgttttaaaacatatttgaaaccaaagttccaaactaataccattagtaaaaatcatttacttataagttataagccctcgtcatggcccattttacatggttttggattttagatcgtaaagagaatacaacaaaactgtagacaaaacgaaatcaaaatttcgaatcaaaaagttgtacttgtacagtatataagtaactaatcgtcaaatgtgtatccagttaaaatcgtcacatatgtagatacaatgacgtaatgagtacccaaacatcaaatctctatttttattacaaaaaaaaaaaacacatctcatcgatgacttcacctactcttctctataaagacttgaaaaaaacttgaaaacttcttcaaagtttgtatccatttcacattcacagtcaaactcggttgccgaagaaatttcccggcaaaacctcaacaaacaaaaattagagaatgactcgtttacccttacctttccttttcttcttcctcacgtcaatacccttatctgtcttttcgcagttcaacgaccagtcaacgcttctgaacctgaaacgcgatctcggagatccaccgtctctccggctgtggaacaacacatcttcaccgtgcaactggtcggagatcacttgcaccgccggaaatgtcaccgggatcaatttcaagaaccagaacttcactgggacagttccaacgacgatatgcgatttgtcgaatctcaatttccttgacttatcgtttaattacttcgccggcgagtttccgacggttctttacaattgcacgaagcttcaatatctcgatctctctcagaaccttctcaacggctcacttcccgtcgacatcgaccgtctctcaccggaactcgactatctcgacttagctgctaacggattctccggcgatatccctaaaagtctcggacggatctcgaagctcaaggtattgaatctgtaccagagcgaatacgacggtacgtttccatcggagatcggagacttatcggagcttgaagaacttcgactagcgttaaacgataagtttactccggctaagattccgatagagtttgggaagttgaagaaactcaagtatatgtggttagaggagatgaatttgatcggagaaatctcacccgttgttttcgaaaacatgacggatcttgagcacgttgacttatcggtcaataacttaacgggtcggatcccagatgttttattcgggttgaagaatctcaccgagttttatctcttcgctaatggcttaaccggagaaatccccaaatcaatttcggcgacgaacttggtatttcttgatctctctgctaataatttaaccggttcgattccggtatcaatcggaaatctaacgaaattacaagtgttaaacctcttcaacaacaagttaaccggagaaattccaccggttatcggaaaactaccgggattgaaggagtttaaaatcttcaacaacaagttaaccggagaaatacctgcagagattggagttcattcaaagctggagagattcgaagtttcggagaatcagttaaccggaaagttaccggaaaatttgtgcaaaggtggtaaacttcaaggagtggttgtgtactcaaacaatcttaccggagaaatccctgagtcgctcggagattgtggaacgctcttgactgttcagttacagaacaatgacttctccggcaagtttccttctcggatctggaatgcttcaagtatgtatagtctacaggtgagtaacaactcattcaccggagagttaccggagaatgttgcttggaatatgtcgaggatcgagattgataacaatcgattttccggtgagattccgaagaaaatcggtacttggtcttccttagttgagtttaaggcgggaaacaatcagttttctggtgagtttccgaaggaattgacttctctttcgaatctcatatcgatctttctcgatgagaatgatctcaccggtgaattaccggatgagatcatctcatggaagtcgttgataacgttaagtttatccaagaacaagctttccggggaaattccgagagctttaggattgttgccacgtctgctcaatcttgatctatcggagaatcaattctccggtggaatcccaccggagattgggagcctgaagctgacaacatttaatgtgtcatcaaatagactcactggaggaataccagagcaacttgataatcttgcttacgagagaagtttcttgaacaactctaatctttgtgcagacaacccggttctcagcttaccggattgtcggaaacagcgccggggatcaagagggttccccgggaaaatcctcgcgatgattctagtcatcgcggttctgcttctcaccattactctgtttgttacgttctttgtggttagggactacacaaggaaacaaagaagaagaggtctagagacgtggaaactcacttcatttcatagagtagattttgcggaatccgacatcgtgtcgaatctgatggaacactacgtgatcggtagtggcggatcgggcaaagtttacaagattttcgtcgaaagctcgggacaatgtgtggcagtgaagaggatatgggacagcaagaaactggaccagaaacttgagaaggagtttattgctgaagttgagattcttggaacgatcaggcactcgaatatagtgaaactattgtgttgtatctcaagggaagattcaaagcttctagtgtatgagtatctcgagaaacgcagtcttgatcaatggttacatggaaagaagaagggaggtaccgtagaggctaataaccttacatggtcacagaggttgaatatcgcagttggagcagctcaaggactttgctatatgcatcatgattgtactcccgcaatcatacatagagatgtcaagtcgagtaacatcttgcttgattctgaattcaacgcgaagattgcagatttcgggttggctaaactgttgattaagcaaaaccaagaacctcataccatgtcagctgttgctggatcctttggttacattgctccaggtaatacccgtaaacaaaaaacattctttagagtcgaatagagtcgctcattgtgtgatctctaatatttttatgttgcagaatacgcatatacgtcaaaggtagatgagaagatcgatgtgtacagcttcggggtagttttgctagagctggtgactggaagagaaggaaacaacggagatgaacacacaaacttagcagattggtcatggaaacattaccaatctggaaaaccgaccgcagaggcgtttgatgaggacatcaaagaagcttccacgactgaggcgatgacaacagttttcaagctaggtctcatgtgtactaacacattgcctagtcatagaccttccatgaaagaggtcttgtatgttctgcgccaacaaggacttgaggcgacgaagaagactgcaacagaggcatatgaggcacctctactagttagtttatcgggtcgaaggacaagtaaaagggtagaagatgaagatttaggttttgtataatcaaataatcacaacacttgatgttgttttttttgtgaaatgtacaaatgtattagaaaccatttagtttttgtgtaagcaaagttttagttaagagtataactaccagcttgtaacttatttgagaacaaaatctgaaagtctgaataaaaaatggtcttaaagaatttgttattccttataataataacactcttattaagaatcaaggcaaaatatgcatacaaaacagagaaagatgatgattgatttgtgttacaataagaagagaaattatttagagtcttgctgaactttctttaactgagcctcggtgtttcttcttgcgccttgtagaatcgttttatccgcggttatgaagaacgcagcgatagaagctgttccaatgatcaccataatcacaagatagaaatcagaagaaaattgtggagaaatgaatgtacgaatacttaaaaaccccaaactcaactaggttcaaaagggaagttcgaggtttctacaacaatgttaaagctagtatcttttttctacttagttccaggaagaacatatagtaatgatttaaggcatattgctgatagagctaacctgaagaaataatgagtgcttgagcagtgtagttgaggtttgccttagcccacgggaacatacgaacggcagctacctgttacgaaaacaaggcatgcttatgtaccaaattcatatcttatatacacatcaaaaagaatgtgactctacttggtgtattcagaaatcacaaaatgaataggtaacaaaattgaaactcttgattattacagaacatgagattggtgagtcacttttgtcttaaaattcaacaacaaagaaacataactcttacatttaattcatttaagatctcaatttaaaaaatttagataagtgagattatatgattactgtgggaatcgcactggcgacggcggcaacggcggcggccttagctccggcaatagctccggctgtaacataatccaaagtcatcaatttaaaagattttttttaggggaaaaaagagagagagagacggagaaagaagaagagaccttgtttggaagtttcggctcgatggatcttagcaatctcgtcgggagaagctatgacgaagagattctgctgcctccggttacccatttctgaccgattttccattttcagtgtcgcttttttgatctttcgatttcaaggagagagagagagagagagacgggtcgcgatttgcctttttctttggttaggaaataaatgattaggacgaaaattaaaaattcgttttttttttttataagttgggaatctttcaccaaaataatgaaacgccaatattgaaaacaaagttgtcaaaatactatagtctataaaacgccaatttagaaatgtatttcaatcatgtatttagaataatttgtgttagaaaacagataaaacaattattatgttatagattatttttaaaataaaataaaattcagtggttcgtaaatgtttgttattgagaatattttaaattttagatttttagtatttttaatgcacaatggtcttttggagcggttttagaaatcgacttaagaaatgtttggagtcaattttgttaccatacggatatctttagagatataagaaattaatcgattcagttttagataaaatttataagtgaaaaaatgattaaaaaaatataataaattagttaatttcattaatgatgatatttttgtatagaaagataaattaaaacttaattttatatgtgattaaaatagtaatttttaaaaaattggttagtttattttaattacataaaatttaaaataaaatttttggtatagaagttgagttttaaatgaattcggccttaatgcttcaaacatacaaaagcgaagatatagagagcccatcaaaagtactagggaccaacagaaaatgttaagattttattaatagttcaatattctttttttaaaaatattataatacctgaattggacttgagccaaagttttacaaatcaaaacaacaaatacaaaacggaggcaagaatctgacaatatctccggtagacgagatcttacttcggcggtagttcaatattgttctaatgatttaacttgattgcttagattggatgatagaatgtatttctagtgttctaatttaattggttacttgaactttgatacccttctattgctatggtttttatacacttgtggcaatgagtgatattgtaaattaaattagaaaatatggtgctaagggatatgtgatataatgcatatatatccgagctactcgaaagtcgaaacagggtctaagcttccacctatggctaattgagtacttatgtgcatgaaacatgagcataagaggttgatggagctgttttactgtatgcatctttctgcaacccaaatccaaagagtagttgtaaatttcatgaaagtgaatgtaatgtctatagtcatgtcataatgttactgacagtccaagaggtgaagagcggtgtgcgggtgtctccaaaattgtatgtggtatattgtgtttttagtgtcttatgtcctttgtctagtgtttgttttgagttgtttgtcacatttttgttcgtttttaatgtatttttcggttgttttgtacaagttttacgaagttatactggaattggagactttttaagtgaaaaacagacgttaggagatgaaacggaaaaatggtgattcaagacaactccgatgaatgccatcagacaactttttgatgcttaattttaaattttctatcaaattccactggaaaatggcatcggacaattccctgattgagcaccaatataattgaaccctaccgcaagaagtattgcctcctataaaaacaagttgagaacattttcaatgcgagttgtctataaaattttcggttgcaaataaaatataaatattattattttggatccttaattacatttttcctactacttatagagcttacatatctgttgtttctacttttacttatttttttagttattgtgaaacaaaacatatatattaatttatacgaattaaaggttttcagtaccttataaaggttaaagactatttatttattttttatttaatacaaaatttggtatataagctccataaagggtagcaaatatttaatttaatacaaaattaattatatgtacataattatatatatatatatagtaacttagacacaattaaaatttgccttctccttatagtataattcaattatataatatatatatatatatatatatatgattttacttttcctcttttttaagttgataagaaacatacacaaaactatatatacaaattaataaaaatatgcatatttaacgtacatttggctcattctttgtgctatgaaactaagattaactaccaaagataatcccaaaagtcatgaacttatggttgatccttccttttggtggaacttattatccacagaattgtttttattcatttgagtattttttattactattgatgtcgacggtaatatatacttatatagaggttgaaactagtttattttattttttatgtatacacggaaaaattattttatcacattttatttttcaacatgtctctttgttctacatgtagaggttgaaactttccaccgcggcatcaagactcgatgcaatttgtgattagcagtttagagacttccttttgatttggctcagtttcttttaccctccctattgtgttttccactttcttaggctttgttagtaatgaaaaaaattaaaagattatgatcaatataagatcttctctgattagtttaaattagaagacaaacaaaattccggccaggtcctccgaagataaaactaacaaaaaaacaggagaatgaacattgacaaaatcaacatgagattaaggacaacgagagttccggccaggtcctccgaagtaaaagtggggctctgacatatatgttttccggtggagcagtgtagaataacagttgtactcatcagcatactcggatagaaactgggggtatttgagctgcatggaatagtccttgatcctaaggtttgtgtggaaacaagcttcggcccagatgtaagatgcccattgtccactccccattgcggttgtcgtgtgtggcttcttcaatactacgttagggctatgtacttctccaccccactgcacagctgtggcgctgtgttttaggtagttgaatagtgtacccggccaataacccaacacgttgttttcgcaagtcaaccaccagttcccactgtttggatcctacaaatacaatcgatcataaagcattaaaggacaatacaagcccgttccaaaacatattcaaaaaaatttaacaccggtttttggggcattaaccaaaagggacaattttataattttgtaaaattgtgtagaatgttgatcatatataaactagaaaatcttacaaggaatatgctaacggtgatgtgatattgcgtactagaggaactcgaaacaggttcaacggttgcaccaagggcaaattttttacttgtttgcacaaaacccgcgcataagagattgatgcaccctgttttagtgtatccatctgtctgaaaatccaaatagaaagcgtagttatataaactcacgtaagtgattgagatatttcaaagttggtagttatataaaagtgttactcacagtccaggagatgaagagacgggtacgtgagtctccgaaaacagctggattcacctgaaatataggattttgttaatcgggtcacggtttacttctaaagcaaagtataatacttttagcaatggaaacgtaccatccaaccaccttcaacgctctcaaaattctctgagagaccaccaaccagccagatctgggcagtactgtagtcggtagcttcaaccctcggagggttccaaatatttatatcagattgagctccgacaaaattgaaccctagggccacaataaatgcctcctataccatcatccacaaagcataagtgtttctagttaaccatatgaagcttttattagtcttaaaaaaatatatttaagaccttacactgtacgtaccgatcttaaccttggttgggcttcgtttatttttgcaggtgttatattgaaattacccttatgttgaagtgcgttgtctagaaagctgtatttgtgaggagttttcctcccaaaatgagacggtgaagaggctctgcttatgtcttctctactaactctacgaaccggtatggtccccattggacattttccggatttagaccaaatctgagattttatgtgttcagaagaaccgttgtttggtatagtagtcttctttgtaccaaatttcacactcggtttcatctgcatgcataaatgtggtttctttatatacaaagcaaaatataaccaaattttgtatatacaaaatctttgatttatatgatcgttatatagtagaatttgtttacctgaattttgtggttttttaaagcgggatgatcaaaggcatgttgtttatagatatctatacaatctattatatctccatcttcgctctacaaataaaattacaatcgatttggaaactcagaaaaccaaaaactataacaaagatgttatatattcgtattcagattcagtccataccttgatggtcttcaacgcaggtttattaagagccttcaatttcagatcaatatctaaagaacctttcccatatgcttcattgtaaaaaccacacaaaatcacaaagattaagaaaaatctcattgtggctgtttgtcttggagttcttaggatataggcttttgaatcttgaaacttcattcttataaaggttacaaaacaataaggtgttttttatataattaatgtgataatatcaatcacattaatatcaacacaaagattgagaaaaaacggaagtcatgacaacaatcatctgcagatttgggaaacttatatatggtaaacaaaatctttgatatgaaacagctcaacttaccaaatatgttttttatttattttaaaataactactcaccaaatatatatgaatgctctggtagttactactcctatattttgctttgcttttaattacgtcgatccaaaacacataagctttctcactaatataatatcactatttttagttcaatttagtttgagaaacttgactaaatatttctttttattgatgaaataacatatatatatatatatatattaatatgtgtatctgatcaataccatactaatatttcaatgtttttaattaatttttatgttaacttatatttttcattgaattttaaatctaatattaaattctaaacaaatattgataaataattttgaaatctcattttgttttcctatatattaatgtttgaatttaagcaatactaatactaatttgatgttattgtattaacgttaattaccattaataatttaacaaatagaaaattttatatgaggatttctaacataataaaaataatattatatatatatatatatatatcttattatataaagtatgattttcaaaataactaataggattatgcaacatgtcaattttattgatcttatttgacacgtatatagaaagttttttttattaatttaaaggctataaaaggataattgtaagaaattataaatttaaaaataagtataaggaaactaaattttttcaaaaaaatggatataggagaaaactagatgtatcttattaaatataaatagaaattaaaaaataatttactaatttttattagagtctactaagtttaaaacaaaacaaaaattacttttccttaaaattttaaaaggatttcagattttgtacaatcttattttataaaattcaataattttggaaattacaatcatttattaatcctaaaagggaaaagattccatatactcaaacaaatagataatttcctattttttcaccaaaccaaaaaactcttcaaaagcaccattacgccattctattgttaaaggtttttttttgttagtttgttgaatttgattttgttatttgttaactattttaatattaactataatatagatttgatatgatatgttatacatattagtttgatataattgcttttagcgtttattcatcaagatgaagtgtgtagaacaaaaatcaagtttattatgattaaataggtagttaaattgtattgcaaatgaaatgtgtaaattttgattttgttttcaagaaaaatgatgtagttttagtcatttggttgtgttgtgcaattaacaaatgacattcgtttcgatattgtggataaaatcaaaatttgcttatgttttgttgtggtctctttttatttctaaaaaaatcctttcattgggttatatatttttttgttaagcaatgaattc
